United States Patent Application Publication US 2006/0123505 A1 - sequence listing, part 8

SEQ ID NO: 14049 - DNA, 1380 bp, Oryza sativa
  ref <308>: DATABASE ACCESSION NUMBER: AK111397
  ref <309>: DATABASE ENTRY DATE: 2001-12-06
aagtcgcttacggagacatgtgagccgtgtcggcctcggcttccgcgcgaggaaaccgccgcgcggcgcttgcgattgcgcatgcgcacggtcgtggtttgctggctcgcgcactgtggcgcattcgccgggtttgataggcgatatcgcgtagtggcggggcgcggggcgcccgagcatacgagcgtacgaggcgggtattctcctcctgtgtctccggctatccgctatcttttgagatggcaacagctttgagcgtactgcggctactgcctgcacagtattgctttgagcgtacgatgactctattgaacgagtattgctttttctgcggcatggatttctgcgaaagcgacgtctcgtagcccgtaggagtggtttctaaattgtaacctcggtccaactgggtaaatacttctcctgaactgtagtacgctgctcctgtccgtgttgcccgtgacgcttgccgtattacccttgcctaaaaacagtcccgtggctgggctcgtgggcgctgccagagcaaggctggaaattttcctcgttctcagcaagcaggcagacaaaatttccaccgggtagacatctagacatgacgttgtattaacagttctctcggagagccaagaaaaggttgctgaataatcacaagccatgcatatctacctgcattctgaaactgctaataatgaagtaacgattgccgttgaagcagagatgttagtgcgttgcattcgctaatttgttcacttactgtaacaataaacactactgtacacacaaatccccgtcctgtcgcgactcgtcacgtcctagtgtgcgttcaacaatactagtactacaatgcggtgtaccgccggctcgactgtagtgtagggcacgcccttgtcagtcgccagcaagcacggacccaccctgattggcaagctcaagcatcggcgtagtagtactagcgttcatactccccatcatcctgtgtgtggagtactcctagtacgttgcaattgcaagtgctaacgcttttaagcagagagggcagccgggggcccaccacgccggtgcgatgacaggtggggccgacggagctactgttgcatccagcgcgccagtaaccccttttttttgacaaactggaccatcgatcgatcgatctatccagccgtgagcccatggccatgagtcatggctgactccggccatgagacaccgcagacacgagccacgcatggtccatgtctccccggttggttccggtgctccacgtctccacagcctgacccgcacagtggctgcaggcagtagccgcaggcgctgtgctgggttcggtttagttcggtcgctctggctggctggcctttcgcagtttggccccctcctacg

SEQ ID NO: 14050 - DNA, 1699 bp, Oryza sativa
  ref <308>: DATABASE ACCESSION NUMBER: AK111398
  ref <309>: DATABASE ENTRY DATE: 2001-12-06
ctcgctgcgctagggtttggaggcggcgtgaggtccgggaggcgacgcgaggtccgggaggcggctctagggtggagatccaggagcagcatatctccagccgctgccgctctccatcccgccctcggtcgccgacgatctccatccagcttcagccgccaccggtctccatcccgtcctcagccgccgccggtctccatcccgcttcagccgccgccaccgctctccttcccgctctccatcccagccagtcgccggcgctcgccatctctccttcctcgcttcggattcaccggttgcgggagagggcaaggtcgagggcaacagcccggacaccaagaagcaggagaggcacaggcgtgtggggttggcaaaagtaaagctgaaggagttgatattactcaagtgataaaatcagttcgagaatggcggatgaaattaaaaggaggagagaagaggacgatgatatgatgctttttgtttttcctgcgatgtatatgctgtgcggtatgacaaatagtgagaaaatacctagacatatctcaagactatccggtaaagagcggcttcaagaaatccttgaaggacatgtaatggattgtaaagttgcattccgcatggagcctcatgttttcaagacaatagcgaattatcttagagaggaaaagttgttaaaggatagtagaggcttgaggattgaggagaagcttgggatatttatgttcatgctcgctcacaatgcaagctttcaagatctacagtatgaattcaagcatagtgggtctacacttcatcggcatattaagtctattttcaagataatcccagctctcacctatagatttctcaagcttcctcatgccgaccaaacgcattggaagattagaacaaatcctcgcttctttccttacttcaagaattgcataggggctattgatggcactcacattcctataactatagatggagagaaggcagctccttataggaacagaaaagggactttgagccaaaatgtgatagttgcttgtgatttcgacctaaatttcacttttatctcatgtggttgggaggggtctgcaaccgatgctagggtccttagatcagcaatgaatagtggctttcaagtcccaaatggtaaattttttctagtagatggtggttatgccaacacaccatagttcattactccttatcgtggtgttcggtaccatctaaaggagtttggacgtggtcatcgtagacctagagactacaaggagttattcaatcatcgccatgccattctgagaaaccatgtagagagagctctaggggttctaaagaagcgatttcccatcctgaaagtaggcactttccatcggataaagaaccaagtgcggattccagcagctgctgcggtgttccacaacatgatccggttgcttaatggtgatgagggctggttggacaaccaacctgataatatagaacctactaattttgtcgatctaccagaaggtgacagtgaataccgaaatgatgtgccatctcttagcaatcaaatgatcagtgggaataatattagagatatgattgctaagaagatgtgggaagattatgttcgtaactagcaagaatagtatagataatattttggttttgcattatttgtatttatttatgcaatcaacatttatgatatggacaaattaatagt

SEQ ID NO: 14051 - DNA, 2005 bp, Oryza sativa
  ref <308>: DATABASE ACCESSION NUMBER: AK111399
  ref <309>: DATABASE ENTRY DATE: 2001-12-06
cgccgccgccggaggaggagcggagatggggaagaaggggaaggaggcggcgcgcggtggcggtggtgacgggggccaaccgcgggatcggctacgaggccgcgcgccagctcgcgacccacggcctccacgtcgtcctcacctcccgcgacgccgcgcgcggaagggacgccacggagcagatccgcgcggcggcggggaagcccggggtgagcgtggagtggcggcagctcgacgtgacggacgccgcctcggtggagggattcgcgacctgggtggagcgcacccatggcggcgtccatgtccttgttaacaatgcaggcgtaaacttcaatagaggagcagataactctgttgaatttgctgagcaagttattgagacaaattactttggcacaaaacggatgattgaagccatgatgccactaatgataacttctcctcatggtggtcggatagtgaatgtaagctcgaggcttggtagagtcaatggcagacgcaatagaatcggtgatccaagcctaagagagcgactattaaatgatgatcacttatccgaggagttgattaatgaaatggtcatgaaattcctcgaacaaaccaagcaagataattggtcctccggcaatgagtggcctcagatgtacactgactattcgatctcaaagcttgctgttaatgcttatacaagactcttggcaaggaggctgttggataggcctgagggacaaaagatctacattaactgtttctgtcctggctgggtaaagactgccatgactggttgggaagggaacatttcagctgaagaaggtgctgatactggagtatggctcgccctagtaccccaggagcaagctacaatcgggaagttctttgctgagagacgtgagataagtttctgaggggatcactattcaaacagcaaagtcaattgctcaaaagaaataaaaaaagaatgtcaaaagagccttatgtttataaactacttctactttgagacgtgctgacatgctctattacaaggcatttcatatgctcatttactggaggcagtaaattacccatctctcagaattactgttctgatgaaatttacttaatcaggcctatgctaatctatgaaggcgagtgataactgtttaaaagcaaaccagatgttggctgcaggttgtcaagatcattgacataccacattaatggaaggcccatgatctctaattttcctaatttatgagatcataccaactgtctctcggtcatgaatgaagtggctgaaaaagtggaatgttcaccaggaccactgggatggcaattgggaagcatggcgagctggcaggttccttgttgtaccaaaaggatgacctgtattgaactgcacgtcctatcaaagatctaggctggatttctggcaactccactatcaagccgatagtgttgtgattgctttgcaaattcttggtcttcactatgcagcattgatgtaccagtaagtaccattgcagactgaatgaatagaagtttacagctgtgattttggcgcatcaagtagagtataaatggattatttggacattttgggagaaggttgtaagcatgttgaagatgccagagtcagtcctcaatcggtcaaataatcttatcctctacagttggagatgaacacttgccatatggctgcatagcacattcaatctgtcaggtctgaaaattctggagaaaaggccatgaaacaagacagcatgatgttgcctagctggtgttaaatgcaccatgcctctgtgggcgccatcggtttctagagaggatgagccaaattcgtcttgttttgtaatttcactgctcccttcacatgcgtttgcctctgtcttcctgaaccatactacattgttgcatttgcatttgcatcctctgataggagctgcagttggacttgttcatgcatggagtagctttgagattgtacgttttggttagttgatcgatgtaagctggagttggtgct

SEQ ID NO: 14052 - DNA, 2148 bp, Oryza sativa
  ref <308>: DATABASE ACCESSION NUMBER: AK111400
  ref <309>: DATABASE ENTRY DATE: 2001-12-06
aaaaaaaaaaaacacactcacatcgacaattttgctgctggttatttttgttgtagtagtattttgctcggtggctattgttttgtagcaagcaggagttgttcagccctcagatggtgtggaatggatggaatctgaaatgatcttctgattgttttttaatttttttttgtgcagctgtgctaattggtccaattgctgccgccatcatctttttggggaattctgctgttattatcggcctgtggcctgctcatttcatatggacatactactgtgttctgaaagcggagcgtattggactagttttgaagatccttgctgcgatactgctgccattgcctttgctcctgttgccagtacttgctatttctgggagccttctgggtggtataggatatggagttttcattccactaatggcaactttcgaggctgtgggtgagggtgtcgcggacaagctcacccattgttttttggatggcacggtcagtacaacagccggagcttgcacggtggtgcgtgatgctaccgatttctgcttccactcatacttctctcttatggatgagctcataagaaaattgggagataatgaaactcctcttgacatcaaactgtcttatctaccacacagcatgcttgctgttcttattgctgttcctttcgacgtattcatgataagtggagtggcattgtggaaaagcccctgcatgttgttgaaaggatggcaaaggctgtgcgaggacttggttggaagggaaggaccgtttctagaaacagtctgtgttcctttcgctggtttgtctatcatattatggccacttgctgtaattggggcagtagttgcttcatttcttagcagcttcttttttggtatgcgtgctggattaattgcttatcaggaggcttctctccaaatgggactagcatatatggtttcagcagtagcattgttcgacgaatacacaaatgatatgctttacttaagagaaggctcatgttttccaaggcccaagtaccgaaaaaccgataggatgaataacgagactggtcagaacaatgaagtgcgcaatgctacatctccattgggagaaaagaaacaccaccataaaaccatgaaggctttgcagcgatcaaagacatttatggaagctatccagcggcttagaccaattcaaatatgggattggctcttccgatcttgtgagctgaatggaaggatattactgggtgagggattgattagtgctgaggacatggaagaatgtatcatcaaaggaaaatgcaagaaattaagcataaagttgcctgcctggtgcatccttcaatgcctgatacgatctgcaaaacatgattcgcatggtttgctcatatctgacgatgttgaagtgacaaacttcaactggcctaaagacaaagtgtttgactggatgcttggaccacttcttgttattaaggagcaaatgaagcaattagagctaactgaagatgaggaactatgcttaaggaggctcatcatgacaaataacaatgataaaccatctgactgggacgattgtggtttcccgtcaagcgataatataaggagagctcggctgcaagcgataatcagaaggttgcaaggcattgttgtcaatttgtcgtgggtaccgagcttcaggagacgattcatcgatctggttaaggcattgtatctcgaggcggtcgaggcaggcgcgatcgacggctcaaggagcgtgaagcgcaaaatcgaggctgatgctgcttctgctcctggaagcaagtttgatgacaaagatggggagggctcatcaaagggcgcagcagcagtgggcattgatgcagtgtgatatctactgtttgtgtacacgaaatttacctggcttccatcatgcattctgctgggcctttttttttttctggtaactgcctatgcatgttaatgtactggagacatcctgtaactctgtaagagatggcagaaaagggtcctatttggctgtatggcacctccaagtctccaacttcaaatctaacttcaaaacattttggagttggatctgggattaggttaggtgctaatgtgagactttctgttcatactttgtattaagattagattattaattcactttaatttatttt

SEQ ID NO: 14053 - DNA, 1689 bp, Oryza sativa
  ref <308>: DATABASE ACCESSION NUMBER: AK111401
  ref <309>: DATABASE ENTRY DATE: 2001-12-06
gtcaaggaaaccacatctgaagttgtgaacccccaatccaattccaatctccccctttcatcagcgccatggctctctcctccttctccatgtccctccccttcgccaagctgccttccacctccaaatccacccgcttccttcccatccgggcctcctctgccgccgccgccgcctccccttccttcgatttgcgcctctattggacatccctgatcgccgatgtggaggccgagctcgacgccgcgatgcccatccgcacgccggagagaatccactccgccatgcgctacgccgtcctcccgggcgccggcaacgagggcaccgccaagcgcgcgcccccggtcctctgcgtcgccgcctgcgagctcctcggcgcgccgcgcgaggccgcgctccccgccgctgtggccctcgagatgctccacgcggcgtcgctcgtgcacgacgacctcccatgcttcgacgccgcgcccacccgccgcgggcgcccctccacccacgccgcctacggcaccgacatggccgtcctcgccggggacgcgctcttccccctcgcctacacccacgtcatcgcccacactccgtcgcccgaccccgtaccccacgccgtcctcctccgcgtcctcggggagctagcgcgcgccgtgggatccacaggcatggcggccggccaattcctcgacctcgccggcgccaccgccctcggcgaggccgaggtcatgaaggttctgacgaagaagttcggcgagatggcggagtgctccgccgcctgcggcgccatgctgggaggcgcggggcccgacgaggaggccgcgctgcggcgctacggccgcaccatcggcgtcctgtaccagctcgtcgacgacatccggagcgcgtcgggcaacggcaagatgaggagcaatgccagcgtcctgcgcgcgctgggcatggatcgagcgctcggcatcgtagaggagctcaaagcgcaggccaagatggaggccgacaggttcggtgacaagtatggcgaaagggtgcttcccttgtacagcttcgtggactatgcggtggagaggggattcgagctgcaggatgcagctacaacgccgtaggcacggaccgcgcagaccaaccttgatgctaccggatatttgaagttctgagcaagtggttatatatggagttatatgctgctgagatttgttctattcaggtacgacgcagcacacatcacaccggactgggatcctctaggtcaggtgactttagagtcactccacaccactggtcagataatcccacatctctccacaatccctgaattacttgcacccggacccaacatggatgcagccatggctgccccctctattctagcacgcgatggaaggcgcaaccatttaaacagaaaccagccggtggccggtgcttcatgcgcaccaccagagccggcgccgatctacatctccaccagagtatcagatacaaaaaccagagtatcagactcgacgaacgacgcagcaggccattggcctcgcagcttcacggcaagggtcgttggttgcctgggctagccgtcggaatcagaaataggagttcacccattgaactttttattactgctttcaccatttggaatgaaaactctttatctctgtatctacgttatccatcaactacacagcaccagtaattacatactgc

SEQ ID NO: 14054 - DNA, 1701 bp, Oryza sativa
  ref <308>: DATABASE ACCESSION NUMBER: AK111402
  ref <309>: DATABASE ENTRY DATE: 2001-12-06
atgtactcctgtttcccccaattccttcccaccaccggccacctctagcgtatcgcctggtccttccatgccatgcctgctggtcccccaaccccccatctccaagctctttctctccctgctggctccccatcttcacctcgtggcggcatctggtcatgcacctcggccacagcgcagctcgagcagtcgacggggtggagtggcctcggcagcggcacggattggactcggcgacggtggtatacttccggtcagtctctcgtccggatctacttccgacaagcctctcgtccggatctagggccttgcagcggtaatcactggatctggggtctccgcggctggatgccctctcctgcttcgtcgttgcggtggcaatcaccagatctggggcctctgcgcctggattcggttgatgggagttttggagcgaggatggaggtgtgtttgagaataatcacccctcgtctgctgactcgtccccatcgcccgaccggtccacggggttccaggcaacatgcatcgcggcgtctcggcatggagggtgcacagtgttggggttcagctacggcagcttcgtggtgttcgttgcctgctgtggggtgctttgtgttgtggatagtgggcgtggaccagaagctgattatgtgttttcaccgcgcgaaattggtaagctctacggactcttgaactactataagttatttagataatcatgaaaagatacatgtctgattaatcaggtagtcaattatctatttctttgaggtgatacatagaagcatgtctcttacaccttgaggcatactgctctcacattcattctcttggtacgccaatagttctactaagaaatgcttccttagctcatatccatcctgtatatgcatttatttatgtaagcgaacaaggttagcactgtatgtgtaaaaaggtagtagcatttaaatagtcaatgctaagtgtcacgatacttgcctttataattggtaactgcaattcttcatctttccatttgcgcatgaagagggacacaagataaccagatagttcgctaagaaaaatttaattgttaattaattttgttttagggaaataaattaactggttgtacaatggagtttaaaagaaagtttacccgttgttaattggaacatttggtagaattatttgacgccataggttgatatcctcgttccatcttgacccaaggcatgcttttgccattgcttttggcaagtgtttggcaatccatagtagttttttgacatatcttgcatttgggttgttctcataaattggttcaagcggagtcgggtctaatatatagacgtttctggtatcttggtccaatacgatcaaaatgaaaaatttatagaattctattggcataagaatctgtaaaagctaactgttaggatagaaaaaaatcatggccatgatgagcaaatggaagagaacttaccaatctgcattttgaaattttgtagtcaatcccaggccaattacaaactgactttgctagccgttcagtgtcgagcttttgacgaaagtttgggtgttgtccaaaattggtagtcatctttgtatataattgtgcaaaaatgatatacaacatgaggcaaaggggataatacatgtgattataaaggcatactcaaaattgcaaaacggaataatacacgtgattgtaaaaac

SEQ ID NO: 14055 - DNA, 1493 bp, Oryza sativa
  ref <308>: DATABASE ACCESSION NUMBER: AK111403
  ref <309>: DATABASE ENTRY DATE: 2001-12-06
acacttcacacttcttgtttgatcaatcacagagacagagagagagagatggcttggaatggcaggtttggagaggatggagaggaagagaggagccttgagctcagccttgccctccctggatacttctccagctcaggtcaccacctcccttgctctcttcttgattcatcttgccctcaaagtttcctgctttgtttgatcatatctgtgtgttttgtcctatgctttacatttctggtggattttcatttctcaggtttgcaggggaacacgagcactgctgctgatggagccaagggaaacgatgggttcaaggcaaggtgatgaaaattttctggtttttttttgggagcagtctgtttgctcgcaacaacatttttctgacgaatctgcagcaaaaagatgctaaaatttgcccctaaattctctgcgattcgcagcaggccggcggctccggtggtcgggtggccgccggtgcggtcgttccggcggaacctcgcctcgtcgtcgtcgtcgtcgaagccgccgcgtggaggccgagacgccgccgccgccgccacgggaggcaaggtggcccggttcgtcaaggtgaacatggacggcgtcccgatcggccggaaggtcgacctggcggcgcacggcggctacggcgagctctccgccgccgtcgaccgtctcttccgcggcctcctcgccggtaaaccccaccacctcgacattatatatcatcggagttttctatctcgagctttctcttgatggtgtttgctcgcttgcttgctcgcgttggcagctcaaagggacccaaccatggccaccgccgccgccgccgccgctgccggcgagagctgcacaggagaggaggaggcgatcgccgggctcctcgacggcggcagcggcgagtacacgctcgtctacgaggacgacgagggcgaccagatgctcgtcggcgacgtgccatggaagtgagtccgacacacacacacaccatgaatgaatctctcgtcttctccaaagctaatggcgacgaattcttgattgattgcagcatgttcatcgccgcggcgaggaggctgcgcgtgctcaggagctccgacctgaacgcctccacggtcagcgaaatttctggttttctgctcctttttcttgagaaatttgatcgattctgacccgtgatttttgttcttgatcttgtttttgcagatacgagcagggagcaggaagagggcagctgccgagtgatcttgatcttgtttttttcatcgccgggagcagagcaggaagcatatctgcatagtgattatgatagctctctgttttgtttttaatccttttctcttcgcgttcttggaagatttttgtgtacaaaaatgcgcaagaagcgtctttttttggggatcatgatgttgtcgactacgactaggacaagatgtaatcgagaatggaaattgttagtactattaattaggatcaagttcatctgttcttgc

SEQ ID NO: 14056 - DNA, 1416 bp, Oryza sativa
  ref <308>: DATABASE ACCESSION NUMBER: AK111404
  ref <309>: DATABASE ENTRY DATE: 2001-12-06
gcttctctcgtcccttcgcctcctctcgttccccttcctctctacagtaacctctccaaaatctctcccttccggcccctcttccccttcgattccgatggttcgccgccggcgagggttggaggaggggtccggccaccttcccctagtagtatttagtcaggtttgtcctgttcgtagctagtctcgtgtcctagagtttgccggtgttgcctcccatggtggcggccggtgtggtggtccttgatggcggtggtggttggagctggtggctttgtgcctctatgatggggaatcgaagctctggtgggggattcaccctcccgctttggtcccaaagggtggtgaagattccagatctgagttaccttggtggtgatggaggcggttccagcggcggttgctggaggtgccctgcgtgcgtgtgggcacacgctggtggtggcaactacgtcgcgctcggcgttgtggcggtcgtcgtctccctccgttgtacttgtgctggaggtggcgacggcgtgtacgccgcccttggcgttgctgcggtcatcgtctcccttcgtcgtgcttgcgctggcagtggcgacagcgtgtgcacggcgctcggtgccgctgcggtcgtcgtctcccttcgtcgtgctcctgtcgtctgctgcgccccagcttgcgctgcccctgttgcagcctctgcctctgttggcagcagccatggttggttagatgacgacaatctcctccaagtcaatgtctttgggatttttgtgattgggtgtttgcttcggctagattcttgtggttccaagttgcaggtcacctccttcttagccatcgtcgtcctcacagcaagacataagtcaattggcaacctctcaaatgccccattgttgatggttggctggtctatggtttggccctctcttttgtttcctagcagcagaaaccgcgtatagtttgtcattcgggttgagctcggaacccctgtgcaattttcattatcagggttgttgttagagttcctcagattcaatgacgaatcccgtggggatgcttcgctgaatccggtgatgctcgcaccaaaatctatggctcaacaattatcctcgatcttgtgccgttcccgtgaaggcaaccaaaggggatcaacggtttgtcaagcggtgtgcaattcaactgaggcccaaggtagcagtcgtcgcggttttaagacgtcgtggctctacaatcgtcacggcatcaacgcagctccctatcggcttgctcctttttctgctattttgttacatctggaaggcttccatagtttggttaatcctctttctttagggttgtctctaatgctttcagctactatcctttgttgtgtactggggtttatcccctaatatctgttcttacttaataaagttgtttgtgttt

SEQ ID NO: 14057 - DNA, 618 bp, Oryza sativa
  ref <308>: DATABASE ACCESSION NUMBER: AK111405
  ref <309>: DATABASE ENTRY DATE: 2001-12-06
gtcaatgcgccagccgtgtccatggagagaggctgaggtggccgagctccggcccaggtaccgggtcgccgggacggcgaagatgtccgcttcgttagtccgggccactgtccgggctgtgagcaagaggaagctgcagcccacccgggccgccctcaccctgacaccttcagcagtaaacaagataaaacaacttcttaaagataagcctgaacacgtaggtgtgaaagttggtgtccgaaccaggggttgtaatggcctttcctacactctagaatatacaaagacaaaaggagactctgatgaagaagttgttcaagatggagtcagagtgttcatcgagaagaaagcacagctaacacttttaggaacagaaatggactatgttgaagacaaattatccagcgagtttgtgttcaataacccaaacatcaaagggacatgtggctgtggagaaagctttaacatctgactcctcaggactgctcgggccgttggccccaggagagctgcggatgctctggggcttattggagaaatcatgtgactgtcacgtgcttaaggtttgtaacgtatgactgccttacaaggaaaataaagtgatgcattttgaagacg

SEQ ID NO: 14058 - DNA, 1428 bp, Oryza sativa
  ref <308>: DATABASE ACCESSION NUMBER: AK111406
  ref <309>: DATABASE ENTRY DATE: 2001-12-06
tatgttgagatttgagaatgatctccttgctaccatggatggcaatgaggtgcatatttacacatgattaatgcctactttgatgtccatatgctaagtattagcttgctgaaatttatttgaaagtaaatatgatttgaaagtgttttatgcaaataaaacttgctttatgctaaaaagaaccatattataccttccttgattatatgccttacaagtagggtgttagacttgtcttggtgcttgccagtacgttatttctaataatgtgctgactcttgctattggattaactatttgtttgtaggtcttagacttagtctttcgagtgacgcgggtattcgtctgcttcttctaggacttgaacttaatgggggtaaacccctaatcggtgtgcttgtggtttgggtagacaagtttccgttgttctctcatatatatatttggccggtcggcctatgtaactattaggttgatgtaagtcttcaagtccctttcgtcttaaatgtgtttgctatgtatgtccatgcttaagatgaaagtgtgaatctagtgcacatcgtgaatctagtgcacattctgggaattagattcatatgagtatgagttaagaatatttgagatgttgtagatctttagctattttgtcaagtctcctaaatgtgtaacacatctggtcgtggccttcgagttgtttaacgggcgcatctcagtttgaagttgacgggcaggttaaaggccccacaatattttcaatattcttctattaagacgtcggatattttattatatttgtttgatgacttgaattatttactttatcccttaaatataatgaaaggtcggagagcctacgacctacccgcggcctacagcttccgtcaacccgccttcgttgcgaagtttgtctccctcctcatcgctgacgcccaggacgtccccacgctcgcctaccagctcctcctcgtctcatctgctgcatgcctcctccgcttcatcggcagccacatcacgcggcaggtggaggggactgtgcttatgcacgtcaccctcgcagacaagcaggaacacgcgctggcaagggaggttgtggtcgccatcaaggctgacgcgggtgggacgttccgtagattcgcggtggttgttctactgtctgtggaggtttaatgacgacgccgtgggcatgctctgggacgctgtttattttctgttaaggagatcagtaccttttcagtcttcagggtgtgaatatatacaagatatgttgatataacctgtagaagactcatttattttgagtactccagtagctatcactcctcgctaggtcatatatatagtatgtttctggtaattttgattgaactaattaatgatctgtgactgttgcatgtatagtttgtaagctgcaaccagtgagtactacac

SEQ ID NO: 14059 - DNA, 1517 bp, Oryza sativa
  ref <308>: DATABASE ACCESSION NUMBER: AK111407
  ref <309>: DATABASE ENTRY DATE: 2001-12-06
gaagcgaagcatattcctccgtcttctccccgcccgggtgtcgctctcctcctcgtcgccgtcgccggtcgtcgccggtcgcgggtggcgcgcaacccggagtctctgccggctgcttactcgccgcgggcttcagcttcctcctcgatctccggcgcgcctccaagctgcagatcggccgacccccccagtgtgttgaagcctgcccttgacacttagcaactgcagagtcctgctggagagagatggggttcatcggcgacacgatagagtcaatccgctcgatgcaggtccgccaggtgctggcgcaaatcatcagcttaggtatgattgttacctctgcattgatcatatggaagggtttaatagttgtaacaggtagtgaatctccagtggtggtggttctttctggtagcatggaacctggatttaaaagaggtgacatcctgtttttgcacatgagcaaagaccctatccgcactggagaaatagttgtttttaatgttgatggccgtgaaattccaattgttcaccgtgtgatcaaggttcatgaacgccaggagagtgcagaagttgacatcctcacaaaaggtgataacaattttggggatgaccgacttctgtatgcacatgggcagctttggcttcagcaacatcatattatggggcgagctgttggttttctgccatatgttggatgggttacaattatcatgactgagaagccaattattaagtaccttctgatcggcgcgctgggcctactggttataacatcaaaggagtaataaagatgcggcttttcagtagagtagtggcctctctagtcgcatggaagaagctggtatttgtttcaccatgtttccaatggaagatgcgaggggtttatttttaggataactgtgcgacaattggcattgtattttccagcggtttatcatgtggcatccatctttcagtggtttacagttaattgcgcaagaaaatttaacgtgacttttggttcggcaactggttattggatgctgactttgatacaatataagatgaattcataaagcaatcctttgaggcaagtagaatcgaacctggctaagcctttttccatggatttgttggagtcttgactcttgagtgctaaatccctttcttggttaccaactgctattcagcggcagttcttttcactattgtatctgtcttctcaatccaaactatgctgaagtctgatcactgaatagcagcgcggctgtgatggttcattgaatactttgttgaatgctagtagctcatgtgccataaagccctaacagaatactggtgagatctcaacatgcacatatatgcttgtacttgtgtgagattgaggcaaatatttctgtgtatagtaagtatatgtgaaaaggagaactcgagccatattatagatctccagcccattaaatcgtatccagaatattgatatggtgttgtctttttggataaaagaagttcgtttggacgtggtctcttttgac

SEQ ID NO: 14060 - DNA, 1484 bp, Oryza sativa
  ref <308>: DATABASE ACCESSION NUMBER: AK111408
  ref <309>: DATABASE ENTRY DATE: 2001-12-06
aaaaagggtgaggatgctgaccggcaacgaggaagacgacccaccgctgccagctcccttagcacaaccatctgggcctgcgccaacggtggaaacgttgccgctctggctccggtgccacccgcctgcgctcccattgcccagccgccgctccccacctagccaccacggcggcatcccggttgcccagccgtcgaggcctggccgctcgcgcccgcaccggcgagccacggccgccgcgcccagccgccactcgcccactcctcatcgccgtcgaaggctcggctggaaccggactgcacgcctgcgccgtgcgcgttcgcaccccgccggacggacgcaccccctgcctccatgcccgcgccggcgctcggcctcctcgccagtgccgctccccgccgccatgccactgctgttccccgccgccacgccactgccgctccccgccgccctcccaccgccgatggttcgggggccagcctcccacgccggggaggccggatccggaggggaggggagcggatctggtcgtcggccgccgctctgcgccgttggcacctcctgcccgagctcacgccgcgctgcacgccgtcgcccccgccgcacgcaccgcacgccgccgcccccgccggtggggctgtttccgggcggggcggtgccggatccgtcgcctggcgccggagaagtcgtcgcaccgtgcaccgccgaccgtcgcctcccgaacgatgcgctgctccgcctcctgcgtcgaggaggacctccgccggcttgatttccccgccgccaccttcccagccggccgcgcggtttccggcggcggcgaggcgtcgagagaggtggggaggggtggcggcgcggttggctagggtttcgccccaagccgcccgcgcgagagcgacgcggggcgcgcgcgagtcatcctccacctaaaagaaactacagacatgaataagagctgggctctgagatggtcaatcttgcataaacaaaccactggcatcatgctaacatgccagagatgagagccaataatcttctcaaagcaggtgagtgaagtgaagcataaaacttctactcttacaggctgcatatacattcactgaaagttctgaaagtagcaagaaaattaatatgcagaagcccgaaggtttagacagattatgctgtcaaattgcacaatgatgcagtctatttcatgtcttagattattttatgtatcacaatctgcagcatatcaggcatactccctttagacatggaagtactatagaattgcctactgcaagcttacaaataggagtacattcagagatgtaatgagaatgcctataatgagtttgtaatgtgaattttctgcacaaaattgtactccaagtagcagttcagatgcctgggcagacgtgaagtccataaatactcaatatgtttgttgatctcaatatcagtttgagggaatacaatatgttgatctgtttttttttttt

SEQ ID NO: 14061 - DNA, 1567 bp, Oryza sativa
  ref <308>: DATABASE ACCESSION NUMBER: AK111409
  ref <309>: DATABASE ENTRY DATE: 2001-12-06
tgactttttttgttcgtttgatcgtactaaaattagtattttcctttctcaggcataactgaactttttgttagtttgatcttactaaaattggaggcaaatccaacacccatgcacaaaaataaataaattaattttaaagaatatatgagacaacatcatagttttcagtttgttgttttcttaggaaaaaaaatacatgtatgaagaatctgaattctgatataatgctactactagagcctggagaaactctagccatattctaattcttctttctttctctttttttttttacatccttcaaattgtcatagttcgatttccatgagcctgtaagcattggaggcgacgaaatggcagttggtagagcataagcatgaacagtggcagacatataaaatttgtcctaatgaattttcctactacagttttaaaacaatcgatatttgacaaaatatttatgtgttccatcttgcatattagaacaagctatttgatccatttgtgttctccattttattgaaattcagggtatcgttggtgaggtgtaacttgccaaggactgcatcttcatcattgcctgggtgtccacctcgctgatctcgtccacgccaccataactccatcagcaagcctcactgatctgctccgcttcgcctccgggactccatcccctgcttctctgatctgggacgccgacgagccatggactcctgcatcgaagcactgccacctcctccgccttgagcatcactgtcgccatgaggtcattgaatgcccatgcccccttttgcaaatacctacttgtttttcaagtttatgttgaatgaagctatcagttctctttctgttcgatttgccaccactatttgataacctaggaatggcaggtaatgccaatgctcccaggttgcattgctctgtttttttcctagaagatagagtattatatgttgcttcactgaaatagtaggtctggccattattaccatgcacccgctcaaaatagcatgtctgatctggggcctgggtgcatatccaagtcactatcgatcgcctgctgtccggtctccgtcgccccttcatcaggttgacgtcgatgcgtcgccaacgctgcgccttgctgcagtacactctggtattgtagcccatcctctttcacgtttatacattctctctttgaagttgaaggaaagtaaattacaattttctgtgtatacgttgcatttttccttagagatggtatatgctgctttatttcctataggggtatatactgaattttatacagcagtatatgctgtaattttccatagaggtatgtactgacattatagtatacatatgcttctattttccatagggaggtatgtaatgatattacagtatatgctaaattttctatagagatactaggatttgggaaaatcaatgacacacaggtatttcattaagcgcctcatgatctggtttggtctgcttatgatatcagcagggaatcactaatttataagagcttggtgatgttactaatttaactgcacatgtgtaacaccctaaaaag

SEQ ID NO: 14062 - DNA, 1392 bp, Oryza sativa
  ref <308>: DATABASE ACCESSION NUMBER: AK111410
  ref <309>: DATABASE ENTRY DATE: 2001-12-06
tagtcctagatgggatataaccttgttcaacgattctggacagcgctttgtctagattcattggactaggatgtgtctcatctagtcataagttgttatattttgggacggagggagtattactgtaggtactctagggtgaacccgagtccatgtcaaatgatcgtgaagctagcaatgtcagaagagggagcaaacagccagccggattctgcgtcgagccgtcggcacgaacgtcgccgtagcagcagccagcaatgcacccccccctctctcctgttgctgcatgccgatgacggcatccacaaaccatcataggcgtcgcatccacacctgtttccatcgtccgtcaccacgtgcaaccctatcgccgctgccggcccggccggtgagccatccatccatccatcgccgcccccaccgttggtgttgacggcgacgacgtacgtacacccggccggcgacgacggcgaccgcctcccaatgatgccactgatgctcgtccttccgtccttcccatgcagagtagtctgcagcagttgataagttctcgcttttggtttttcttgcagggtttgcagtttggcgcatctgagagcgcgtgcagggccgcacatggcgaggcggtggtgcggcggcggcggaggggggaggggaggtggcggagcgggcggagggggagtaaattctgggccaatgggaggcgccggttcgtcgtcgtcgggtagtgtcatgcgtgcatgcgtgcagcatgtggccttccgtgcgctggtgcgttgaggtgcctgtggctgccggcgctgcggccacatgcgaagctatgcgcctacgcttccagtggcaatggcatggcactctctatggcagcacgcggcgcgcttaacggcgggaggtaagctgccgctctgggctggagctgtcgtgtaatcacctctatatgccggcccatgcgtgtagaaagcgagagtactgcgaagtcaaagtgggggacatgagccgtagctgttgttttctcttgcaaccgcgtgatctggtgaggtcagagtcgttgtgctccacgagtggattaccaaactgcaatgttattaatgtgttaccgtgcaagaagccaaagtgcaaacggacaagtactcacgcaggaaaattcgtgattgaaattcggactttcagagtgactggaacaaggtacgtaattttctatgttgtttgaacggtttcgtaatctagttgtttgttcgtcaaaaccttttttaagtaatcttatgtagctcttgtgtaagtgtgtaactcttggctatgtatattcctggtagatgtagaggtaggatttaatcaatccgttttctcctgtaataatattttttaaaaatatatttatataaagaatgaaat

SEQ ID NO: 14063 - DNA, 2441 bp, Oryza sativa
  ref <308>: DATABASE ACCESSION NUMBER: AK111411
  ref <309>: DATABASE ENTRY DATE: 2001-12-06
aaactcctccgaaacctcccacaaatggcgggctcttcctccccaacctgaaaccccaaaccctaacccccccaatccggcgacccccctccaccgcagcggcctctccagcccctcgccgatggcgccggaggcgaggcaactcaaggtgcacctccgggagaacgaggcggtcgcgcaatgcgtcctggagaagtggcgctcgatggaggagaagccgggcggcctcaaggagaacctggctcacacgctctacaaatcctaccgcaacgtctgcgccgccaaggagcccatccgatccctcaaggacctgtatcagatcaagggcgttgggaaatgggtcataaggcaactgaaaggatcctttccagagtctagtccagatttatctcccccggaaagtaatgcagcaggagaaaaggggaagaaagcaggagggtcaaagcgttatgtgccacagaagaattctgctgcttacgcgatactgatcacgctccatagggaaacaatcaatgggaagagtcatatgaagaagcaagagcttattgacgccactgaagcaagtggcctgtcacgaagtgcaattggtccagacaaaagtaaagcaaaaccaggggcttttgcaagttctcagaaggactggtacactggatggagctgcatgaaaacattgacatctaaaggactggttgcaaagtccggtaaccctgcaaagtatatgataactgaagaagggaaatcgactgctcttgaatgtctctcaaggtctgggttagatgatcatgcagcacctttggtgataaacagtgctcccgacacatctaatgcaagtcataagttgaataatatttgcatgacttcttttgttgagacatcatccggaccttctagggcaattggtagacccaaaacatctattgccaactctgccactaagacatcaccagaagtgacatatttgacaagtcaagaatcactcaattacaactctgatgttagaactgctgagaactgtgctgaagaaatcattcttagtgactcagattctgaagaattatatacagagaactatcctctaataggttctgaagaatttactgagagggttgcccctccaatattgaatgcaagcaactctggcaagactactacaaattacagattctcagactgttcagcttctatttctcctcgttcgtctgaaggaacatttgagatgcagtcttctagtacaatgggtattgctgaattcaatatgctggacaatgatactgtatgtatggacaattctatactagccatgccacctcggcgatccagtaaaaattttcttgaagattatgaagttgtgttgatattggatgatcgtgaaaattttgggggtcgttcaagaaaaactgttgataacatacattcacaatttcgtgtacctgtagagataaagcatttgcctgttggggatggtatttggattgctcgtgatagaaagcttcacacagagtatgttcttgatttcattgttgaaaggaagaatgttgcagatttgtgtagttcaatcacagacaaccgatacaaagatcagaagttaaggctcaagaaatgtggcctaaggaagctgatatatctggttgaaggtgatccaaaccctcttgatacatcagaaaggatcaaaactgcctgcttcaccactgaaattcttgaaggatttgatgtccagagaacccctgggtatgctgagactgtaaggacatatggcaaccttactcattcaataaccgaatactacagcacacacttttctactggtgctaatacttctcaagtttgcctgacctatgatgagtttacgaagaagtgtgatgaccttaagaagataactgtgagtgatgtattcgcccttcaacttatgcaggtgccacaagtgacagaagaagctgcacttgctgtgatagggctctatccaactcttttctcacttgctaaggcgtactctatgcttgatggtgatacccatgcccaagagaagatgttgaagaacaagagcacgctgataaatgcaggggctagcagaaacatattcaagcttgtctgggctgaaggataaattcttcagtttattttccgattaactggtttaaccatttttttggtcatcttcttggtgactctgatggatccaccagtgaagctccccaattctcagttctcactgcaactctttcatgtcctgaaggcaaacggggtccttttttgtgtgccaaggtgccatggaacacaactaaccacctacatagggactttgcaagttagcttatccgcgtaggttcacccccatctaggtagactaattatcttttgtagactccaggttgtacaaaatggaattatcatggaacggggccgtttagcgtttcacatctgtttactcggttgcttggatt

SEQ ID NO: 14064 - DNA, 1435 bp, Oryza sativa
  ref <308>: DATABASE ACCESSION NUMBER: AK111412
  ref <309>: DATABASE ENTRY DATE: 2001-12-06
gtgtacgcggcgtcgtcagcccactcgccgcacatcctcggcgaggtcgccggcgatggcgccgccaccgccagggcggcagcggctgccctgcgacggcgaggaggacgcccccccccctctccaccgccgccggtgagggcctcctccgtccagcgatcgcttccggcgggacgtacggggcccgccgcgagcctgatatactggctgctgatgtagcagaagaacgttgattcatgagaaagtaatatggcagaaaaggtttgatttcagagaatcgtaattttgggacaattggagctgcatttctcagcgcctcctggctgcagtctctctctgggcattgaagtagacagcagccacaggaaggccaagatcattctcctcggcgaaccggcgggtgttgaaatggtccctgaaggatggcacaattacagtttgcctgcgcttctgcttgaagagcacaaaaatgaacctatggatgccaatgttcggctttggactctcatagcttatgacctcgcgtccttcaatcggaaagtggtacagttgtttattcacaaggagaaactcaatgaataagatggaaaaaaaaaactgacacaaattagaggaaggacctaccaaaagaagcatccgttgtcccaggtatatcagtaacaatcctgcgtaaatgttaagcagaaaaaaatgcttcaccacctgcgtggaagtgtctgcgccctcaaatgttcatctttgcacaccttgtttatttagatggtgattcttcctgtttgccgtcgaaaccgtcgttactcgacacctcgaaatgcctcgacgaaactgcgctgtccaccaaacgtcagcccctcaaaatgacagctgtggtaagttgaatgcatgttgatgggaggatcattgtgggggcaacctgtgggaggcagcaaagatattcagatgatggcaggcagactttggagggaggattgccatgacccaatggaatatccatgaatcagtgattcggcatgtctcggccgtcggttgaatctaggtgctgactggttttgagccttgagatccctgtggaactatggattcacttcatggatggatgagtgtggattcacttcatggatggatgaggcatgaggagctgtagaagcatcaaaattttacccacttttgacgacaaaatcgctagttagtggaaatgtgagttttctttgatccttcttgaagcactcctcttttgtcaaatcgatgaacgctgacaacattgcaatgaagggatttatgctcatacccatactacaggttcagagttgttttgttaatgaattattacttgtctatatagttctctgtgaattgaccagttgatgacaatttgagtttctgtactcgattccaaattcaatgaataattctttctagggggagggttgattac

SEQ ID NO: 14065 - DNA, 764 bp, Oryza sativa
  ref <308>: DATABASE ACCESSION NUMBER: AK111413
  ref <309>: DATABASE ENTRY DATE: 2001-12-06
gatgatttttgctcctggtttttatggggttgctctttgattttttttttctcctggttgagttctttgatttgtcgggttaaatcttggtgaggagcgccgcacgggagagtttcctcaagatccagccttcccccctgttgaggttgtcagcaaggcagggactattgtcgccggtgagcttgtggacgacagaggaagttgagcttatggatggcgacaacgatggatggcaccagcccaatgctgtcgatcccatcccattcgtcactacctcgcctcaaggtccctacccctgcccgtcccgcccccatcctcgccacaggaggtggctgctcctcctaccgcccccatcctcgcgtcctggacgacggagttggccgggaggatatgtgcggcgttgttcaggtggtcgtggtctccagatccgccagaacttcattgttcgctgccatgccccatgccgtcgccggtggcctgaccacattgcttgctgctatgacctgagttgctgcttctaggaggataagggtggggagaagatgaacgggagagaggaagaagacaagggcacttcggtcaaaatatttgagaaaataccctgaaggggtaagtagtggcacatattgaaagcggtgaaattataatgtcatggttttaaatagttgaatagtaatggtatatatcaaaaccataaaagttgtaatggcatgtatccaattaaccattaaaaatatattttttttggttatttgatttttatt

SEQ ID NO: 14066 - DNA, 1164 bp, Oryza sativa
  ref <308>: DATABASE ACCESSION NUMBER: AK111414
  ref <309>: DATABASE ENTRY DATE: 2001-12-06
acctcgctctcctcgtcaccgcgatcgatcgatcgccgccggtttagatttccttcctacgcggaccgcacccacgcgctaggtttagctagctagtttgcttgcgcgcaagcgtcgatcgagctagctagtgaagatagatatgtgcggcggcgccatcccgctgatcagcagccgcggccccggcggcaagaggagcctctccgccgccgatgagctctggccgccgccgccgcagcacgccagcgacgacccggccgagcaagcggcggcggatgaggaggagcaggagcagcagccggcggcgaggaggcagcggcgaggggagcggaggacgctgtaccggggcatccggcgcaggccgtgggggaaatgggcggcggagatccgcgacccggccaagggcgcccgcgtctggctcggcaccttcgccaccgccgaggctgccgcgcgggcctacgaccgcgccgcccgccgcatccgcggcaccaaggccaaggtcaacttccccaacgaggacaacgccttcgccgccgcgccgccgccgtaccacctcgccgcctactacggcgacgcctcctccacctcctacctctacccgatggccatgacgcccgccgccgccggactgagggagcagcagctgatgacgacgacggcggtggagtacagcgttaatgacgccgtcgacgtggccagcgtttacttccagccgccgccgccggcggttgcttacgagttcagcgccgtcggcggtggcgccgtcgtcgtgccggtgtcggcggtggcgccggcgatgacgtacggacagagccaagaggtggcggctccgctcatgtggaatttcgatgacatcacggccatgccaatgtgattgtcttaccgtggagattaaggcatttaaaggcttatagataacataaatttgccatgtatgatcaatggttaattcctattgctcaagggcttatattaagggttacctacacggcatggctagcttagcctacaatttatgtttcttgcatttctttctctttttttgagatgagctagtgtgttatactatttgttcatcttttctggtagtggtggatacattttcgccggctagggttggaatttgtaaatagaagatggtcaataataagattgtttctggct

SEQ ID NO: 14067 - DNA, 1346 bp, Oryza sativa
  ref <308>: DATABASE ACCESSION NUMBER: AK111415
  ref <309>: DATABASE ENTRY DATE: 2001-12-06
acccaccacaacacacatatacaacacatagccacagacgcacagtcgagcacacgacttgctgtggcagcatggcgagccgagctctcactcccatgcagctcattggcacggtcttcgtggcgctcctcgcgacgtgccacgccggcggcatcgccgtgtactggggccagaacgacggcgaggcatcgctggccgagacgtgcgcgtcgggcaactacgagttcgtcatcatcgccttcctccccaagttcggcaagggccagacgccgcgggtggacctcgccagccactgcgatcccgcgtcgggcggctgcaccggccagagcaaggacatccgcgcgtgccagcgccgcggggtgaaggtcctgctctccatcggcggcggcgacggcagctacggcctctcatcccccggtgacgcccggcaggtggccatgtacctctggaacaacttcctcggcggctcctcctcgtcccgtcccctcggcgacgccgtcctcgacggcatcgacttcgacatcgagctcggcggcgccaagttctgggacgacctcgccagggatctgaagagcctggggaggagcggcgggaggagggtggtgctgagcgcggcgccgcagtgcccgttcccggacgagtgggacggcggcgcgatcagcacggggctgttcgacgccgtgtgggtgcagttctacaacaacccggagtgccagttcagcgcggggcggggcgcgttcatggacgcgtggaggaagtgggagtcggtgccggcggggcgactcttcctgggcctcccggcgtccaaggacgccgccggcaccgggttcgtgcccgccggcgagctcaactcccgcgtgctgccgctcatcaggggctcccccaagtacggcggcgtcatgctgtggtccaagtactacgacgatcaaaccggctacagctccgccatcaagagccacgtgtgatcacaattcacgtgttctataccattatacgttccagagcgcgtgtgcaccttacgtaatgtacgcatcactagctagagtgtgtgactgtgctgcgacgtatttataatacttcctccgttccataatgtacattatgttattctagcattttctatatccatataatatagatgtggaaaatgatagaatgacttacattatgaaacggatatttgagtatatatgtagcacagtgatgtgtaggagcatgtgttgattgctttcggttaccggtcagacgtttagaccgtagcttaccattgcccccagtttaatttcattcgttcgccactgtcgtttatatgaagaataaaaaaaggtgaccatttgttgcagctt

SEQ ID NO: 14068 - DNA, 1387 bp, Oryza sativa
  ref <308>: DATABASE ACCESSION NUMBER: AK111416
  ref <309>: DATABASE ENTRY DATE: 2001-12-06
gagcttgccgacgtcggcgttcatgcgcggcccgctgctgctgcgcgccgtcgtcgtcgtcgccatggagcacttcaacgactgggacctgcaggccgtcgtgcggagctgcagcttcccgcaatcggagcctcctcgcgtcggcgtcggcgtccccgcggcgccgggagcgggcggggctccggtggtggtggcgccgcccgcgcgcgcaccggatggtccggatcagatggcgcgggcgtcggcgtcggcgctgtacgacctcgagtacctggatttggatcataagccgttcttgctgcccgggtcgtcgtcttcgtcgtcgtcgtcccgagcggtggcgcgggcgcgaggggaggatgacggcaaaggcagacacgaggtgatgatctctttccccgcggcggcggcggcctccacgtccggtgcgcagccgcggtcgccgtccggtcggaagccgggcatacgcaccccgcggcctaagagaagcaagaagagccagctgaagaaggtggtgtacgaggtgccggtggcggacggcggcgtctcctccgacctgtgggcgtggcgcaagtacggccaaaagcccatcaagggctcgccttatccacggggatactacaagtgcagcagcatgaaggggtgcatggccaggaagatggtggagcgcagcccggccaagcccgggatgctcgtcgtcacctacatggccgagcactgccaccccgtgccgacccagctcaacgcgctcgccggcaccacccgccacaagtccgcccctaccggcgacgacgacaagccgacgtcgccgggccctgcagccggcagagcggccgccggcgagggagtggtcaagtgcgaggacgtcgacggcaacgagctgtcggcgatggccgcggatggcggcgcagaggacacggcggcggcggcggatgacgacggtgagttgtggccggaggggatggggctggagctggacgagttcttgggtcccatggatgacgacgtgttcgagttcgaccatgtcttggaggacgacggcgtgctggggcgacggctctcgctatagctgcaagagaaaagctgtactagctagctttgacgagccttttaggacagttgactgtcagctccaacctcttcaggagatccaagccatgtataggcggtttttattcgtgcgtgtttgtggcatgatctctctcaagtcaaggttccaagtttcaaatttgcacaagtgtatatacttgtaatattcgcagggatgtcagtgcgcattgacacttttgcattcctgtacataattctcgtggttggtgactttgtcccaacacgtggaccgggctcaaagggaagtgacagcttcagtgcagtttgcctgcttgcc

SEQ ID NO: 14069 - DNA, 2166 bp, Oryza sativa
  ref <308>: DATABASE ACCESSION NUMBER: AK111417
  ref <309>: DATABASE ENTRY DATE: 2001-12-06
tattggctttcctcgcatcaggcatatgcagatgcagtgatactggtgttctaaacttcgaagtagactctggactgggacagctcaatgcaaaaactgtgtcagctactcagctctttgataattatccaattataatcaagctgtaatgacccagaagagcagaaatgatttaagccagtctaccaagtatatccaggagattgatatgcgatggtgtccaaggggcgatatatatttatatattatatattatacatcagatgatcagcacaagccagttcagagttttgagaggtatgttacataaggagaaaggagtgagtagatagaaatatagatatatatgtagatagttcaaccaaaaagatagagcatgtagcaatataagcagaaacaaaatgctctatagattaagggttttctatatatatagagagagagagagatgtcagtcttcttctctaagaacagcaacactgatggacaactcgatcgcagcacacagcaagaaagcagagcagcctcctcctccttctgctacaactatagcagtgatcaccatggccgtcgtcgtcgtcgatctcacagcttcctccggcacaacgggcaggatccatgcttgatcaaccagccgtcgatgcacggcacatggaacacgtgccagcaatccggcaagctcctcaccttctcacctgtctggaaatcctgcagtagtaagaggagccaaatgtttcagaattcacaggattcagtaatcagtgagaattcatgcaaagatctggcacataaatgagaagcacacggttttgatacgagacagtgataaattaaatatggatgcaatgtactctcatcaattggttgcaaggtaatgtgcaagcaataatgcagagatgttcaatttaggtacagtgagtttgagaaatggtaaaagtttcagacctggaggcaaactgaacatcccgagaggtcaccaatggcgttcctcctgtactcctcagtgatcctgacctccgggagcttgtcgatggatgcccgtggcatgccgttggtgccctcgatctcgaacaggtcaggggactccctgaagggcgatgaatccactgcattcatctgaattcagaggcaatctcgtcagacaaatctgtaactgaagctgctactgcatatttctgaatcagacgcaaccatgtatgcaggggcagattcatgagacgaccaaactgacctggctccggaccacccgctgcaccgccggatcgaccttctcgcggacaagcctgccggtcaggaggctgtagatcacattaagctgcattttgtgcagagagatttgtgttaggtttaacaagccaacaaaaaaaaattagcaaaatgtaaggctgtgagcacgtatatatgacagatgaagcagaagagatgttcagaggtcccgtttgtgcagatatttgttgcacaatctacctagggagcttcccccccccccccctaaaagtggtactgagaatacatgagcaggttaattagattgtaaagaatgcacaaattgctttggaaaacatcatctgaactattcttttttgtacgaaataatcatctgaactttcaagacagcaaggtttgacaagttgtatcatctcataaaagaggcagttagctttgaccctttgttttaaaataaacacaaacaggttatatgaattaagcaagtactagttcatataaataaattaagcaacacacactgatgactggtacagacaaggaagttcagtagttgaggtaagcaagcaagcaagcgtgcagctatgaggttgctctcctactccaaagctactactaatctactatacctgtcggcatgatgaagaagaaatgtgtgtgttcgttcttaccacatagcagatgctggagatcccggatcggcgggatcgccagacgcggatggaggagtcgacgacctcgatggagacgagggcgccggtgatggcgccgatgccggtgccgcggaagaggccgctctcggtggccagcccgatcagcccgccagtcaccgctccaagaaacagtccagctgcacacacacaaacacatccatgttaattaacattcatagctaccaccacagctttccggttcaagattcaggcttcaagattgaac

SEQ ID NO: 14070 - DNA, 1829 bp, Oryza sativa
  ref <308>: DATABASE ACCESSION NUMBER: AK111418
  ref <309>: DATABASE ENTRY DATE: 2001-12-06
aattcacacccacaaacgcacgcccgcacgcgcgcgcgcgcgctcagagacctccgtcgccgcccgccgcacgccggcgacccaccgcgccgcacgatgccgccgacctcagtgagcccaccaagaacagcgccggggccggcgaacccgagcccggcacacccgtcccgcgtgcgggtgatccacccgggcggcgggaagcccggtgggccggtggtgtactggatgctgcgggaccagcggctcgccgacaactgggcgctcctccacgccgccggcctcgccgccgcctccgcgtccccgctcgccgtcgcgttcgcgctgttcccgaggcccttcctcctctccgcccgccgccgccagctcgggttcctcctccgcggcctccgccgcctcgccgccgacgccgccgcccgccacctccccttcttcctcttcaccggtgggcccgcggagatcccggcgctggtgcggcgccttggtgcgtcgacgctggtcgccgacttctcgccgctgcggccggtgagggaggcgctcgacgcggtggtcggcgacctgcggcgggaggcgcccggcgtggccgtgcaccaggtggacgcgcacaacgtggtgcctgtgtggacggcgtcggcgaagatggagtattcagccaagaccttcagaggcaaggtgagcaaggtgatggatgagtaccttgtggagttccctgaattgccggcggtggtgccatgggacagggagcagccggagggggtcgactgggacgcactcatcgccagggtttgcagtgaggcggagaatgtgccggagattgactggtgtgagcctggagaggaagcagccatagaggcgcttctcggcagcaaggatggattcctgacgaagaggatcaagagctatgaaactgaccggaatgatcccacgaaaccacgggcattgtctgggctttcaccataccttcattttgggcacatttcggcacagcggtgtgcgctcgaggcaaagaaatgccgacatcttagtcccaagtccgtcgatgctttcttggaggaattggttgtaaggagggaattagctgacaacttctgctattaccaacctcaatatgattcgctgtctggtgcatgggaatgggcaaggaagacactgatggatcatgctgctgataaaagagagcatatctatacgtgagagggaacagcttgagaatgccaaaacacatgatcctttgtggaatgcatcgcagttggagatggttcaccatggaaaaatgcatggattcatgagaatgtactgggccaaaaagattctagaatggactagtggaccagaagaagcactttcaactgcaatttatttaaatgacaagtatgagatagatggcagggaccccagtggttacgtcggatgtatgtggtccatatgtggcctccatgatcagggttggaaggagcgtccagtatttggaaagatacgttacatgaattacgctggctgcaagagaaaattcgatgttgacgcttacatttcttatgtcaagagattagctggtcaatccaagaagaggaacgctgaggagtctccaaatcctgtagtcaagctttccaagtctcagcactaaatccgactaggaaaatatgaacatttctttgtgtggtataccacgagctcggaaaattgaagaacagtgctaacttgaggtagatcatgtagggtatacactgtagatctgtttgtctgatatccttgtaggcttctaatcattcaaaatttgctagcattgttaagactttaagacatacagtgtcacaccagttgaattcaagtgt

SEQ ID NO: 14071 - DNA, 2382 bp, Oryza sativa
  ref <308>: DATABASE ACCESSION NUMBER: AK111419
  ref <309>: DATABASE ENTRY DATE: 2001-12-06
aagggaacaaaccacctctccactccgctgcttctccccacaccgcgcgccggcgatgccatacccgcgcccgcttcctccgccgctgcactccgcgcccgcgcagcgcgccgtcctctcaacgccgtgcgccagcgctgtcctccccgcgcccgctccgccgctgcccttccagcaccaccccgctggctctccctcgccgcctcgcgccgttgccggatccccgctgtcagggtgccgtcgatacatcgtcgtctagtctccgtcaagccgcttcgcccttgtgtctgcaccgcacctcgccgtcgatcccacgcagtccggccaccgtcgatccctcgccgtctggtttccgtcgacccgcatcagcctagcgccggcaccggatctcctgctgtccggccgcgccgccaccgcgactcctcgctgcccccttcgcaaactcatctggatcacgtctccctcgctgctcctgtctaagacaaaggtgaatttatattgagttccagccggacaactgtgggcgaagaggtaaaaagttaatggctcacgaaggccagcggagactggagtttaacgatgaagcagcgtacaaaggttttcccatggtgcttggccacattgccgacggtcaatgcctgatgccatgccgctccactgatgaggccgagaagatcaggtcgccttcaccacaacgaatccggacacttccgccttccgccatcacgcacggtctgatgagcatcatcgcacgcctgtgcctcatggcctttccattgccaaccatcaaggttgcctaaatttactagcaggtggagaagccatccatgtgctcaataggtctcaagataggtgggtagcaagtttggtttaggctgttcaccataaaagagcaatggaccaatatctcaaataatatctgaatcgagtctgaattcataaggtatatactattttcatccttctgattaactttggatgatcttgtggcctgattcactacataatatctggagtgttgatgctaactcatatagtgctttgctctcactatttcatactacattattactcaaaataatttcagtagtacatatactattactcactataaggctacactgaaactttgcaaaacaacatctgatgggcctgcaacgtgctgctgcttaggtaagaagtttcagcttcaactttggcattgtgcactgtaggtttcaggttcaaatatctgaccacagtactatccttgacaaattcagttgcagaatggcatctagctcccaaatggtcatcgtgaagcttgtgtcatatatgttttcttggctgccgcaatctaaatttaggaggctatttctaacacaatgcccttagatgttagttctacagatccaacaaatttgtgttgctcttgtatagctggatttgggacttcatttgatttggggttgatatatggttatgtttcttagatttgagtgggaatttgtttttttggttcaatcagaggatggaggataatatgatatacccaatcaaggaccaagaaaccatgctgtgagttggccaatctctgttctcctgcaattacattttcctttttgcagtagatcttgcttccaattgattttgtagggcagtaccaatggacatgaacaggcagcaggatactgtttgctccaaggtaattttgcagcaccaaaacagtactatactggctagcaacatataattgtctcggattacatctatgttattaattatatattgcttctcaaaacaaataatgctaccgctcgctaattgttcccatttagcaacaaccctgttatctagatttactacttatatattgcgtaaatagatacctgaatagggagatgaatatgtttgtgctgaacttcaaacataaaaagcttaattcgaaccgattcttttgttcattctcttttcaattagccctatttcttcaagtatatgaatggtggatggatgtaattcatgcatggaatgctttattggtgcatgaactggccttaaattgcagtcaaactccattagcgagcggatttggagagccagatatttttctgaatacttttgtgtgcagatttggagagccactgaataattgattaatgtatttttgctttttgtgatggatcaatgtcgcccaacgaaggtaaccggctgacacaaaattattttgtagtaaatacaaagttatcccacacaatcatatgtctttttttaagcaaatattctatgtatcggcagcaaactatctttttgtccattaattgtcttgttgtcttgttgaggatcttggctgcaactactgatgttcagagcatcacagaagatcaaacagtttttaagaac

SEQ ID NO: 14072 - DNA, 977 bp, Oryza sativa
  ref <308>: DATABASE ACCESSION NUMBER: AK111420
  ref <309>: DATABASE ENTRY DATE: 2001-12-06
gagcactcgaagttggaactcgagctcatccatggccatcgcgacgacgaccttaccactcgcgccactcgccctcgcgccgccatcctccccgatctcccagtgctcgctcctcctgctgcgcccccgcgccccggccgccctctcgctccgcccctccgcgcgcctcctcgtcgccgtcgcggccagggagcccgagctcggcggatcgggaggcggaggcgcaggcgacggctctgggagcggcggcggcggggacagcgagaagccgcggggtggtgggggcgacgaggagggggaaggggaggaggagaagatggggcaggggctctccatgtcgcagaagatcaccctcgcctacgccgctctcgtcggaggtaaaaatgcagtaatgccacgaccagttcatttttagtactcctactgatctactgtagtgtgcaaacgccttggattcgagtagtttgattttggagaatgagagctactgcatttctttatcaaagtgattagccattggggtaattgtgtgcatttcaacttctggttcaccaactagttcccaataagttagaacacacatacttgtcaggttattctcgtgaataaaattaaatccttattagtcaggtcgaattattactaatttgatgagatcaataattgttggacttgactgggtacttgataatttccaactgtagaaaaccagaacacctatgcaacattcagattcagcagcctgctttttgagttttggtttctcaagtccagcttgtatcagaacaatgatgatacaactaccagcatgtgctttttgtagacacaaacacaaatggtgcattagcactctgtatatcactggtcacaggatgtgcacaaattttggcctacaggcaagcacaatgtgcacaaattttctcttaggaagaatgaaatggagtacagctaaacaaccacctaaaaatgaacatcct

SEQ ID NO: 14073 - DNA, 996 bp, Oryza sativa
  ref <308>: DATABASE ACCESSION NUMBER: AK111421
  ref <309>: DATABASE ENTRY DATE: 2001-12-06
actcgcgcgggaataattcgcgcccccgcggcctcgtcccggcgcaatgccggccgtggccgcgtcccagcctcagttccgccgccgtcgcgtgcccgcggagcgaggagatggcgcggctggagcgcgggtcgctggtggtcggcgggcgggagctcctggagcgggcccctcccagcgtggccctccgccgccccgcggtcgtcgcctccccggggggcgccgcgttccttggcgccacggcgcccgccccgtccagccgccacgtgttctccctcggcaccctcgccagtgggtggaagtggctgtccctgttcaggttcaagatctggtggatgatcccgacggtgggcgaggacgccgccggcgtgccagcggagacgcagatgctgctcttggagtcgaggagcgaggcgggtgccgcgctgtacgcgctcatgctgccggttcttgacggcggcttccgagccagcctccaggggagtcctgagaatgagctccaattttgcttcgagagcggtgatcctgaggttcagacactggaagcagttgatgctgtattcatcaactcaggggacaaccctttcaagcttatgaaggaatcaatcaagatgttatctaagatcaaaggaactttcagtcatatagaggacaaagagatccctgcaaacctggactggtttgggtggtgcacttgggatgctttttataaatctgtcaacccagtgggaattgaagagggccttaaaagtttgtgtgaaggaggtgcaccaccaaggtttctaattatagacgatggctggcaagaaaccgttaacggattcaaggaagtggatgaggcctttattgaacagactgtgttagcgtctaaccatttttcaacttgctgatcggtccatgaagtatattaaattcctgtttaacaaagaaaatttactccaggaaatggacgtttgagtatttgatttcatattaaataaacaccaatacattttg

SEQ ID NO: 14074 - DNA, 1548 bp, Oryza sativa
  ref <308>: DATABASE ACCESSION NUMBER: AK111422
  ref <309>: DATABASE ENTRY DATE: 2001-12-06
cagcatttactaaattgtagagttactctattattatctccatatctttctatgtatcgttggttagtttgaaaatcgagattgaattagccaacgtcatttttttaaaaaaaaatggagggagtattttagagctcacatgcacaaaagtgctttcgtaagcttaatcattaagcatggagatattttatgttttgtttttatgcacacagacccttagaacatcatctgaacaccgtcagccggagaaggcaatcaaagacgaagagggaaatgaagaaaaagatgaagagagacatctgtccacggtcaatttcagtggaggcaaaagccaattcttcaaccagacatggcaactcaacgctggctacatgaaagcaattcttcgaggtcatttcttgagtgctgtttcggtcactggacgccagcgaaagaagaggaaagaagagctcaggctgcacgcagcacaggcccgcgcggctgtctcggttgctcagctcgccgcagcaatcgcaggcattcgtgtcggtgtgcgaactgaggccggacaacctgaagtatgtcgaggctgctgacagcaagaagatgggcacagtgcttgcttccgctgctgcgctggtggccaccgtctgcgcagaggctgcagagctcgctgggaccaacaggtccggcgtgacttccgccgtgaaaactggagtcgagagctgctcctctgctgaactgctcaccctcacggccactgctgctacatgtctgagaggagctgcagcactgaaactgagggcagacgtcaggggaatcggtagcaacaacaactcagttggcaccagcactactagcatccacaaagacacaactctcagggttaggctgccttgtgggagcgtgcgactgaggaaggtggctgtctttccacagtgcgacagagtagtactgaggctggggaagaaacatctgcacggggcattctcaacctacaaaaattatgaggtgcttgacgtctccagcaacggcggcgatgtggtggtggacggcatggtgttgttcccgctggtgctcagaacggccgctggtgtggtacagctgctgttggacagtcagatgcactgcaaggtctggaagaatgccatcgagggcattctgtccgaccaaaacgtcaaacacgctaaactctgagccgtcgtcgtcaggcacacgtatacgtacatgtttagctgcagctatacacttcactgtgtgagtttgcttctatatgaaccttttaataattagctgtagctcttagcaaaatccgaaatgtttcattctattataaaaaaaaattatgtacacttcacatgatatacagaggtgtagtatactactatattgcactacaggtcttgggttgcattgtgtactcaatgtacgccagtcgccagttgttgaggtttagttctgtaatataggttgcatgggctgtttttttttttccattcttcggtcctaacctcacctactttgtacaccaacatgcttttgagaaaattatggatgattggatgttat

SEQ ID NO: 14075 - DNA, 1730 bp, Oryza sativa
  ref <308>: DATABASE ACCESSION NUMBER: AK111423
  ref <309>: DATABASE ENTRY DATE: 2001-12-06
gagctaacttggcgcgcagtgcgctcgccggcgcactctgaccggcacgcccccggcgaacgtggcggtgaggccaggcgcgaacttgggccggcgcgagctccggtcgaccgcctccacgtcgaagctaaggacgacggcgacgatgacggccttcatctccatgatggcgagatccttgcctacgcagacgcgcaccccgccctggaagaccgggtacctgtacgggctctccggcacgaaccggccgccgctgagccaccgctccggtctgaacacggcgcagtcggggccccagagggactccatccggcccatggcgtacgcgtggtaggtcacacgtgtgccctttgccacgaacgtgccgtccgggagcgtgtcgtcgccggcggcgaacttggagtcgaactgcaccggcgggaacagccgcatgctctcgtacagcgccgcgtgcacgtagtgcatgtccttgagcttgtcgaaatcgaaggaggcggccgtggggtccctgcctccggcgacgcggaagacctcgtcccggattgcggcagccacctcgggatggtcggagaggagcaagaagaacgcggttagacctgaggcgacagtgtcgcggccggcgagcatgaagctcacgacgatgtcgcggaggtacttgtcgtcgttgatggagcccatgaatcgcgacaggaggtcgtcacaggaggcggcggagccgagcttgcggcgttgccggatgacctcggcggcaagcgcgtcaacgagacggatcgcgtcgcggagctcccgctcctccccgatgttgcgtagccgcttcaacttccagacgacatgcatgggcaccgtcgctcgccgggccgagagcatcgacgccgtgtcgaacgcgtccgcgaacgccgatatcggcagcgaaagctcgaggcagccggggtcgaggccgaaggagatcttgcatatgcagtcgaacgcgaagcggcggaagacgtcctggagatccagcagcctctcgctcccgtagctggaggcagagcgaagcagagggatgaggcggcaccgcagttccgaggccacgacgttcgccgcgaaggctcgtatcgccggcgaggcgagctcagccgcggcgagcttgcgctggaagagccagccgtcgccgtcgacgttgaatatgccgcggccgaggaagtcggcgaggatggccgagaagggggcacccttggggtagttgtcgaagcggcagcgcagcatgtggtcgacggtggccgggttggcggtgagcacgttcccgagcacgtgcacgtgcacggttcgccccggcgcgcggcgcagcaggtgcgcgtaccagtcgcagaggttgtcgaactcgcgcgcccacgacgcggtcacgtacgcctcgcacaccgggcacgcgcaccaccacggcggccgcagccgctgcaaagccagcagcagcgcgagggccaccgtgcacgcggccgagacgaagaagacggcggcaacctgcgcctgcaaggagctcgctagggcgtgaaccgcgatgtgcaacgtggtggcgtccgcgcccatgacgaagaacaaacaacacggattttctctctcgatccttttttttttttttttgcgcgcgcgcgtgcgccggcctgatccctccctgagggggtgtgtgcgtgtgtgtgaaacagagttgtgccgttctcagcgcacaccgtttttatatcgaacgtttcactgtt

SEQ ID NO: 14076 - DNA, 2001 bp, Oryza sativa
  ref <308>: DATABASE ACCESSION NUMBER: AK111424
  ref <309>: DATABASE ENTRY DATE: 2001-12-06
agcctccgttgtacatcactctcctctcctcttctctccagaggccacggcagccgccaccgcccggagaaacaatggaggccggcgaggcagccggcgccgtcctcttcctcctcgccgccgccgtctccctcctcgccgccgtctccaccggcgccctcgacttcacctacctcgtcacagtcgtcggcgagggatcgtcgacgtcgccggggagcggcggcggcgcgtggtggcgcgaggcgtgggtgggggcgcggtcgcgcgcggtggcgccggcgctgcaggtcggggtgtgggcgtgcatggtgatgtcggtgatgctggtggtggaggccacctacaactccgccgtcagcgtcgccgccaggctcgtcggctggaggccggagcggtggttcaagtgggagcccctcggcggcggcgccggcgccggcgacgaggagaagggggaggctgctgctgctgcttatcccatggtcatggtccagatacccatgtataatgagctcgaggtgtacaagttgtcaatcggagcagtttgtgggctcaagtggccaaaggagaggttgataatccaagttttggatgattccacggacgcatttatcaagaatttggttgagctggaatgtgaggattgggcaagcaaaggtctaaacattaagtatgccaccagaagtggccgcaaagggttcaaagcaggagccttgaagaagggaatggagtgggactatgccaagcaatgcgaatatgttgccatatttgatgctgatttccagccagaaccggatttccttctcagaactgtcccgttcctcatgcacaatcagaatgttgcgcttgtacaagctcggtgggtttttgtgaatgacagagtaagcctactgacaaggatacagaagacattccttgattaccacttcaaagctgagcaggaggcaggatcggctacatttgctttcttcagtttcaatgggaccgctggtgtatggcgcacagaagctatcaatgacgcaggaggttggaaggatcgaactacagttgaagacatggacttggctgtccgagcaaccttaaagggatggaaattcatctatttaggggacctcagagtaaagagtgagcttccatccacttataaagcatactgccgacaacagttccggtggtcttgtggcggtgcaaacttgttccgaaagatgatatgggatgtcttggttgccaagaaagtgtcatccttgaagaagatctacatactgtatagcttcttcctggtgaggagagttgttgcccctgctgttgcctttattctctacaatgttatcatccctgtgtcggtcatgatcccagagctcttcctgccaatctggggcgttgcctacattcctacagcactcctgattgtcactgccataagaaatccagaaaatctgcacacagtgccactgtggattttattcgagagcgtcatgtccatgcatcggttgagagctgctgtagctggtctgctgcaactgcaagaattcaaccaatggattgtgacgaagaaagtggggaacaatgccttcgacgagaataatgagactccattgcttcaaaaatccaggaaaaggttaataaacagagtgaatctacctgagatcggattatcggtgttcctcatcttttgtgcatcctacaaccttgtcttccatggaaagaacagcttctacataaatctctatctccaaggattagccttctttcttctggggctgaattgcgttggcactctacctgatcattgctgcttctgacaaatcaagtcaaatctgctgccgtttcatcaatctgatatgtgattcttttctgtgtttaaatttctccagaaagcatttttaaattgtagagtacgtcacagtttatgttgacctgtagtattttgcatagttacaaaaggtcaaaaatgtcaataacaatccagtatatatcaacaaattcacaggtctgcctttttgc

SEQ ID NO: 14077 - DNA, 1404 bp, Oryza sativa
  ref <308>: DATABASE ACCESSION NUMBER: AK111425
  ref <309>: DATABASE ENTRY DATE: 2001-12-06
gtaagaatggagctttgaaaaaagggtggtggttgggagtttttgagacgaacacgtgtcgggcgccgacgtcacgtcgccgagtgcgtggccccgccggcgacggcgagcttttcgccggcgaggagtcaccggccgtcgcggcggagcggcggcttcggggagaggacccagtgctggccgtgcggccggacggtgaggcccttcaccctggcgaacagcgtcacggctcgccggacgccgcggtcgtcggcggcggtgaagtagtcgtggccgaacatgacgccgccggggcggagcacggcccaggcgaggttgatgtccgcccacgccgagtggaagtcgtggccggcgtccacctcgatgaggtcggcgtagacgccccagtggcagagcgcggcgagcgcggacgccgtcgagaaggggagcgggagcacccgcgccgtcgcgtcggcgcccgccgcggccacgttcgacatgaactgcggcagcagcagcgcatcgccgtggcgcggcggcgggacgtcgcggcggaagcggtcgcggaacgccggccagccgcggaagtcgtcgacgcagaggatggccggggacagcgagaggttcttggacacggccgccatgtgcagcgccgacgcgcccaggaaggcgccgagctccacgatgacgtcgggccgcacctcctcgatcagctccgcgaacaccgcgccggtcgagccccacccgcgcggcctcgccgcagccgggtgcagcagcgcggcggtgtgcggcggcgggaagctctcgtacgggctctccccgtcgaacagcttgtcgaggagcgtccgcacgacggcgtcgctgggtatcgcctcgccacactcctccctgaaccggaacagatcgtgcggcggcgagcgcgggcagttcgccgccgccgcagcgctgccgttgctcgccgggacatccgtggaggaggcggtgccggagaggtgcgcggcgcgcggccgtatgaccgtctgcgacggcttgctcgcaggcggccggatggacgacgacatgatgccaaccgagtacccggcggagaagacgatcaggaacacggtgagccgggtgaggtgcggccggagcctcgccggaacgccgccggaagacgccgccgccggagacggacgcggcttcatgatcacttcgcaacaagactctctctgctctccctgtagtctcttagctaacctatatatatatatctcatttattctttggagattagtttaaacctagaatttctttcaagattggatagcatatatgcttgcagatagagtgatagagaagggagagggattcaggattagtagtagtggttgttactttattacatgaagtttgttttctttagagaagatatatactattagatat

SEQ ID NO: 14078 - DNA, 1473 bp, Oryza sativa
  ref <308>: DATABASE ACCESSION NUMBER: AK111426
  ref <309>: DATABASE ENTRY DATE: 2001-12-06
caattttcaactaaacagccatgctgcttctgtacatcttcagtttggtggtgcataattaaatacagatacacactattaaaggttggtgaaatcttcaatgatttatctccctccattgcctatctaacaaatacctaccatggccactgaaaggctgctcaattacatgccccccgccattatgttggaatattctaaatggcatacagtggaaccatagaggactcggtggcttaacttgatcttcctgcgattttgaagtagccatagagcttgcgatgaacatgcaaatacttaactggcatcactttaacgacgataagttcaacaagctgaaattgctttatcagagttgatccaatcctctccggaggaggctctacatgactacatccttggagtaaatctctggtcaagatcactttacttgaccataagaaaagaatgtcaaacttttcgttccagcttgctttattgaagttatgcaggtccttgcacctgatccaccttttagtgatgaaatatttaaggagagatgtttaggctctttatcagcacatttgcacaccttgctgaaacaaacagtccatatcttccaagaagatcttgctattggaaaatgtgctgcactcagagtaagagtttttgcacgtgatgcagcaaaagcctgttacatggccgtgacatcaggaaatgaaaaaaaagatattcttagtaaggctgcttctttttatctgttcttttgttcagagttctatattggcatcttcatgctgaagttttgatttatttggcagcatcacttgaagagaggttattggattttgatgtcaaagttagaatgcaagctggttttgcatcctgcaatttagggccaaatcaaatctaagatcagttccttctgagctgatattgcaggcagcagagaagccacaaactgttgttatttctcgctactgcagggtacaaaacctaagccgttgcggtcaactaactcccgcatcggggaagaagatggcgagggagtgaatgggggagaagaagggcctacccgggaagctccgccaaccaccgactacccgatctgccaccaacggccaccgccggtcctgctactcggccacaccgagcattgccgtgtcgatccccacctctgccgcctcgatccgccattgccacgttgatccccacctccgcccgccttcttagcggtgtcgccgaagagagagagaggggagaggtggcgtcgccggagaaagggaaggtggcgtcaccggagaaagggaaggggaggcggaggaagacggggaggagggacggggtgagcctttatatatgtttgtgatttttggggggcgtactacaaatattggacttatatatgaatagaaaatctgaggatttaaatggaaaatgtaatcgactgacaggtgctgaaatgcaaaaataagatagagctgtggcttatgt

SEQ ID NO: 14079 - DNA, 1542 bp, Oryza sativa
  ref <308>: DATABASE ACCESSION NUMBER: AK111427
  ref <309>: DATABASE ENTRY DATE: 2001-12-06
taattcatacaataattgtttactatactattaatatatggtcccacctgtcatacacacattgcgttttagagtccgtgctacagctggctacagatctataacccgctgcttttctctcttatcttttacctcattatgctattgtacctgctctaatccatgcacaagagacaacacggccgccttgccatttgcaacgaattccaatttccaactcctcaatatacccattgctagaaaccgcaccatttcctccataaatcaaccaaactatatgtttgcagcacatctgcactttgaacgcaccgcctcggcacctttcggctttcgccatgtccggcaagctctgcttcttggcgtccgtgctcttgtcgatgtccaccgtcgtcgacctagcgatggcggcatcgggcggagtcaacatcgccgtctactggggccagaacggcagcgagggcacgctcggggagacatgcggcaccggcctctacgcgtacgtcaacctcgccttcctctccacgttcggcgccggccgcgccccggtcctcaacctggccgaccactgcgacgccccgtcggggacctgcgcgtccctcgccgccgacatcgcgtcctgccaggccgccggagtcaaggtgctcctcagcatcggcggcggcgcgcttgggtacaacctgtcgtcgccctccgacgcgcgggacctggccgcgtacctctgggacaacttcctcggcggcggcgccaccggcgcgtcccgcccgctcggcgacgccgtgctcgacggcgtcgatttcgacatagagtccccctccaggttctacgacgacctcgccaggaacctggcgtcgctgtacacaagggcgccgcggccgccgcgcgggggcaagacgtacctgctcaccgccgcgccgcagtgcccgtacccggacgcgtccctcgccgcggcgctcgccacggggctgttcgaccacgtgtgggtgcagttctacaacaacccgccgtgccagtacgccgcgccaggggacgcgagcgcgctgcggagcgcgtgggcgcagtggacggccggctttccggcggcgaccgtgttcctggggctgccggcgtcgctggatgccgcggacagcgggttcgtcgacgcggacacgctcgcgtcgcaggtgctgccggtggtggaaggcgcggccaactacggcgggatcatgctgtggagccgctcctacgacaaggactccagcttcagtgtgaagctgcaggccgccttgcagaacaggaacaagccaactggagccggcgcatcctcacataccaagaggagaatatgtaagtggttaacttttgtctattctgaatttctgatccagtatgtagtgctgcactattatcccagccagttgcaattttacaattgaaatcgagtgatatatgcattattagcattaggatcccagaatttctctaatctatatgacagactgacactagacttgtaatggaactcaagaaactgtaacatcaaagatttgtgattttttttttgac

SEQ ID NO: 14080 - DNA, 1515 bp, Oryza sativa
  ref <308>: DATABASE ACCESSION NUMBER: AK111428
  ref <309>: DATABASE ENTRY DATE: 2001-12-06
aatccgagcaagacggccggcggggcgagggcgccaggcaggagaggaggatgtcgggaggccggcgaccggcggcagccgcgacgatgtgggagcaggacgtcctcgcgctccccgtcggcaccatccgcatccgcctcgtcctcccgcgcccgccctcccacgccgccggcctccgtcgcctttccacgtgtcgccatggatgacgacggcggcgacttccctctccccgtcggcgccatccgcctccgcctcgtccacccatgccgccagcctccatcgtctctccaagtgcggacatggatgacgacggcggcgacctccctctccctgttggcgccatctgcctccgcctcgtcaacccgtgcttgccctcccacaccgccagcctccatcgtctctccacgtgcggccatggatgacgacggcggcatccttcctctccccgtcggcgccatccgcctccgcctcgtcctcccacgccgccggagcaggagggcctccccaacaccgccgccgttgaggcgcgggcgccagatctgcagcgggcggcgtccagcaggggagcaactgcacggcatcctcgcgctggtcgggtcctggcaggccgtgcggacgagcgtcctgccgcgtgcaggagcgagggtgtggcggtggtgggctgcgatggcttacaggacttcgccgacggttccgcctcacctcgcaggcctcctccccaccagccgaccaacctctgcagagctcgcgtgctctgacctcgtcgaccggggggacttcgatggggcacgccgtgtcgcggatgccgtgcttgccgccgccggccctcggggcgaggttagtgaccgcctcgtgcatcacttcgcccgcacgctcctcgctctacgcggtgaagacaagggaggccatagcggtgatgaaggcgcgtcagagacaagggaggccatggcggcgctcgaccgcgacgtgctcctctgttgcaccgacgaccgcgctcgtcacactgtcctgtcgcgccctggctgctctccgccggccatcgacgtggagaggagaggagagaggaagtgagttgaaagggagggtaagaagtggctgacgtggactgtctgacatgcaggcctcctccccacgctgactcagccgccacgttggataaaaccgggtcaaaaccaccgaggaacctaaaatgaacggtacctaaaatgaacggttttgtggttgggggtgattttgtaacccgattacaagttgatggaccttcggtgtacttttcctaggctaactaactaggcttgtgtagggacaaggctttggcccaaaaaaaaaaggaataagttcaccggaggtccctcaacttaacagcgagattattttgagatccctcaactataaaactagaaatgttcacccctaaactcactcaaaccgttcactggaggtcccatggtagtatttgctcccggttttgctgacgtggcatcctagtcagcaaaaaataaaaaaataaatatg

SEQ ID NO: 14081 - DNA, 1401 bp, Oryza sativa
  ref <308>: DATABASE ACCESSION NUMBER: AK111429
  ref <309>: DATABASE ENTRY DATE: 2001-12-06
agcatcaccatggcgaaaacagtcgtgtcatgtcatctcactttgctttggatgcgctccagcgaagcagggtctgcctgaactcgagcagcttgtcggcgtcatccggcacgactcccttggccgcgtcggtggcgcggaaccgctcctcccacgcggccagcgccggcgtcctcgccgggtcaatcagcctgcgaccgatcagcttgtcgatcgccgtgaaccacccgaggtagccgccgagcacgacgtcgacgaacccgacgccgtcgccgccgaagaacggcttccccttggagcactccccgaacgcgccctctagcgtctccagcgccgccacggcctgcgccaccgccgccgccctctcctcctccgtcttgctcccgaacaggatggccagccacgccggccggaccttgtcgtcgacgtaggcggcccagaagcgcgccaccgcgcgctcgtaggggtcagagggcatcacggacgggcgtcccccggcgccgcccggccagacctcgtcgatgtactgcacgatgacctgcgactcgttcaccggccggccggcgtggagcaggacggggacgctcttgtgcaccgggttggaggcgaggaggaggtcgctcttgtcgcccaggttctcctccacgtactcgtacggcagcgacttgaggttgaggacgacgcggaccctgatcgcgtacgggctgctccaaacgcccagcagcttcagctcgccgcttcccgccattgccaagtctctcgttctagatcgctaggaacaagtgggtcgatgatggtgaggtttttttgtttggtttgcttatgacgttatacgactctggccatggcgttatatagccggatatgacagacttgtaccgatgaacctggccagcttgatggtaatgagagcgttcttcgaaccaagctgatcggttgatgtcgcgagcatggtcgtcactgatgatggagaaggtcaagttctttcctcccttttgtttttgtttattaggacgataattttgcctcgtggcaacaagactggagtagctggctgctagaggcctctgtgctagtgcgtgctgtttttttgggttcagtttactagtacaaatgactgtttaacggaagatatttggagatataggcggctggatgaaacgcctgtactgttgaaaagaatcatgcactgtttgttgaaagggaagtagtagcagcagccataatagaggagagggagaacgattgttagcagccacaccatttagcagcatgtcattgagaatcttgtttctctttagaaaatgtggagaaaggtacatatgtcttcaatgttctctttcgtggccctttcgttccgtgcgaaggacacaatttagctcaacaatttgtcactgactc

SEQ ID NO: 14082 - DNA, 1640 bp, Oryza sativa
  ref <308>: DATABASE ACCESSION NUMBER: AK111430
  ref <309>: DATABASE ENTRY DATE: 2001-12-06
cttgaaattgtcgggagggaagcggatgggggccggcttcttcttttttccttttgggctgcgcttggactcgtttgctctttgggcctagtcaattgggctgggaattttcaggccctggaggggcccgtttaatttctccaacacctgcagtacataatgcgtactctgtcaattatgtacaaaattatctaaaattaactacaaaattatgtactaataaacttagcttcggtcataagcttaaaaggcaaattaatgatggaaaactaaacttatatttttaaataaaaatcctgcgcttcccacaacttgcagtcacggtcaacacgaaacgaatatccccaaaacacaaacaagttacaagtccttaaactggagtaatactcaaggaaaaggagatgtcagtcacggtcacagcctcacaggaaaacgatcccaactccgactcacgctcacggctcatgttgttgcggtgttctcaacgacgaaattcccttatcaactcggattctttcttctgaaactgaaacggacatctgcacacagcgccgatcgagttcgaatcctacacccgtatccaccccctatatacgcagcgctcctcgccgccttgaacctcacagcgaaacctgatcaccaccccaccaaccagagttcaccacgatcgcttcgatacttcgatctacgcacgagcgccgcagccgagaactcaggctcacgcacgcagcagccgccgctgaggaggaggagagcgcagcgccggccatggaggactgggtcgttctcagcgacagcgacggcgacagcgtggagctccacgacggcagcgacgtcggcggctccgacagcgagagcggcttcgcggtcgtgtaggtccgcggccgtgccgctgcggccgtcggcgccgacacgccggcggcgctgccgcacacgacgatcgccgtggaggccgtgccactgcaaccttcgccttcgccgccggggttctttaagaccgtctcgtaccgccaggcgttctcgggaaagcttccgagctcgtcgcagcttcttctcacgctccggtgctcgacgcagccgaagaggacaaggaggacattacccgaggtgtctccggcgatcgccggaggtgagcacgagaacgccgagatatctgacgtggcagagagaaacaatgaccacgtcgactccaacatcgccgccgccgaggacacgaccttctccggcgaggaggacttggatgatgagaccaacgatgacattgaatgctttgatgaggaggacggaatctgtgagaaccccgatgatgaaatctttgacgacgaggaagaattggatgatgatgatgagagcctcgacgacgatgacattgaatgctatgatgtagaggacaagatctgcgaggagaacccagatgatgaaatcttcgatgatgaggaagaaatcgactgtgaggaggacctggatgatgatgatgatgattgtgagagcctcgacgacgataacattgaatgctttgatgcagaagacataatctgtttggaaacccggacgatgaaatctagtaccaatatagccatgtaacatcgatcccatgtgcagcctcatctaatcatcgaattattctgcattttacccct

SEQ ID NO: 14083 - DNA, 2549 bp, Oryza sativa
  ref <308>: DATABASE ACCESSION NUMBER: AK111431
  ref <309>: DATABASE ENTRY DATE: 2001-12-06
atttttcctcgaatgaaacagttttcaacgtttcttatccatcgagagacaaggaagaagtgttgaacccgtggcgtcggctccccgctcccccaactcgcgcggttgctggttgctgccgccatcgcttcctcccattctcttctccacgacggggttaccgagctccggcgaacccgccatggcggactggccgacggcagagccgaggcgaatcagcggcagacaggagaacctccccaatacgctctccttttccagtttccccaactctagctagaagccaatcagaagcgccagccaggggaaagcggggagtcgtcgatccctctcgtcgccgttgctctcgtcggcatcacctgacattattgtgcatgagcattcgacgacctaacacccggtatagtttgcttcctccacctcgagcacaagctgttcgatgaaatgcctaccaaggttaaggttctgtcacctttttttttgaattcattgaatatagaagggaacaatatttacaagtaaggagtaatgggatttacagaaaagacgatcggaactacggcaacatctctgctagtcgtttggctcccgccaaagcccaagatttcgactcctggttctgtcactttcttgttccaaaactgatgagcatcctgcgttcctttgctattttgcacaaccttgtggaacaataataaaagaaaataattagtcttccatatttggttgtagttctatagatgacaagttaaagttagttcatctttttggtatattacacataagaatccttcgaattcgtttgttgcagattgataagtcgacattgattcacatatccatttttgcatgctgatggtgttttctgtgctctaagtaaggtccggatctgaatataaaactgaatggcatctgtagtgtttggtcaaaggaatgtgtgtgtctttcccctgaggaggcacatattggatgaggtgtttcagcatggtccttgtaattgtagcacacagaggaggtggaaaaagccaattgattcagcaagaactcgtctggagggcagaataagggatcataaactggacaagctgatgattcaactgaagaacctgaggctagctttggatttgcatgagttcatatctcagcagaggaatggctacgcatctctccaactcctctccaggtggagacatgaagtcgggctaaacattgagattggggctttccttaagaaatatccccacatcttcgacatttatgtgcacccaataaagaataaccaatgctgtaaggtcactccaaagatggctgatttgattgcagaagaagatgctgccatctgggaaaatgagcctgctattgttaaacggctgaagaaactcctcatgctgtcgacagatggaactctgaatatgcatgcactgtggctcataagaagagaacttgggttgcccaatgactaaaggtgctctatactaccaaaccatcggtcagagttttctctaggttcccccgatactctgacatttgtcactagggatgaaaatttagctgtagccgatgttgaagaatggagagtgaaggaatatacagaaaaatggttagctgaatctgagacaaaatattcttttcctataaactttccaaccggctttaagattgagaaaggttttagggaaaagcttggtaactggcagaggcttccctacaccaaggcttatgagaataatgaattgcatccaatccataatgttgagcagctcgagaaacatattgttggcattcttcacgaacttttaagcttgacagtggaaaagatgataccacttgagaggttctcccatttcagaagaccttttgatatggaggtaaacctgagggaacttattcttaagcaccctggcattttctacatctcaaccaaaggaagcacacaaactgtcctccttagagagagttacagtaagggatgcttggttgatcctaaccctgtctacaatgtaagaaggaaaatgctagatcttattttgtcaggatgccatgggattgatgaaacggatggtccaattcagttagttgaggagcacaatcaagaaagcagtaatgtgtcatagaatcacatgtggcagacagattccggatgccttgtcggaagctcaaagtgacatttatcaaagaattagctattttaatctctgacattgtttatgggcttatgggagtacaatgttgataatggtatgaacttgagacgtcggtggtggagcatcatcggttgaggaatgtactgatgtgcaagctaagaaagtcagctgtcctgagggcctactctgcacccagggaagaatggatgcatcacggtgcttagcagctaacaaaggaagatgcgcttgagcagaatcagttgtcaaccttggttcctgttcgacagatctactattatttttacggtactccactgatttattttcactgaagagataggtccaatgaagatttaagggcagtcattgatgctttgaactggtctatcataaatgttgaaacag

SEQ ID NO: 14084 - DNA, 776 bp, Oryza sativa
  ref <308>: DATABASE ACCESSION NUMBER: AK111432
  ref <309>: DATABASE ENTRY DATE: 2001-12-06
atcaatttctccaattcgtcgctctcctcgcctgcgcaccgcaggcggcggcggaagcggaactgcttgtctgcttctgcgagtgcgagtgcgagtgcgagtgcagcctgcaatttggggggaatcgcagcgccgtcaccgcaggagcgggagctaggatggagaagaataagtacatcggagggggatatcttctttcagaagaggaagcgatttgaggaggacgagtggacaactatgttattgtatcttctgacaagagagtacaacatgtgaaaagtgatatagttgttaaggatgtgaaactgtgaaagaaagtttgggtttgctcagaggctctaggaggaagtcaattgatagatgaagcaaaagaaatggcaaggaagaaggatctagagctagaagcaggtacatctatttcagtttgctttgctctctacttctaatgatttcttattgtccgtgttagatgtttagaaattaagggtggcagtgggtctcagagtatgcaacctgtggaaatgatgaacatcattgagcaaacaagggtaaacttgtaaatgagtacagttaaacaaccccagcataagcatccctgcgactcagatcaagttgaccttggtactgaaatgtcacagaggagcttattgcagacaatgtagatgatgaaattcaccttgaggaagtaaatgatagtactttgaatgagagcagcttcccctggtaagcaagtaagaaaccaaggggggagggtcaccaggggtgggcccaaagtt

SEQ ID NO: 14085 - DNA, 1571 bp, Oryza sativa
  ref <308>: DATABASE ACCESSION NUMBER: AK111433
  ref <309>: DATABASE ENTRY DATE: 2001-12-06
acacgcctcgcctcgcctcgccctccatcgagatggccgatcccaacggccgccgccgcctccccaccggtgatccagatcaagccaacgcctccccgtcccggcgagtctccgccgtcgatggcgtcaccggcggcgagggcaggcccacctactcccacttcccccccggcgcgtacgagccgacggtcgtggcctacggcatccgcgacgcggccaacgacgagcgggcgcgggcgcgggctcgggctcgccatgaccagggtggcggggctcatgaccaccaccacgaccggccccggcaagaccagcgcggcgaggctcacctccacgacctccccggcgagaagagcgaggtccccgacgtcggtccatctgaccaacaggggaaggaagcctccgacaccgacatggctccattggcggcgctggcaaagagatcctacgacgtcaacttcccgccgctgcacgagcaccgcgccgcccccttccccgccccggcacccgcattcgcacccgcaccggcgggcaccatgggatcctcttccgcacaggtgcagggtgacggggctcctgacaatcacgaccacgacccacgtcacctaccccggcaagaccagagcggcggagctcaccccgacgacctccacggcgagaagaccatcggttcaggctccgatatcctcgacgactccaagagaggaatgatcaacgccggtccccaacacggccgcatcaccacctccaatggcggcagcggcagcggcagcgacaagggcaagggggtctcctacgccggggacaagcccgcatctagctcgtcgtcctccagctctgatggccagcaggggagcgacaccgacaaaactccttcggcggcggcggcgagctcctacgccgtcaacttcccgccgctgctgcccgcacccgctcccgtccccgcccccgcacccgcacccgcggtcgccggcgccatgggtgttgccaatgcccaccacaagattgcgctgtgcagcaagtggaggaaggggaggtgccacaacggggcagcgtgtcgctactctcatggcgaggaggagcaacgaattgtgccggagatgagagtcggcggcgggggacgtccgtgcccggagctcgccgccgccaagggatggtgcaggtacgggctcaactgcaagtattgccatggcggcgtataggatcgaggagcagcgccatgggaggggggagtccttcatcttacaacgctcgcggaggaaacacgtcaggttagagtctggatcatatgactgaatccatccgaatcatctggtcagctgttttgcttctgttgtggtcagatgaaccactgcgttttttgttgctagatcgagtctactctagtcatgcgtttgatttgattcgactcgtgaatccatccgaatctgaattcgaccaaggaccagtacactttttgtttcttttttggtcagatgaaccactgcgagttttcgttgtcagggtctaggggaaaaagattactagaacccatgaatttgattttgagtcctaataaacttgatgcagtgatg

SEQ ID NO: 14086 - DNA, 1974 bp, Oryza sativa
  ref <308>: DATABASE ACCESSION NUMBER: AK111434
  ref <309>: DATABASE ENTRY DATE: 2001-12-06
aggtagaaccagtccagcctccccttgttcaggtcctcggcgagccacccgccgtcgtccccggcgctggcgcccctcgtggcgcgctccacggcggcgaccagcaccccgctcaggtagctcgacagcgccagcccgctgaacagcaccgacccggcgacgctccgcatgctctccgggaactccctgtagtagaactccgtctggctcacctggttgaacgcctccgatagccccagcgcggcgagctgcggcaccagccagaacgccgactgccgcgacacccggccggtgttcgacggcgagccggcggcgaggtcgcgccgccgcttctcggccatggcggcgacgagcatggcgaggacggacagcgccatgccgacgcccatccgctggagcggcgtgatgccgccctcgcgccccgtgaggcggcgcgcccatggcacgacgaggcggtcgtagagcgggatccagacggcgagcgccagcatggggaagacggtgaacgagcccggtggcacctcgaagctcccggcgccgccgccgccgccgaggtggcggtcggactgcgccgcctggaggatgacgtaggtgttcgtctgcgcgaacgcgacgtagtagacgatgcaggtgagccacacggggacgacgcggaggatgcacttggcctcctccacctgctggaggctgcacagccgccatggattcttggggtgcccgtcgccgcccacctcgctcttggcgtcgaccacgacggcggccttgtcgaggaacctgaactggtcggtgtaggggagcctcgacacgacgccgctggcgtggcgcgtccggaagagggactcgtcggcgtcggagggcgcggcggccgaccgcttccggaacgcggcgacggcgacgcgcgcgacgccggcgaaggggctcccctcggggcgcacgcggacgtagagccccgcgccggcgaagaagagggcgcaggaggcgagcatgagcgccgccgggatggcgagcccgacccaccagctcacgctgctctgcacgtagacgatcgccgtcgacgaggcgcagacggcgatggtgagcgtgaagtagtaccagttgaagaagctgttgatgccgcggcggccggactccgtgcgcgggtcgaactggtcggcgccgaacggcaggctgcacggccggatcccgccggcgccggccacgatgaacgcgaacgccagcccgagcaccgcgagctgccccctcgtcgcgcccaaacacctcccctcgccgcacggcggcgggtgcagcgccggcacgccggccgtcatcgtcaagatgaccatcccctgcaagatacaacggagatcaaggtctggttcaacggcggtaatggcgatgtcgggcttacgatgaaggtggagacgcagccggcggcgacggtggcgtagcggccgaggtagaggtcggaggcgaaggcgccgacgacggtggcgaggttggtggtgccagcgaacacgttgagcgcgacggcggcgtcgaggctggacatgtggaagacggtggtgaggtacaccatgaggttcgccgccgtgccgatgctgcccagcttctcgaacgtctcgttgccgatcacgaacggcatcgccttccacccccggtaccggagctccggcgccgccgccgccgccgcggagtctgatctggcattgccgtttcccacgtcgccgtcgaggtgggcctcgaggtcgccgccgccgccggagccggagacggagggaggcagggtcatgtcgcggcggcggcgacacttggcgcgaggtgggagggactttgactgggtttgcggttagttagttaggtgggacccaagtgtcagcgtcggaggtaacactgttaccgtaacaagaactggtagcaattactaattagctgctgctgttgtcaactgacaggtgggaccatctaaaattgggcattgagttgcggcgtttacac

SEQ ID NO: 14087 - DNA, 831 bp, Oryza sativa
  ref <308>: DATABASE ACCESSION NUMBER: AK111435
  ref <309>: DATABASE ENTRY DATE: 2001-12-06
aggtgggcgccaggcccgggctcgggagccaggcagccgaggtagagaggcgggctccggcgggccgggcggccggcaccatgacgctgttccactttgggaactgcttcgccttggcctacttcccctacttcatcacctacaagtgcagcggcctgtccgagtataatgccttctggaagtgcgtgcaggccggggtcacctacctcttcgtgcagctgtgcaagatgctgttcctggccactttctttcctacctgggaaggcggcatctatgacttcattggggagttcatgaaggccagcgtggatgtggcagacctgataggcctaaaccttgtcatgtcccggaatgccggcaagggggaatacaagatcatggttgctgccctgggctgggccaccgccgagctcattatgtcccgctgcatccccctctgggttggagctcggggcattgagtttgactggaaatacatccagatgagcattgactccaacatcagtctggtccattacatcgtcgcatctgcccaggtgtggatgataacacgctacgacctgtaccacactttccggccagcagtcctcctcctgatgttccttagcgtctacaaggcctttgtcatggagacgttcgtccacctctgttccctgggcagctggacagcactgctggcccgagcagtggtgacgggactgctggctctcagcaccctggccctgtatgtcgccgttgtcaacgtgcactcctaggcttggtgtcccagaatttcacataccttctccctgtctccaggtttcagtgaagtaaacagtatttggaaagttg

SEQ ID NO: 14088 - DNA, 1577 bp, Oryza sativa
  ref <308>: DATABASE ACCESSION NUMBER: AK111436
  ref <309>: DATABASE ENTRY DATE: 2001-12-06
ctcgctatccctcgccgtagtcctcgccgtcgccgccgctccgaaaccctccccaccgcttccgctccgcccccatccgacaaatcatccaaaattcctcctccaactctaagcctcgggacgcatcgaccgctacagcgctatcggagccccggatggcgccgccccctccttctccgccgcccccgtctccccccccggcgccggcgccgccatcttcacggtgggacacgccggtgccgcagtgggtgatactgtggagggtcccacgagtatatccggccgacgtgccctccaagggatcggagttctccctcgctctcgcggctccgccacggatcagctccctctccctcgcggcgccacctcatctatccagtgcctacctcacggcggcgccaccgcagatctccgcccatggacgcttcctctccggcgacctcggcccgttcgcccccttcgtcctagcggcggacgcttctggggtcatcctcgtgcacgcctactccgcccgtgtcctgttcgaccacagcggcagcggcagcaacagcggcagcggcagcggcagcgggggcccgttcgtcgccggcgacaagggtggttcccgcataggtccctgcctctacgtgattgacacgttctctgcggcggcggatttcctgcccgaccgcaacaccaaccccgggctgaccaacttcgctcttgtcgtgcacaatcacgaaggggtcgtcgcgcgtagttactcagtcatggaactggttctcgaggctgacagtaataaggcacagctttgggaattcagttctgcttccggagtatggtctatgaagacactcacatgccccatccacttaccatggaacagtaacatttcattcgttttttgagggcaagatttggtgggtcgacttgtgccgcgggttgctgtcttgtgatttcagtgctgagggagaagaagagctcagtatgacgctacttccagatggcttgcatgcagaggaggttgaaactctttctagtgtttgcgtcagcgagggcaagatcacatacgtggctgtatctggacatcctgggggattaccttctgagggcaatgttctcgtctggatttgtacagtgactcctatgtcagtcatttgggacacgatatgccatgctcttggtctgcagaggggagctccaccagtgatcagtgtgcttgaccggcaagatgccagcgtgctctacttctttatgcagcaacacctagtgggattccacctcacaagaagactggtaaaacattcttgcatctgtggccatcaggggggcacttctcgaatggttctctccatgggaaccccttccaattgctccaacacaagtatactagcgtcattctctgcaactgcaactgcaataggactcgtatgcaacattatttgtactaggcactaggactgagatggcataatggatattatctcgtgcattttttttgtttttctaaagaagcttccgttatgttaaatgttcacacaaattgagaagtcactgtatgtctgtataatactgaaactcctgcgcaaagttgtggc

SEQ ID NO: 14089 - DNA, 1587 bp, Oryza sativa
  ref <308>: DATABASE ACCESSION NUMBER: AK111437
  ref <309>: DATABASE ENTRY DATE: 2001-12-06
gtgctttgctctcttgcctctcctgtctctttctcggatttttctcatcgaatctctccacttcactagccaaaagtacagtaccaccagtgtacttcaccgtttgatgcgcctcgccgccggcaatggcatccgccgtcgctagcaccatgccctcgccgccgccgcccgccgtctcgttcggctggctcgcccccacgcgcgtgtcgccgccaccggcattgccggcggtggcggtggcggcggagcaggctgtgtcgaaggagttcattgattttgagttcagccttggtggatctgcgaccatgttgccgccgacaacctcggtgcagcgacggagtacgagagggcggtgttccgcgcgctgtcggcgctgatcggggaggagagggacgagcaggtggcgatcgagcggcacttcgagttgctgaaggaattccccagggatctcatgtctctaaagagagctcagctcatctgcttctacatgggacgccctgatacatcgctcaaatttgttgaacaggttttgccagagaatcaagaccagaactacatttacggcatgcttgctttcccattactagaacttggaaggatggatgacgctgaaaaagctgctcggaaaggcttggccataaacaagaacgactgctggtcacagcataatctgtgccatgttttccagcaggaatgccatttcaaagaagctactgagttcatgaaatcgtgttctccatcatgggcagcatgctcatcgtttatgctaacccacaactggtggcatgttgctgtttgttacttggaaggtgaattccctacaagtaaagttctggagatataggatcataacttcatgacagagcttgagaaaagtgattgtgaggcagcagaggtgtaccttaatgcactagggctgctactccgtttgcatattcgtggtcaggttgatctggccaaagatagattggcagcattgctagatgcacttacgaatgagaaaatatggcatgtggaatggctccttgatctacttgtattatgggcactgtcaagtatgggtgagattacaagagcagacaacttgttggaatcacttaggtcaagagttagttcgatggacacaaaaaaacagcaagtgatgcaaaaggcaatccagctagcagaggctgtgtatgaatatggaaaaggagagcacaagaaagtctttgacatcttgggtccagatttcgatgcactcagttgtaaaatgattggggcatcagatgagcaagtggatgtcttcaatgaagtttggtacactgtgctaataaataccggagagagttccagagcaattgaggtgctcgagaaacaaattaggaaacgagagggtgcacccttcttgtggcgcttgctggagaaggcatactcattgcatggcagagctgcagatgcttcagtcgcatccgaaaaggcaaatgctctacaggctgcttattctcgttaatttcgagttatgaaatacagtataccaatatgcttacatgccctatagagtgcacattcgctgtttgacataataagtggccgcgaaccaatttatat

SEQ ID NO: 14090 - DNA, 1587 bp, Oryza sativa
  ref <308>: DATABASE ACCESSION NUMBER: AK111438
  ref <309>: DATABASE ENTRY DATE: 2001-12-06
atggtaacactacccaaagaaaaaagatgatagtcgaggctcgagatgaagccccaaggagcatgagatcgatccataccacaccatccggagaagaccgtaatcttataaatacgattacaccaagttagcacctgggtgccggcacgctgcaggcggctgccaccttcctgctgttctgggagttgatgtacttcctcaggtcggggttcttcgcgtacctgcacaggcagcgcttctgcgcccggagccccgcgcagcacgcggtggacggcgcctctccccataggatcgccgccgcgcacgggcgcagcgccagcgggtcgcacttcgtcgcggccgccggcgctgtccgggacgccccgcacaccgtgcctggagaggtgaccacggccagtacgagtacgaggacgagcacctcgttaggcttcatggtcatggctcgtcgctgacggcaacgccggtaagtagtgctgagatgagcagcaaggttggaatggtttgggaagagcacgagagggggtggtatttgtagatggagctgtgctgctgctgccttcgaagcggaggatggcgcgccgggaaatgatgcgttagttgtgcacttgtgcacacgatagcgtaagaggtagagcacggtcgttcgcatgcgagtgcttggggattctgaatctgttcttgttgtcacttgtcagtatggaagacagaactgcttcggagtttgggtagcttgaagtacactgtatgcacagtacatgccaagattgttatgcactcaactgagtttattactgctaattttctcgagagaagtactgcgagcggtgacaggttttctgcctcactgaacaatggtcaaatgcaaaggcttagcagttcggcgcgggcaccttgcacgcggtgaagaccctcttggtgcgattggagctgacaatgcgcttcactttggggtcgtccttgtagaggcacaggcagctggagccctgcgccttgagcttggagcagcacgcggacgatggcgagccctgccccacaccggagaacgcgctgacgcacgggctcagctgcatcaggtcgcacgaagccttcttcgaggccctcgcgctggccgcggccggggtagcctgcaggaggaggaggctgctcagcagcgcggcgatggcgatcgccgcgacaacggtggaaaaaacagaaggcctcgtcgtcatcgcgacggcttgatggatctcttgctggacaccgggatgctaggatgggttatcgtggccggcgtgcgtgtgtggcttttgtaggcgccggcgacggcgggggcaatgtggcaggtgagtcacggtgcaagcgtgcgcaagtgactgcaacaaccaaggacggtcatggcgaaagcacctcacgcgtccaccgtctacaggatgtagcagtagcacggtgaaagaagtgttgtcccgtccattaggtgcattctcaccgttggccagaacaggaccgttcaacagttaggttgagtgtaggacttttacgtggttaatgtatggcaaatagtagtaaattttgcccccattggtctggctgagatagaacatattctgg

SEQ ID NO: 14091 - DNA, 1523 bp, Oryza sativa
  ref <308>: DATABASE ACCESSION NUMBER: AK111439
  ref <309>: DATABASE ENTRY DATE: 2001-12-06
gctaccgcttgccagttgccgttctcccgtgcgaggacaaggcagtacagtacaatggctgtgcggctctgctgctgctgcttcctcctcttcgtcaccatcgctgccgccggtggctccctgacgcggacgaacgtcgcgacgctgccggggttcgacggcgcgctgccttcacgcctcgagaccgggtacgtgacggtcgacgaggagaacggcgccgagctgttctactacttcatcgagtcggagggcgaccccagcaccgaccccgtcctcctctggatcaccggcggcgaccgctgctccgtcctcagcgccctcttcttcgagattgggccgttgaagctggtcatcgagccctacaacggcagcttgccgcggctgtactaccacccttactcgtggacaaaggtcgccagcatcctcttcgtcgactcgccggtcggcgccggcttctccttctcaagggaccctaaggggtacgacgtcggcgacgtctctgcttcgatgcagctcatcaagcttctcagggagtggttcactgagtatccgcactacctctcaaatccgttctacgttggaggagactcctatgccggaaagatcgtcccgtttatcgtgcagaagatctcggaagatattgaagctggcgtcagaccgacgtttaatctgaagggctatctggtaggtaatccgagtacaggggaacgcattgacctcgaatcaagagtgccgtacagccatggagtcggaatcatttcagatcagttatatgagatgataatggagcactgcgaaggtgaggattatgacaatcccagcaacgtgatttgccaacaagctttggctaggtttgacagcctactacacgaaggttcgagggcccaaattttgaacccaaattgcatttatgtgtcccccaagccaaatcatgagacaatcgacagaaagatcttgaagggggagcatggaggactaaaacatccacctcctcaaccttcaataaaatgtggtgtctatgccaactatttgtcatatttttgggcaaacaacaactttacacgaagaactctaggaatcaagaagggcaccataaatgaatgggttaggtgccacgaacatgatctaccatacaacatcgacatcaggagcagcataaagtatcatcgaaatgttacactaaaagtggtgaccacgatgctgttgtgccattcctcgggacacaagcctgggtgagatcactcaactacccaattgtggatgactggagagcctggcatatcgatggccagtctgctggattcaccatagcatatggaaacaatttgacattcgctacagtaaagggtgctggacacactgcaccagagtttgagccggagaggtgctttgcaatgtttaagcgttggatttccagcataccactatgatgatggatgtgcatatcgtgtaatttgcacaaatggaggattgtagtatgaatgtcatgggtgaataaaatcaattcttttttgggaaggctc

SEQ ID NO: 14092 - DNA, 1496 bp, Oryza sativa
  ref <308>: DATABASE ACCESSION NUMBER: AK111440
  ref <309>: DATABASE ENTRY DATE: 2001-12-06
ttcacatcaccgttaatttcacacaccggctgattcgattctttcccatggcgcgccgcggcggccggcgcgcggacaaggctagtaactgcggcagcgcgccgaggaaggcgaaggccgtccccgccgcggcgacgtccgtggacgacgtccccgaccacctcctcgaggacatcctcctccgcctcggcccctcctccgcctgcctcgtccgcgcggcgtacgcgtgcaagcggtggcgccgcgtcgtcactgccgcgggcttcctcgacgccttccgcgcgctccacggcgcgcaccaccaccgcgtcgccgggtactaccacaccgtcgacgcctactacgcgccggcgctgcccggcggcgagagctccgtcttcgtcccgtcctcgtcatcgctcgccggcgtcgacggccgcctgtggttctcgctagattttctcccggcgagcgacgacttctcctgggagctcgccgacagccgcggcggcctactgctcctctccaagaagaggaggacacacacacgcagcggctatgcagcagaaggcgacttcttcttcactgacctcatcgtctgcgagcccctgacgcggcgctaccagggtatcctttgtccggccgacttcactggatatcgatgcatcggcgtcttcttgctcgacggcggcgatgacggcggcggtgacatcagcctgtccaacttcagggtcctctgcgcgctctacgatctctactggttaaacaatcggcacattggcgtgcaatccgcctgcgtgttctcgtcaggcagacatggcggcgggtggcggctaccgaagagcgccgtcgcggatgacatccagctcacagcaaggttcaacgccatgagcttcgtggggcgcgccggtggctgcttctactggggaatcgacgacgacgacgacgaagacgacggcgccatgctcgtcctcgacgagaccaccacggagttctcgctggtgacgttcccggacatcatccgggagaactaccacatgacgacgttccggatcatcgccggcggcgacggcgccatgcgtgttctccgcgtgataggcaacgacctcaaggtgttcacgcagctggcgggtagcggcgttgagtgggtgctggagaagctggtgcggttgccggaggcgacgcggggattgccggggcacgaggagaggtacttcgagcagaacgaagccatgatcgtcgcggcggacgcggcgtacgtgctcctgacgccgtcggtggagaagacgtggctcttctccgtcgagctggagacgatgacggtggagcgccaccatgagaggaacaagtacgcgggggtggcttacccgtacgagttgcctttgctgcgggctttgcacgcgggcggcagatatcgatgagaacaacgacttggcaacttggcgttggacgatgatatggaatgacattgtttggtttgatatcaactgttcgtgcacgatcgattcatcggctgc

SEQ ID NO: 14093 - DNA, 2154 bp, Oryza sativa
  ref <308>: DATABASE ACCESSION NUMBER: AK111441
  ref <309>: DATABASE ENTRY DATE: 2001-12-06
acatgaacaaacaaatactagtcaccgtcacgttcgctagagcagagcacgcgcccacaaatacgagtaaatttccacgctgcgattctgcgaacaagaaacccccacacttctcccgttctcctggaggaagacgacacccaaaaactaagattgggtagcaatcgcttcaaagaagccaagagcgagtccacttcgtaattcgtcacctctgctgaaaatttcacaacacggcgaaggagtccttcttgagacggaggagcagcagcgacagcgacagccatagtgagaaattgcaagatggaggtatcactgccattgctgatcggcgtcgtcctcgccttcctcctgctcttcgtcctcgtcaacatcaagaactcatgccgctcctggtggcctccgccggagaaggagaagaagaagctgcggctgccgccggggccgtggcagctgccgctcgtcgggagcctgcaccacgtcctgctgtcgcgccacgccgacctgccacacagggcgctgcgcgagctcgccggcaagtacggcccgctcatgatgctccgcttcggtgccgtgccgacgctcgtcgtgtcgtcggccgaggccgccagggaggtgctcaagacgtacgacgccgccttcgccagccgctacctcacgccgaccctggccgtcctcagccgcggcggccgcgacatcctcttctccccctactgcgacctgtggcgccagctccggaggatctgcgtgcacgagctcctcagcgcgcgccgcgtccagtcgctccgccacgggcgcgaggacgaggcggcgcgcctcgtccgctccgtcgccgccgagtgcgccgcccgcggcggcgcagccgttgtcaacgtcggcgagctgatctcccgcgcggtgaacgactccgtcgtgcgatccgccgtcggcgcccggtcggcgcggcgcgacgagttcgtgcgcgagctcgacgagtcggtgaggctctccggcgggttcaacctggccgacctgtacccgtcgtcgtggctggcgcgccggctcagcggcgcgatgcgggagacggagcggtgcaatcggagcttgatggccatcatggacgacatcatccgggagcacggcgacggcgaggaagacctcctcggcgtactcctcagattgcagaggaacggcgatgtgcagtgtcccctcaccaccgatttgatcactaacgtcgtcttggacatgtttgcggctgggagtgaaacctcgtctacgacacttgagtgggccttaacagagctagtaaggaacccacacatcatggaaaaggcccaatcagaggtgcgggagatatttaggggagaaaacaagctaacagaggaaatgatggacaagctaagctacctccgcttggtgattcgggaaacactccgactacatttaccggtaccattccttcttcctaggcagtgccgtgagccatgctcggttatgggctatgacataccagtgggaactaaagtgcttgtgaacgcttgggccatagctagggacaatcagtattgggatgatcccgaggtattcaaaccagaaaggttcgagaacaatcgtgtcgactttaagggtatagatttcgagttcattcctttcggtgctgggaggaggatatgccctgggattgcacttgggcttgccaatatagagctcatgcttgccagcctcctataccattttgactgggagttcctcgatcgagacaggaatgacgagattgacttgtccgagacatttggtatcactgcaaagaggaagtcgaagctcatggtgtatgctacacaacgtattccatgtttgggttaactgttttgtgtatgtgaactcttgcataactaggcacgttctccatgctcttatggctcctctttatctggtagactaaacttaattctctggttacttatagataatgtcaccctagggtgagtgatgtgaaatgtattgatttgaactagatagtaccaaaaatatgtaattttgatatatgataaaagtgtgcaccattttatgatgacaattaattattttgtaagtatacctctctccgaataaatctaaacctgtgtaaattagtatgtctttgtacattatcactattattcagtagcacggattctc

SEQ ID NO: 14094 - DNA, 1603 bp, Oryza sativa
  ref <308>: DATABASE ACCESSION NUMBER: AK111442
  ref <309>: DATABASE ENTRY DATE: 2001-12-06
acgcaaaccaccccaacctgcacaacctctcctcaccgaaccaaaatctcacagcttcgcttctctctcgcctcccgaagaaaatagctagagaaaaaattcgcggatcaagaaggaaaaagaaaaggaacacttgagcttgtttggactgacaacaatggcggcgaagcggcttcacgacggctacggacaggaggaccagcccgacgacaagcgtgtgcgccgcatgccgtccttctcgacggtgatccgtgaggccttgatggtgaagcagatgcagactctgttcgtcgcactggagccacttctccgtagagtggtgcaggaggagctccaggcaggtctcgtgcgcagcccgcgttacatcgagaggatgtcgcctgagacgccgccggctcagccgccgatgtggaagctggcgttccggttcaagccgcagctcccgatcttcaccgggagcaagatcgaggacgtgaacggcaacccactggagatcatcctcgtcgacgtcgacaccggcgcgccggcgacgatctcgcagcctctgcgcgtcgaggtcgtcccggtcctgggcgacttcccgccggacgaccgcgagcactggacggcggaggagttccagcagaggggcatcgtgaaggagcgctccggcaagcgcccgctcctcaccggcgacgtcagcctcaccatgcgcgacggctgcgtcgtcgtgaacgagctccagttcacggacaactcctcctgggttcgctgccgcaggttccgcatcggcgtccgcgtcgtgccgggcagctacgacggcccaagaataggcgaggccatgaccgagcccttcgtcgtcagagaccaccgcggcgaactgtacaggaagcactaccctcccgttcttggcgacgatgtctggaggcttgagaagattggcaaggagggtgccttccacaggaagctgacgcagcacaacgtcaggaacgtgcaggagttcttgcggctgctcacggttaagccggacgagctgcgcgctatcatgggcgacggcatgaccgatcgcatgtgggaggtgacgacgagccacgccaagaagtgcgtccccggcgacaaggtgtacatgtacagcacgcagcacggcaccgtctacgtcaactccatcttcgagctcgtgaaggtcgagctcgccggcgtggagtaccagctgcaccagctgaacaggggtcagaaggcgttcgtgcatcagctgctgctggcggcgtacgagcagcgaaacaacctccaagaggccgacgccatggcgctccactgcaacgacgttcctctgctgcagaatgcagcggagataactatcccggcgcttggagacacgcagctgtggattcagaacagtctcaacagccaagaaatcgacttccaggtcgacgagatcccccaagctaactttgcgcttcagtggactggccaaatgtacaacatttcaggctaagaacagtcactgatgaacagtaactaaggctggggactttaaaaggtttcagaaatagggtgtacattgtcttttcaagttcgcgtctgtataactgtgttcaagtgacacgaaggttaagggtaggtg

SEQ ID NO: 14095 - DNA, 2210 bp, Oryza sativa
  ref <308>: DATABASE ACCESSION NUMBER: AK111443
  ref <309>: DATABASE ENTRY DATE: 2001-12-06
aaaccgacttggctttcgctacgcccagcttcggccgcgctccaatatatcgcgttgcggaccaaatcacctccaaaattttttcactcgttttccccttccttccgccgcccctactcgctcggtgttgggcggcgggcgtcccactcccaccacctcgaggcgagggggctagggtttccgccatggaggacgacgagtacgaggaggggatggagatggagatgggcgggcaccaccacccgcaccacggcggcgggtacggcgccgaagagtacggggccgtcggcggggaggagatggaggacgaggaggcggatggggacgcccccgacgaggaggagatcacccaggaggacgcctgggccgtcatctccgcctacttcgaggagaagggcctcgtgcgccagcagctcgactccttcgacgagttcatccagaacaccatgcaggagatcgtcgacgagtccgccgacatcgagatccgccccgagtcgcagcacaaccccggccgccaggccgagttcgccgagacactccacaagatcagctttggacaaatctatctgagtaaaccaatgatgacagaagctgatggagagacagctactttatttccaaaatcggcaaggctccgaaacctaacatactcggcgccactatatgttgatgtatcatacagagttatgaaaaaaggacatgcaaagaggagtttggccgtccaaatagggagaatactatgggaatgcgtcatgggtcatatgataaactagatgatgatggacttgcaccaccaggtacaagggtatctggtgaagatgtcattattgggaagacatctcctattccacaagatgatgcccaagggcaagctactagatacacaaagcgtgatcacagtacttcgctgcgccacagtgaaagtgggatggtggatcaggttctcctaacaacaaatgctgatggtttaagatttgttaaggttagaatgcgatcagttcgtataccacagattggggataagtttagtagtaggcatggtcagaaaggaactgtgggaatgacttatacacaagaggacatgccatggactattgaaggcatcacacctgatattattgtgaatccacatgctattccatcccgtatgactattggtcaactgattgagtgtattatgggtaaagttgctgctcacatgggaaaagaaggagatgcaactcctttcactgatgttactgtggataacatcagcaaagcacttcataaatgtggttatcagatgcgtggattcgagaccatgtacaacggtcacactggaagaaaattaactgccatgattttccttggtcctacttattaccagagacttaagcacatggtggatgacaagattcactctagaggccgtggtcctgtgcagatacttaccagacaacctgcagaggggcgctcacgcgatggtggtctccggtttggagagatggagagggactgtatgattgctcatggcgctgcatttttccttaaggaaaggttatttgaccagagtgatgcgtacagagtccatgtatgcgagaagtgtgggcttattgctattgctaatctcaagaagaattcctttgagtgcagagggtgcaagaacaaaaccgacattgtccaagtgcatataccctacgcgtgtaagcttctgttccaggagcttatggcgatggccatcgctcccaggatgctcactcaggataacaaaactgggaaggatcagaagaaacgttgagaccaaatattacatggggcactcgcttgtcgtactatgtcttcgttcatagtcaatacttaaatctaacttgggcttagcggtctgaccccctgaggcagaaagcagtcagtaggccacatcctcgagttatatatatccctggtgtgctgtgcccttggattatgccaaattgacgccatgggcgaagtggtgcaaagaaattttgtttcttgtatactagggatacggattaagggactgtactgaacaatcttttaccgggactaaaatgttgttgtttgtactgtttcttttttatttttttttggcttttggggatactagatcccaactcgaatattgcctgtattggctctaccagcacgatatcaaaattgtttgatgagagatcttgtaagaaaatagtaataatttagtgttaactactgct

SEQ ID NO: 14096 - DNA, 1430 bp, Oryza sativa
  ref <308>: DATABASE ACCESSION NUMBER: AK111444
  ref <309>: DATABASE ENTRY DATE: 2001-12-06
acacttcacactaccatccgctccatcgaccagcggtggccggcgacgccgccacggtgctcgtcccctaccagaagcggcggcggccggagcggcggagagcgtgtcttccggcgactgagttgaggaggggcgctcgccacctgttcgacggaatggctacgaggcgcgacggcagcagcaccagacgcgagggactcacggccgaggaggacggcggcgaggactggcttagcaccctcccggatgagatcctccacaatgtcctctccttcctgccagcgcacgaggccgtgtggacgtgcgtgctctcccgccgctggcgcaacctctggaggtccgcccccgtcctgcgcatcagatacgcagagagatgggatggtatggctaagttcgacaagtttgtcaacaatctcctgctcttgcgcgacccggtgcctcttgatgagctcgagttccaaaccgtattgggcatttgccagttgcatccactacaaccttctttccgcttgcttaagtacgctaacacatggatcaggcatgcgctaatgtgcaatgttcgggttctcagagtcctcgttcaatatcaatatgatctacccctgctgaaagtcaacatgcctctcatctctgaacacttaaagaccttagagcttaggcgtgtactgctggacaagcgtactctggatttctcaagctgtccttcactggaggaccttgagatgaattcttgtgggaattccaccgccaacaagattttgtcacagtcactgaagcgtctttgcatcaccaatggtcagtttgctgacgatctgtcaagcttacctgcattgcaagaccttgagatggaatcatgtggaatttgcaccgagaaggtggtgtgccagtcactaaagcatctctgcctcacccaatgccacttcgaggagcccacacatatttctgccccaggtcttatttcgctacagctgaatgatatatggggctggactccttcacttgaaaccatgccattgctagtaatagcatctgtcaagctttggaaagggtcaatgggttgctgttcggaatgcacatttcatcctggtacatgtgctgattgtgatggtgatcctgatagcagtttcaagtgtgagtttctcagagatctgtccaatgctgtgaatttggagttagcagctgaagatggaatggtacatttgtgttcatttctgacttgtcttccagccaatttttgccattcatactatcaaacactacatattcattagctttatattcaaacagaattctatgtgttaccatggatttctgttctgccttaccatgtttcaatgaggacatcccctgaacgttggtttgtgtgggtgggcagggtgaactattgaattatatggttttgaagcttgtgacatcaatatgttttctag

SEQ ID NO: 14097 - DNA, 1433 bp, Oryza sativa
  ref <308>: DATABASE ACCESSION NUMBER: AK111445
  ref <309>: DATABASE ENTRY DATE: 2001-12-06
aacgaacgctaaaaaagtaacagtttctgtactttattgcttcccgcgcccccgtcgtcctccttcaccttccatcaacatgcccgccaagttcttcaaggatttcaacaaggacaccaaggacctgctgtccaagcagtacatccccgcgggtgactggaagatggagagcaagatcaagcccgccgaccgcaccttcatcatcaaccccggcttcgaggccaagggcggcaagaccaagctctccgtcgatgtcgactacaacgtgaaggagtacagcgtcgagaccaagacgaccttcaccaacgacggcaacatcaagccgaagctgacgtggaagaacagctgggctaaggtggagttcaccctgaacaagctcgccatcgacaccgacttcgagttggtcgatgagatcacctacggcgacgccgccttgtacggcaagttcaccaaggctgccggcgaggtcagcgctgcctacgccgtgtgcgcccccgccaccatcggcgccggcgtcaagttcggcctgaacggcgccctcaagggctggtccgctggcgtgcgcgccacccacgacggctacatcgtcaacgtgacgacggaggccctcaagacgtacacgacgggcgtcttcgctccggtcaagatcgccggccagtccgtgaagctggcggctcaggtcgactgcggcaacaaggacaagttcgacgtcgccgtcggcttcgaggtgcccgtgagcgacttcaccctgaaggtgaagaccaacaagaacttcaacacgactgtcgcgctcgtgcgcaagttcgctgagaagtggaccgccgcggcgtccttctcgctcgacagcgtgccctcgttcggcctgaccctgactcgcgagtaagcgcatgccgtccgcgactcagccaacatcgtacaagcaacttttcgtcggtgtgcccgccctgacccttcgaatctgttgtcacaagttctgttccgtcctttttctggtttcttcactacctttttttcgttcattttttccttgaccgctacctccgtaccctgcctcgtgtgcaaagtgcaacgcttatcagattgcagatcaagatgactgacctcgtttctccaccccccgtcagattcccgaagcaagaaaatgagagcgacttcgggcggagtgatcgcacctcgcggattatccttcgcccctttccgtctccaacctactttgtgaggaaagacgtgatgtgtgcagctaagagagaagcgtgtgtgaagtcgtcgaattggcaagtttgaactgatgaaaaatgcttcacgatctgcggaaagattttgaggagcgcgacgcccgtatctgtcgtgcgacacaaacaccgaaactacacaacacgagagagcacaccgcactacaaaacgatgatgatgatggcgaagcctgatcagcg

SEQ ID NO: 14098 - DNA, 1587 bp, Oryza sativa
  ref <308>: DATABASE ACCESSION NUMBER: AK111446
  ref <309>: DATABASE ENTRY DATE: 2001-12-06
atttctacctcacacacctagctagcaagtaggctctctcactccacacccacactactcctcccaggctgcctgcctaaaaggctagacctatccatctcttccccccactcctccagcatcgccatcatccactgttcatccactccatctctctctctctctctctctctctctctccatcgatccctgcaggttcttgctgctgctgctgctgccttgcttgctgtcaagcatggcttgaccacctgagagcgaggagagcatagcgtagtacttggctagctgctgttcaattcctcatggatgattggaggatcgctagctaggtcgcccggatccacggacacctctcctcgtctcgtgctcgtgcatgccaagatcgatcgatcccagctgctgctgcgagtggagcagtggaggaggagatcggctgctacctgacctagatcgggaagcagattcatccggttgcattacggcggcgaggcgagggcgaggatggatcgtcaccatcaccaccaccaccaccaccaccatcacatgatgtcgggcggcgggcaagacccggcggcgggggacggcggcgccggcggcgccacgcaggacagcttcttcctcggcccggccgcggccgccatgttctccggcgccgggtcgtcgtcgtcgggcgcggggacgtcggcgggaggcggcggcggcgggccatcgccgtccagctcgtcgccgtcgctgagccggtacgagtcgcagaagcggcgggactggaacacgttcgggcagtacctgcggaaccaccggccgccgctgtccctgtcgcggtgcagcggcgcgcacgtgctggagttcctcaagtacatggaccagttcgggaagacgaaggtgcacacgccggtgtgccccttctacggccaccccaacccgccggcgccatgcccgtgcccgctccgccaagcctggggctccctcgacgcgctcatcggccgcctccgcgccgcctacgaggagaacggcggcacgccggagatgaaccccttcggcgcccgcgccgtccgcctctacctgcgcgaggtgcgcgagacgcaggccagggcgagggggatcagctacgagaagaagaagcgcaagaagccctcgtccgccggcgccggagccgggccctcgtccgaggggagcccgccgccacccggcggctcggccagcggcggcggcgacacgtcggcgtcgccgcagttcatcatcccgtgagttcttctcgatccccatcgccatctccgcatctccattgatcgatcgagcctcgcagcaagaaattccaatctccttggcagaaatgccatcttgctttgccagtacaaggcatcatatctcttctttcctcctgaattggtttcgatctctcccattttgcaaaaaaaagatttctcctctttttaatttcatctctgtctcgctttctaagctaggacgaaggtcatgcatgagtgatttcaattggtagcttaattaagacagaaacaacatgtgttatgtgtacttgtcctgggaacagattccatatatatgccaaatgctttaatttgggct

SEQ ID NO: 14099 - DNA, 1891 bp, Oryza sativa
  ref <308>: DATABASE ACCESSION NUMBER: AK111447
  ref <309>: DATABASE ENTRY DATE: 2001-12-06
atttatttacctcgcaagtttagtttcgcttcatcctgtccagtctctgacggtagccggaggaggcagcccgccgccgtgtcctcttctcctcgcggctgcggaggagatgagcggcggcgcgaggagggtgctcgaggcgtggaggctcggggtggtgaggtacggcgacgccctcgggctccaggagaggctcgtcaccgaccggagggccggccgggtccccgacctcgtgctgtcgctgcagcacccgccgacctacaccctcggcaagcggcgcaccgaccacaacttgctcctgccggaggccgacctcagggcgctcggcgccgacatccaccgcacggagcgcggcggcgacgtcaccttccacgggccgcggcaggccgtgctctacccgatcctctcgctccgggccatcggcctcggcgcgcggaggtacgtggaggggctcgagtccgccatgatcgaggtggcggcgctgtacggcgtccaggcgtgcccgggtgccgccggcgagaccggcgtgtgggtcggggacaggaagattggcgccatcggggtcaggatctcgtcagggtttacttgccatggtctggccttcaacatcgatcctgatttgggtttcttcgagcacattgtgccctgcggtatcgccgacaaggaggtcacctctctgcggcgagaggcggcggtggagctccctcccgacgaggtgatccatgatcagctcgtgcagagcttagcaagaacattctgcttcagcgatgtggaattcaaggatgaatccgagtgcgccgacatggtttgcttagctgcagataagcaatcctgattgttttactatgtatactgaacttagagttcttcagaacgtcttgccgtcaagtctggaaatgacattaggaaattttcgtctggttttgttcattgcgaatgaaggcatttggacaaagccttatttgctttggaatacttgaaggtcaaacaaagaaaagaaccatgagcatatctatgatggtttgagagatctgtccaatgttgtttccttcttcatcatcctagaggacatctcagtcattgcttctgaaggaatcgtaccagctgaaaatgcatcctgacattcggtgctgcaagattggagctcagtgcaggacggcttttgttctacaacaccaaccccccaagaataggcttccgaatgccgtggaagaggctgattcttgttctctgaaggtgtgctacgccgtgctgcgcttgaagaaggtgagctggcattggtcattggttcttgagccccagatgattcaaagcagatggagactgccttcccagatgcagtctgcagctggaactctgaggggctaagaggaagaaaagcactattacatgtatgctcattgtagtaggtgactgagtacaatggtggatcactataatctttctgctgaatctgcttcgttgctgggcaattcatgttatctttataggtgcatctgtagtagtatctgcaatgagacaggcgagacaacagtttgagtgaaatgaacaagaaaagggttcagttttctacgactatttgttgcaacacatctctttgtggtcgatttgggagaggacaaggttgacaagaatgaacagatgcccactctttccagaagatatacagatgcagataccagaaatgaggaaatatactgcaaatatatcatctttcatccgaacctggggaaattacagttgtttatcttcttctcgccgtacttcctccactggtggccgtcgttgtgcggcgcaaaggtatccaccttcctcatgcgcttctctttcctgcaagtttttttcagaaacatatcaacttctactccaattgaatcccccctgcactatc

SEQ ID NO: 14100 - DNA, 1679 bp, Oryza sativa
  ref <308>: DATABASE ACCESSION NUMBER: AK111448
  ref <309>: DATABASE ENTRY DATE: 2001-12-06
ctcgattcccctcttctccctcaggccgccgccgcgcaggcccgaccggcgcccggccgccgcccagccggggcaccgtgccgccgtcgcctcggcccggtcgtcgtcgtcctgatcctcgtcgtcggtgcgctgttcctcatcctcggcccgaccggctcctccagcttcaccatgccgcggatccgcacggagttcaacgaacccgtccacgttgcggtggcggctccgcctccgccgccgacgcagatgcaagccggcgtcaacacgagcggcgaggaggacagtggcctcctgccgacaacctccgcctccgccctgacggcgcgctcgtcgtgctccacgtccagccgccgccgagcatcgccgccgggctcaaccccggacccatccccttcggcggcccgagtaagcaatctcttgcactcgtcttcgcggaaatcaggacggacacttggtcctgtggctgtgagctgtggttcttgcgaattttttcggtcgagctgatggcttcctggatgtgccgcgcggctgatcaggcgaggtcgctggcatcactagtagcaagcatcaatagtcctcgccgccgtcgttgtgctggtcctggcataactagtagcaagcattactagtagcaagcatcaacagtcatgaacaccagtagcaagcatcaatagtcctcgccgccgtagttgtgttggtcgtcgtcgtcgttgtcgcagcgctgccgccgccgctgtcgtcgcagcgccgcccccgtcttcgtcgtcgtcgtcgtcgcagcgttgttgccgccgtcttcgtcgcgcagcgatgccgccaccgtcgtcgtcgcagcaatgccgccgccgccgtcgtcgcagcgctgcccccgttgtcatcgtcgtcgtcgcagcgcccgtcgctgtcgcagtgccgccgtcttctcccctccgctcctttgctgctgctgctgctgctgctgcatctgaggggagagaggagagtgctaggagagagcatattggaccaaagtgcaactaagtcattttacaacggaatggtgtgaaggatgcgataaagtttaactatggcagagagatgcttgaatattttagtgatacagagacaagcaccatctttcttaatggcatttagggaaaaacctcccaagggagagggcacaggcggcggcgacggtggcagcatcctccaatggcgggcaacgaccaacgggtgatattggttggagacggcggcgctcgcgggccgccgctgtccaatgcgccgcgccatggagatccccaccaccggccgacctcatcctcgccatctctctccgctgcctggttgccagacctagccagcctcccctcggctcgtcagccccctgcggccccgcctcgacgcccctcctctgccggtcggcttcaggctcgacgacgccccaagatccagtctccacgagctctgcccgagagtgtcagaccttcagcgtcgcgtctgtacatccgccgggcgccggctgagagcgtccatcccaaatcatttttgctgtcgttattgttcaactggaattgttctcatgattttgttgccagcctaggtgaaatagagcaatgctacacgtactaaatttttcttactaaacttttactaacaatcatctcaaccgtttaatttaaatatatagaagttac

SEQ ID NO: 14101 - DNA, 1475 bp, Oryza sativa
  ref <308>: DATABASE ACCESSION NUMBER: AK111449
  ref <309>: DATABASE ENTRY DATE: 2001-12-06
aatagaaatcgaacaggctgaggtattccacgatcgcacacttacctacatacttgctgatccgtcgcctcgtccgacgaatcatgcgagcacacgctcaactcctccgacgaggcgtcgccggcgacgccgcccaccacatccccgttctcctcgagccttacaggagccggctccaactccggctcctgcccctgcccctgcccccccggccccgcgtcacccacgggcacggggagcttgtacccgacctccccgaaccccccaccacaccgcccgcccccatgccgcggcgcggcggccgacggcgagtcgaggctgcgcgccttctccctcgcccggggggtcaccgagggggaggcggagaggtcaacgaggtcgagcgacttgcgcggggacgacgccgcggaggccgcccctgccccggggggcttccccacgcccttcgccttcgacctcgacttccgtggccaccacgcgggcatcgcgcgcgcgatcagcagcacgctgcgccggagcaaagcaccacaccacctatcgtccccctgctgccgccgagctcaggcggcggcggcggcggcgcggggaagcgaggagagagagagagaggaaggcgcgaggaaggagacgacgcggcggcggcgacgcttttagtcggagaggaggaggaggagatatttttttttccaattattttcttgtctaaaaaacccaagcaaaaaatgcgggggattgagaggtgtgctcgcgcgcgcgagtactagtggttgctgcgagcaagtggcgctcaggtgggtcccgagccaagtaaatgcttctcaccgtcaagcggggctccgcgtcctcgaaccgtggatggccccacctgccagtgacaggtggtgtgcgcggctagctgtaagcggagtgctactactactaccagctcgctctctcctctcccgccacttgcgcgcggcggctctgcgaggtggggccagcgcgtctttttttcttttttttttttttttgcgctcgtgcgtgtgttggctttcgcctttttttcctttttcaccgtgtgtgtcccgtgccgaatcttcgcggaacgcgggtggtggtactggtagtctggtagacgggtgcggtgcggtgcgcgcgtcgggttcgggtcgggagggaggtttggtgacgcacgccaagcggggacgtgttgagcacacaccggaggagtacactgtacacaacggcggcttgtaaaagcaagtttaatagccaactactagctccaatccaactatagccaatctaatagctcatccatataatagttatatactacacgattaatacatgatcccacatgtcatacacatactgtgtcttagagtccgtgctacagctggtataaatctgtagcccgctgcttttctctctccttatttttcttcttaaaatatatttgtagctagcttatagcttgctattgtacctgatct

SEQ ID NO: 14102 - DNA, 1616 bp, Oryza sativa
  ref <308>: DATABASE ACCESSION NUMBER: AK111450
  ref <309>: DATABASE ENTRY DATE: 2001-12-06
agagcaaacaaaccgttcgcgcgcgccaccgatcgaattcacgactgaattagtttcttcttcgtcgtcgtcgtcgatgacgacgaccgggagcactccgccgcggaagaaccggagcaatgtcaccggcggcgagggggggagcctcgaggagtacgcgtggcgggcggcgggcgaggctgcagctgcgaagaaggcgacgagggcgtggggcgtcagcgtcagcctccggagccacttcagctcgctcgtgctgctcctgctgctcctcctcgtcgccctcgccgtctccgccaccaccaagaacggcgaccccgccgagacgcctcacgcgccgccgcttccaccgccggcgtcaataaagctcccgtcgtcgtcgtcgtccggcggcggcgagtgcgacctcttctccgggaggtgggtgtacgacgaggcggcgtacccgctgtacagggagagcgcgtgcagggtgatgtcggagcagtcggcgtgcgagaagtacgggaggacggacctccggtaccagcattggaggtggcaaccccatggctgcgaccttcctaggtttgacgcggagaagtttctggggaagctaaggaacaagcggctggtgttcgtgggcgactcgctgaaccgcaaccagtgggcttccatgctctgcctcatcgacaccggcgcccctgaactccacacctcaatcaactcctcccgatctctcaccaccttcaaaattcacgagtacaacgcgtcggtggatttctactggtcgccgttgctggtggagtccaactccgaccacccgctgcgccaccgcgtcgccgaccggaccgtccgcgccgcctccatcaacaagcacgccgcccactggaccaacgccgacgtcctcgtcttcaactcctacctctggtggcagcgtcccgccatgaaagtcctgtgggggtcgtttgacaatccggcggcggtggtggcggcggcggcggaggaaggggacgagtacgcggtgtccaaggtgattgacagcctgcgcgcgtacgagctggcggtgaggacgtgggccgactggatggagttccacgtcgaccgcgcccgcacccagctcttcttcatgaccatgtcgccgacgcacctccgctccgacgagtgggaggacgccgccgccgccgccgccggcggaaaccacgggtgctacggcgagacggagccgatcgcggcggaggagtacagggggacaagcgggacggacatggcgttcgcgagggcggtggaggcggaggcgcggcggctcggggagcgcagcgtggcggtgcggctgatcaacgtgacgcggctgtcggagcggcgcaaggacgcgcacccgtcggtgcaccgccggtactgggaccccgtcaccgacgagcagcggcgcaaccccagcagctacgccgactgcatccactggtgcctccccggcgtccccgacgtctggaaccagctcctctacgcacacatcgtctcatgagccatgagacctcatatcgcatctcctttttgatatatttttttctcttcttgtatgctttcaaaaaaacaaatgtaaatcctccaacaattgataagtattccgtcactttcaaaac

SEQ ID NO: 14103 - DNA, 2256 bp, Oryza sativa
  ref <308>: DATABASE ACCESSION NUMBER: AK111451
  ref <309>: DATABASE ENTRY DATE: 2001-12-06
acacgatggacacttgtgagcaacttggttgttaaccatgtccatgtagacattgaattgaagctggcgcagctagctagcaacaatggcgggaggaggggtgatgcacgtcctgaacgaatgggcgatcgagatcctgttgctggtcagcttcttcctccagctcgtcctcctcttcttcgccgggttccgccgcgtgggcgcctccgccgtgctgaagctggtggtctggccggcgtaccagctcgccgacttcgtcgccacgttcaccatcggccacctctcggtcggccacgagcggcggcggctggtggcgttctgggcgccgttcctgctgctccacctcggcggcccggacaacatcactgcctactccctcgccgacaaccagctctggaagcgccacctcgtgttcggcctcgtcccccaggcgctcggcgccgccaacgtcatctaccgctccttcgccggcaccaccaccacgctgctctcggccgccatgctcatgttcgccattggcgtcctcaagtacggcgagcggacatgggcgctcaagtacgccaacctcagcagcatccggagctccgtcaatgtcgtcaagacgccgccggagcgtcgggttcagtactaccctccgtcgtcgctgcctcggcgtgacggcgaggaggccgacgaggaggagcttcttcttgttgctcacttccacttccatatctgcaagcgcgccatggcggactcgtcggtggaggtggactccggcgactacgaccccaagattttctcctacgggtggaaggagatgtgccgggtggtggagatggagctctccctcatgtacgacatcctctacaccaaggcggccgtgatgcacacctggttcggcttcgccatccgcgtcgtctcgccgctcgccgtcgccgccgcgctcggcctgttccgcctcgaggacgacctcggcagctaccggcagatcgacgtcgacatcacctacgcgctgctggtcgccgccttcgtcctggagacgacgtcgctgtgccgggcggtcgggtcgacgtggatcgccgccttgctgcagaccacgcggtgggcgtggctccgccacgaggccctctgcaccggccggtggtcccgcctccgccgtgccgtcgcgtcgctccggcggctcgtccaccgggacgggcacaggtactggtccggcaccatggggcagttcaacgtgctccacttctgcacccgcgacggcgcggcggagcggctcggcgcggcggcggagaaggccgggctcgggagctggtggaacaggcacgtcaacgccggcagcatcgtcatctccgacgaggtcaaggagctcgtgttcggacacatccagaacatgttgagagccgtggactccatgtcgaccaccgagctcgacgccatcaggacaacgagaggccagcgcgcgctccggcgccacggacttgacggcgacctcgccgccagcctcggcgaggagttccaccaaggcatcctcacctggcacgtcgccacggacatctacctcgccgtcagcggcggcgaccgatcttctccagccaacgccggcgacagggcggcggcggcgcggcagctcacggaggcggtccgcgcgctgtccaactacatgatgttcctcgtcatacgccccgacatgctcccgggcctcgtgctccggaggctgtaccaggtgacatgcgaagacatggccaggatatggcgggaacgcaaggacacccacgaatcatcgtcttcttcctccagctgccgcttcatcgacgtcctaagcatggtcaccaggctgttccagctgcacgtcgacgacccgacctccgcctccaggacgccggagaggaagaagctggcggcgatgctacgtgacaacgcctacaatggcgatcagaatgtgaggagccatggcgtcttcgccggcgctctgctcgccgacgagctgctgctgaaggagaaggagcggcggatgtcgtcggacggcggcggcgggtggttgttgccggtgatcttcgaggtgtgggtggagatgctgctgtacgccggcaaccggtgcagcagggagtcgcatgcgaagcagctcaacagtgggggtgagctcatcacgctggtgtggctgttggctgaacacgctgggctgtatcgtataaacaaacctaagcagcatttcaagtgtgctgaatatgctagtgatatggtatagtttactgaggtagactttgtctcattttt

SEQ ID NO: 14104 - DNA, 1514 bp, Oryza sativa
  ref <308>: DATABASE ACCESSION NUMBER: AK111452
  ref <309>: DATABASE ENTRY DATE: 2001-12-06
aacgaacaacacctacccatccctattctcctgtgcgacctacaatctcctcatcctaggtaccagatgccgtaactcaatcgcaccctccatcgcaattccgtgccgccaacaccgccgtcgcgatgctcagcggacctccgaggctcgtcccctttgtcgtcatctttctggttctttgctcagcctggtggtatttacatactccgagtaacgcagcaccagcctcgtcatggaaacccggtaactcaaactcgaactcgaagcctgcgtcgctccgaggcgatcccctcgatttcggcattcccttgcgcttcacagacggccagcccaagaagccaggcagcaactatacgtacaagattgtggtgccaaagactgagaaggaagatttgagttggatggcaacggagatcccggatgccccgttagtcatttacgaagtagacaaggccgatgcagagcataagattcaaagaacgaaggtcgcgaggctatggtctacctctcctatataattgaccactatgacgaccttcctgacaccgtcctgttcatgcatgctcaccgacatgcatggcacaacaacatgctccttggcttagacgccgcgcaaatgatcaaacgcctcaaccacgaacgagtcgcgcgcatgggttatatgaacgttcgttgtcaccatgaccccggatgccccgattggattcatatggatcgtcctggaggcgacttcgatttctttcgcaagcccgaggagatatattggcggcgccatatctgggaggagatacaccctggagcgccgattccaccgtctctgtctggtatttgctgtgcacaatttgctgtgtcgcggcagcggataagagaggtgccaatcgaacgatttcatcactaccgtaagtggcttctgaccacaggcatggacgaccagttctctggccgcatcttcgaatatatttggcactacatattcaccggccacgaggtgcattgtcctgcgatgaatacttgctattgcgacggctatggcatgtgctttggtgggcgccaaaagtttgccgacttcattgaaatgcaagatctacgcaataagctctggaccgaattagacgtgtacaatcagcgcgatgaccaagctaaaaaggacggaaaagatccgggcttcaacgagacggagaaggcagacaggatcgcgctcaattcgagaatattgaaaatggacgaggaaatggacaggctgagggaggaggccaagaagcggggcgacgatcccgaggcaaggaaagaagagacagagtcgtgggattcatcgcatatttgggactatgcgccccacgattagtgatggtttcatggccttgactttacgatatgctcggcgttcaggtgttatggctgctcagacatggcaagccctctccacatacaacattattgtacgatcatttgagctcaggtgagagtgtatataatcagaaattacctttgaaatgcattgaagctgtacacag

SEQ ID NO: 14105 - DNA, 1604 bp, Oryza sativa
  ref <308>: DATABASE ACCESSION NUMBER: AK111453
  ref <309>: DATABASE ENTRY DATE: 2001-12-06
tatggattggttcacaagggtagattaagtgatggaagggcggtggcagtgaagcagctctctcagtcatctaatcaggggaaaaagcaatttgctacagaaatcgaaactatatctcgagtacaacactgtaacctcgtgacattgtatggttgctgccttgagagcaatacgccgctgttggtttatgagtatctggagaatggaagccttgaccaagcactgtttggaaagggaagcttgaacctggattggccaacaagatttgagatatgcttaggcctagcaagaggtatagcttatcttcacgaggattctaccgtccgcatcgtgcacagggacataaaggccagtaatgtcttgctagatgccggtctcaaccctaagatttcagattttgggcttgccaagctctatgataacaagaaaactcacgtcagcacaaaagttgctggcacatttggctaccttgcacctgagtatgccatgagaggtcatatgactgagaaagttgatgtgtttgcattcggcgtggtcgcgttggagactgttgctggtgaatcaaactaccagaatacacttgaggaagacagaacttacatatttgaaagggtctgggagctgtatgaaaacgggcacccgctcgacttcgtggacccaaaactctcggaattcaacagcgaggaggtgatcagagtcatccgcgtcgccctcctctgcacacagggctcccctcacaagcggccgccaatgtcgaaggtagtctccatgctcaccggagacgccgacataaccgaagatgccgcaaagccgagctacatcacggagtggcagatcaaggtcgggagctgccaccacacgggcagcagccaggtcggctcggcgtcgacgccgccgtcctccggtgatggcggcgccggccaggcgagtagccagggcgcaggggaaggcagcccgctgactccctcgccattgttcacctccatcatcgacgagggcaggtgaagataaccgagaagcagggcaaggaaggcttggagctaaattcccggctcatacaaaggcggtctcatcacttgctgacttgggtaggaggaagagggagtaggtgattgaacgatctaaggcatctactgcctccaatccgttctaaaatactgtaatttagaatgtgatttaactcatcctaagataatgaatcgaaatagagattgtctagattcgttatctttaggatcggtcaaatcacattctaggtacaatattttggaacgaagtagtagcagtctggtatgcccgtgcatcacgcacgggatcacatggtgttacaggtgtttgggcatcgcttcctcgctggaatttggtcgagccgtgttgttgggttgacctaggtggtgtgagttcatgagcgtgcctcgtgcgctttgcttgcttaatttccttccctttggccttgttcttttgtttccctttttctcctccaatgcgcaagagggtgtgcccttttcacagtacacaccacgcagatgaagggctaacaaagtagcaattgcttttgtgtaaatattcttttgttaatatcatcattagaagcacgaggactg

SEQ ID NO: 14106 - DNA, 1569 bp, Oryza sativa
  ref <308>: DATABASE ACCESSION NUMBER: AK111454
  ref <309>: DATABASE ENTRY DATE: 2001-12-06
catcagctagctagctctcctcctcttctccttgtctcttctccttcgagtttgctcccctacaggagagaaaaggattcatcacatctcatctcacaacccctttcatcgatctctcctagattatctctctctccaatttgctccaatctttaatttcctgcctttgaagctatagctacagccatggaggatgtctgtctcatccatggcgtgtagctagctagtttctttctttgcacttcttgagttcttgttaattactaaaggattgcggccatggatggagatggtggagctcgtcgtggtgtaatcggatgagtgcgtgagagacatgagacgtgcatctagctgcaggatcgaggtcagcagcagcagcaggttgtcgttgtcgtcgtcgtcgccgccgccgccgccgccgccatggtgccagctaggagccgcctgttccaccatgacaacagcagcagcagcaagaggggcggcggcaactcgtcgtcgtcctgtactccccaatactgcatcgccacccagctcgacgccgccgccgccgccgcgccggcgcgtagacgtcaccaccaccaccaccagctagccatggcgccgcccgaagacgacgcggccgccggcacgagctctcgtggcggcggtgcaggagacgacgacgacggcgacaaggactggctccagctcggcctcgccgccgcggcgccgaccgccaccgctccggcggcggcggcggcgccgtcgtcgtctacgcccacggcgccggagctggacgtgttcgccgccaagcagtacaacgggaggccgccgctgttcccgctgccgatcttgaggagctaccaccaccaccaccaccaccagtacggccacggcggcggccggtgtccgccgccgtcgttcttcccgttcgcgcggccgttgaggagctccggcgatctccccggcgtgatgagggtcatcagcccgccgcgaagagcggcggctgctgatgctgccggcttgtggctgacacttcaggcatcccctgatcaatttcgagagcccattttgccccagataccaaagagctaccttagaatcaaggatagcaacatgaaggtggaagtggtgatgaagtacttggccggcaagctaggactcacacaatctcatcttcagagggcagcttcttcctcccttcttgctggtcaaaaatgtcagagacagcatctggtgctcatcactgcgaccaagctgcagggaagacgacgacggcgacggcgaggatgatcttgttgagctgcaccggcgatcgccggcggcggcggctactactgaccacgtcatggcactcgtttacagcacaagtagttcctgccattaattagctaataataatgtccatccatcgatctgtaattaatcaacgagttctttcattatttcgtccgacccccagctgatctgcatgctgctctggttaattaactggtggcttagtcgtcacaggattaaccaaccaaccaatggacacatttgtttttctttttgttcgatctaattccatgttgatttgtttgaaag

SEQ ID NO: 14107 - DNA, 1686 bp, Oryza sativa
  ref <308>: DATABASE ACCESSION NUMBER: AK111455
  ref <309>: DATABASE ENTRY DATE: 2001-12-06
acattcaaaacgaaaacgattacacgaattcatcaattcccagtttacgaaatcctcaagagatctcaatcgaggcagctgatcgagttctttctaccccatgtcgttgcgctcggcgagcaccatgtcgcgcagcacgatgtcgagcagctgcagcgcctgcgacgggatgccggcggggcagccggccatgaccatccgcaggtcctgcaggctgaccggcgcgacgtgccggatggccaccttgaacttcctgctgccggacagctccacctcgagctccctgctcctgaacgggagctcgccggcggtgtagaggttggcgcggccgtcgtagacggggaggcggccgccgaagtcggtgtgccgccgctccgtcaccagcttcgagatgatcgtgcggaacaagcccttcagcaccggatccggcgcgatcgccacctgcaaaacaaacggtgatgaggtgatcgacgaggagatgggaatggagatgctgtggactgtagtagtgtggatgcttacgtcgtagtggtggaagttgtcgttcttgaggccgacgaagaagtggttgaccttcacgaggcactcctctccggcggcgccgaacccaggccgcgccgggaactgcgacgacgcggcgccgggggtggtggtggtcagccccttgaactgcgcccggagcgcggcaatgtcgatctcgcgggcgtattgcgcggcgaggcgcggctccggagcttggggcagatcggggggcggctgctggtggtagctcgaaccaccgccgccgcgtcctcctcttcttcctccgccgccgcggccgccatcgtagtccctgccgccgcgtccacggccgtatccagcctcgccgtccccatgatagccgccaccgccaccgccaccgccacgggctcggccgtagctgctacgaccctcgtcatccccacgatagccgccgccgcctccaccgccaccgccaccgcctcggccgtagccacgctcaccgtccccgtgataaccgccaccgcctcgtccgtagccaccatcgccgtccccgcgataacctccacggcctccgcctccctccatgccccgctggtacccgcggccatcgccgccatcatcatagtacccacgcccttggcctcctcctcctccaccaccaccacctcctccgccatagtacggcggcccacctccaccaccaccaccgccatagcccccaccgcggccgccagggtacgatccgtcctgaccgcgcccacgaccacccgagtacggcgccccgtcccggccgcgcccgcggccgccgccgccgccgcgtccgtacccgccgggctgctgctgctgctgctggtggcgctggtgctggcctcctcctcggctcgccattccgatcgacggccgccgctgcgggagacgagaagaagaggaatcaaacccaacgcgaagaggagacgacgacgacgacgacgactacaggaagggctctgcttctggaagggtcccacgcgacgcggttcgtggacttcgtgtgggtcttatttatttatacaggaaaattttctgggatggaaacgggcgcgcgcgacgcgggtcgtggccttcgtggaaatttttctgggatggaagcgggcgcgctttcctaaagagcgaaaagaccttccaagttccaaataagtttctttc

SEQ ID NO: 14108 - DNA, 2527 bp, Oryza sativa
  ref <308>: DATABASE ACCESSION NUMBER: AK111456
  ref <309>: DATABASE ENTRY DATE: 2001-12-06
attcccgcgcagcgcgcaagccatgccgcgcgacggcgatggccatggccgccgccgtcctcctcctcctcctcctcccggccacccacccaacctgccccctcacgtcccctactcccgcgcgctgcagcagcgcctctacctcctcgcccagcaccgccgccgccgcatccccccgggcgacggcgacgcctccgccgcccgccgcgcgctcgaccagctccacgcgcaggtggtcctcaacggcttcccacgcaagcgcttcctcctcgccaagctcctctccctcgccgccgccgccgccgacctcccccgcgcagagtccctcttcctcgccgcccccgcggccgagtgctcctcctccacctcgtcgtcgacgcccaccctggccaacctcgttctccgcgccgccgcgtcgtcccgcgcgccgccggaccggctggtggcactcttctcgcgcctcgtttcccgccacgggttccgccccaacgccttctccttctccacgctcctcgctgccctcgcggacgcgggccgcggcgctcccacacggccgcgctctccacgcccgcgcgctagcgtgcgggctagtgctgtccagtgggcacgtgctgaccagcctccttgatctttatgcggcggctgggcaactgggggaggcccggagggtgttcgacgaaatgcctggcaggaccgtggcagcatggaattgcatgcttgcggcgtatgttcggtgctgtgagatggacgccgcattgtggttcttcaatgagatgcctgggagagactctgtggcgtggacaacgatgattgctggttgcgtgaatgccgggaaggcagcagaggcggttgagctgttctggaggatgaggaaggcaaatgcgaaggttgacgctgtgaccatggttgctttgcttacggcctgtgccgagcagggagacctgcggctcgggcggtgggtgcatgcccatgtcgagcaggaaggacgacagtggcggactgttttgctggacaatgcactcatcaatatgtatgtgaagtgtggggctgtggaggatgcgcaccgcttattcctggtgatgccaaggaggagtaccgtctcatggacgactatgatctcagggcttgcgatccatggccgcgccgaggaggcactagacttgtttcacagaatgcaggagcgtcctgatggtgctactctgcttgcagtgttgttggcatgcagcaatgcagggagggttgatgatggacgacaatactttcagagtatggaaagattttacgggatcactccagggatacagcactacggctgcatggttgacatgctctgccacgggaagcaattgcgtgaagcaattgagtttgtggagacaatgcatttgcagcctaatgatgctgtgttgggcgcactacttagcggatgcaagagggaaggcaatcttgagctcgcagcacaagtgattgaaaggttgattaggctgcagccagagcgagcagctgggcaccttgtcctgctggctaacatgtatgctggtgttggacaatgggagcaggctgggaaggtaagagaaagagtagctgccctgaatgctggaaaacctgcagggacaagcagggtgaatccgaaccaatccagcatgttggtacatagcatgctggcatgagcccaattgattctgcagtttcgttaacaagacttcggaggaatctatgagtaagcatgggagcttgaagagaaatggcaagcacaaaattatttggtgttctcgtgaatgccttgggaaaaaaaaaaaaggttgagctggggcaaaagtatagcatgcattcctgatcttctggtgaagccatgaaattatgcagtagtgttgcttcttttcagttcctcatatcactcaagaagcttgttacatgtaccgatgccaagcgcagcggcgagatgccatgcagcatggatatagggagtctctgggaagcaatcatcagcgatgaacagcgcgcctcctaacagagacgacatcttgtgcagtgtgaacaactgaaaccatcaaaggctgaaatggtaggagcaatgctgatgctgccattagtaatcgcgggttctcattccgaagtgctcttgataaacactgcacaaaacacaggcttgtcacaatggcatgatttgcatcagtcagataatgtaacaacaattatccatcaggtcacgaaaacttactacatccgtctcataatataagggattttgctcgtacaactacatgcatgggcaaaatgccttatatttgggatagaggtaatattgttttggcatgccttaagtcaaacatttgaaactttaaacatgcatatctctttatatatgtttagattggatcataaaaaatgtatgtagagattcattacggaaagcactttcataatattatgataattgtttgttgtaatagatatattgttatagaatatagtggttaacattgtatgttcaaaacaacatttttttgtgaacagagagtactagagt

SEQ ID NO: 14109 - DNA, 874 bp, Oryza sativa
  ref <308>: DATABASE ACCESSION NUMBER: AK111457
  ref <309>: DATABASE ENTRY DATE: 2001-12-06
gaaacaaaatcgaatattctgctatgatcctggcgggaagggaagggaagcgacttgcggcggagccctccccgcgtctcccccgccatcccaccaccgccgatggccgctaggcccgccaccgacggggagggcgtcgacgcctccgtaccctggtggcggcggaagcgcccgcggctgccgccgccgccgccggaggccgacgcggaggaggtgaaggcggaggcgctggcgctgatggcggcccaccccgtgctcccgcggctcgtcgtcttcgacctcgaccacaccctctggccgttccagtgtgatcgtctgccaaaagatgaacccccttatctttatccacaagctagaggtatactgaaagcacttaaggataggggaattgagatggccattgcttctcgagcatccaggaagaaaggtgttgcaaaagcatttctggaaaaacttggcattcacttcatgtttggggctcaggaaatattctacacttggagtccaaagaatgagcatttccagagtatccatcggaagacaggtgtacctttcaagtctatgcttttctttgatgatgaggccagaaatattatagcaacaaggaaattgggggtcagttgtgtgcttgtggatactggtataactctggagaagttaagaactggactaagcaactatgctaatagatcagcatcaccaaatgcagagccggcgggcgggcgaagtgctgagattacgtggtatttagatgtggctactggctagttaatactagtctgggaggacttatgtatgctcatgtattatatactcctttggagcacgtactttaatataattttaatataatttaagggacaattgcttattt

SEQ ID NO: 14110 - DNA, 1703 bp, Oryza sativa
  ref <308>: DATABASE ACCESSION NUMBER: AK111458
  ref <309>: DATABASE ENTRY DATE: 2001-12-06
gactcctcctcgccggctttgggaaaatgtcgctgctgctccgccgcctcgccggcgccgcagcgggccgccatctccgccgcgcgctctccacggccgcgtcacgccctccgtggcgcatgatcctaaccgaggcggagctggacaggtcaggggcgccgtcgcggagcgcgcgggcgtccttggacctcgtcgagcccccgcgctcctcccgcctctccgtccccgcccacttcgtcaaccccggccccctcccggacgccgaaggggacgccgtcggcttcgtcggctgggtcatcggcggcagcggcgacgggctcctcctcctcaagttctacgacacccgctaccacgcccccgtcgtcgccaacgtccgcctcgccgtggcgctccagctgtccaggacgacgagcgagggcgtcctcgacccggacgtcgcgcacttcgtctgcaacccgctcagcggccagatgtaccgcctcccgcccgccatcgagaccaccaagtacagcacggggcgcggcctcctcacccgatccgagtcccggcacgggccgcccgacaggtacgtggtcgcggagctcaccaggggggagtccgggagcagcgtgctgcgccggttcatgtcggagaccgaggagtgggacgatgtggcgacggtgcggtcctcctcgggctcggagagggcggcggcggccgagcgggtgatgcacctggaccaccaggtggtggccttcggcggccggctgtggtgggtggacgtgagctggggcgccctctccgtcgacccgttcagcgaccggccggaggagcgcttcgtcgagctgcccaagggcagcgtactgccggacctgaccggaattggggggagacggattcttggcttgtatcggcggatgggggtcagcgaggggaagctccggtacgtcgaggtgtccaatgcgaagaagccgttcgtggtcagcgcattctcgctcgacgatgagggcagcagctggacgctggagcacaggatggagatcaccccaagctggaagggtgagctcaaggtgcccgagaagccgcggatcggcgccatcgatccactgaacgccaacgttgtgtacctgatattcctccacgaggttcttgccgtggacatggccaagggcgaggtgattgggaggagttctcctgatgacgtcaactctagttcagttgtgccatgcatcctaccaccgtggctcgaatcatgtcagatcccctctgcagcaaccctttcgagcaagaagactgatgttgaaagaaatactctggcagacacactggttgtgtggatagaggcagttaaaactgaactgcatcagtcgattcatcttttggttccttgggactgactggaagagatgttcgagagaacttgtttagatggtagcagtttcctgaagtacctgaactctcgtttttgggggatgctgtgagaagtttgggttttgatgcgcatttggactttgctggtccaacttgttgaatttcgttttggacaaacaccggggaatgttaacatattttcgtatttttccttttcttccatacctgttgaatggttaagtagaatgagtatctccaagtagaagctgggcatggtactcctatgaacccaatgtttgttttcaggacacttatctctcataagcatttaaactatcttcgcttgtaagacg

SEQ ID NO: 14111 - DNA, 1361 bp, Oryza sativa
  ref <308>: DATABASE ACCESSION NUMBER: AK111459
  ref <309>: DATABASE ENTRY DATE: 2001-12-06
gtggccccgctccgcgcccgcctcgcggggcggcaggcgtgcggcgcgcgcgtcggcgttccacccggacgtgtcccgcgcggtggagtcgctgcaggcggagttccgggaggtggaccgcgcgctcgccctcaactccgcccgcgtctccgccgccttccacgccgcccacgtcgcgccgcaccatttcggtggctcgacggggtacggccacgacgacgggggcggcagggaggtgctcgactccgtcttcgcccagatcgtcggcgccgaggccgccattgtccgcccccagttcttctccgggacgcacgccattgcctgtgctctgtttgctcttctgaggcctggacacgagctcctggctgtcgctggtcctccctatgacaccttggaggaggtgattgggatcagggggtcggccaatgtgggatcgctcaaggattttggagtggcataccgagaagttccgcagatggtggccttgattgggatgctcttgcaaatgctgtcagacctgagaccggatgcgccttcatacaaagatcttgtggttattcgtggcgcaagagcctaagcatatcggatatccagcgagctatagatttgataaagatgcaaaatccaaactgcatggttatggttgacaattgctatggtgaatttgttgagacgtcagagcctccaatggtgggagcagatttgattgcgggtagtttgataaagaatccaggtgggacaattgcaccttgtggtggctatgtcgcagggaagaaagatttggttgcggcagcagcagctcgcctgtctgcacctggacttggggtagagtttgggtctacacctggacatgtgatgcgggcactgtttcaaggcttgtttcttgctccgcaaatggttggagaagctgtcaagggaggcatgcttattgcagaagtcatgtcaaccaagggctatagagttcagccacttccaagggttcctcgccatgatattgtgcaggcagtagagcttggcaacagggagagactcatagcattctgcgaaatagtccaacaaacttgcccagtaggatcatttattaaaccaactgctggggaaactcctggttatgcttcagaggtcatttttgctgatgggacattcatagatggaagcacaagtgagctatcatgtgatgggcccttaagagatccatacgctgtattctgtcagggaggaacacattggacacaatgggctcttgtcctcagcgacgttctgaagattatatagctgtctgttgccaaaagtgcataatactttcatcttctggaatgggttgccttttttttggtataattgattgctaggtatatgat

SEQ ID NO: 14112 - DNA, 1412 bp, Oryza sativa
  ref <308>: DATABASE ACCESSION NUMBER: AK111460
  ref <309>: DATABASE ENTRY DATE: 2001-12-06
agctacaaacatggaataaacacgctccagatcttcacatctccatccagggctccgctgcaaacgagggcagaagatccctccgacgagcacgatccatcgtcgtcgcgtccgccgcgcaccaatgccaggctcttcacggccgcgccatggctttccatgacggcgaggcaagtgtagccgttgttctccgcacctcccctcctccacaccctgaccgtcctgtccgccgagccgctgcacaccagctcgccggccgccgccaggcaaagtatcgctctcgcgtgccctctgagcgtgcccgtggcctccatgccgccgtcgccgccgccggcgctctcccagacgacaacggagcggtcgcacgcgccggagtagagcaccttgccgttggctccgagagcgagcgcgttcaccgccgacctgtggcgctccatcgtgccgaccagcgcgtgcttcctctgcccggggccgcgggtccacgccttgatcttcttgtcggccgagcccgtgtacacgcgcccgtcgggggagaccgcgagcgcgttgatggcgtcgtcgtgcgccgccgcgatggactccacgcaccggaagccgggcaggctccacaccttgatgctccggtcccacgacgcggagtagaggagcgcgccgtccggggacaccgcgagcgcggtgaccgcgtccacgtggtgcacccaggtgcacctcctgtgccgccggatctccacgtagctccacggcagcaggcacgtccggaggcggtccacggcggtcgggagcaccgcgcgcaggacgagctgcggccgtgtctcgccgtccctccgccggctaccggcacgccacgccctgatcttgccgtcctggtgggagctcaggaggagcccgccattgcccgtggcgaggagagacttgacggagctgtcggtgtcggcgaccgtcgtgctgctgctgctgctgctgcaaccgtcatcctgctgctgctcctcctgacttctccttgcgccgtccagtgcccacagcctgatgctcccgtccgacgaggcgatgtacagcgagtcaccgtcgacggcgagagcggagacgtacgccgacgccgacgagtggcctttgatcgtggcgatgaattggtggagcgaagggcttgtgttcaggtcatggacgtcaagggaaggaagggaacggaggctcggctgcgacgcgagcgacatggctcccgagagcatgctaccttctgcagcctcatgttggatttggcttccttcctgctcaccagaagaggatttcatggaacgggagaccctactagaccagaaaatcaaatcttctccagggaaacgatccaaacacaagctagagtttcatgcaatataataagaagcggctactcagatagcatgctaggatggatc

SEQ ID NO: 14113 - DNA, 1601 bp, Oryza sativa
  ref <308>: DATABASE ACCESSION NUMBER: AK111461
  ref <309>: DATABASE ENTRY DATE: 2001-12-06
tacaaaggtgtccaaagagaaccgtcttgcaactcttgacatttttgctggctgtggaggtttatcagaaggactgcagcaagctggtgtatcgtttacaaagtgggcgattgaatatgaggaaccagctggtgaagcatttaccaaaaatcatccagaagctgcggtgtttgtggataactgcaatgtgattttgaaggcaattatggacaaatgtggagatgctgatgattgcatttcaacttctgaggctgctgaacaagcagctaaattttctcaggacaatattatgaaccttcctgtccctggtgaagtagaattcataaatggtggtcctccatgtcagggcttttctgggatgaacagatttaaccaaagcccatggagtaaagttcaatgtgagatgattttagcattcctgtcttttgctgaatatttccgccccagattctttcttttagaaaatgttaggaactttgtttcattcaacaaaggacagacatttcgactgacagttgcatcccttctggagatgggataccaggtccggtttggaattttagaggcagggacttttggtgttgctcagtccaggaaaagagcattcatttgggctgctgcacctggagagactctgcctgattggccagaaccaatgcatgtgtttgctagccctgagctgaaaataaatttgcctgatggtaaactatgcagctgcaaaaagcactgctggtggtgctcctttccgtgcaataacagttatatacaataggcgatttaccaaaggtggagaatggcgccagtaaactcctacttgagtacggtggcgaacccatctcctggttccagaagaagattagagggaacacgatcgcgctgaatgatcacatatctaaggagatgaatgaactgaacctcatcagatgccaacgcattccaaagcggcctggttgtgattggcatgacctaccagatgagaaggtgaaactatcatctggccaactggtggacctgatcccttggtgcctgcctaacacagctaaaaggcacaaccagtggaaagggctttatggtaggctggattgggagggcaatttccctacttctgtgacagacccccagccaatgggcaaggttggcatgtgcttccaccctgaccaggataggatcatcacagtccgtgaatgtgcgcgatctcagggctttcctgacaactaccagttcgcgggcaacatccagagcaagcacaggcagattggcaatgcggtgcctccacctcttgccttcgccctcgggaggaaactgaaggaagctgttgatgcaaagcgtcagtaggtgctcagagtccttctccgatgatcgagggagatgattctcccctgaaaagaaacaaacaaccaaacatatgagtgtacttattttaattgtgcgctgcatttaactttgtgtgttgattaagattttagtcatatagatccttggtaaccttgtacattttagaggttgtgttgtgattgatacccttgattcaggggtatgatttagtggctgtattcagatatttaaacaaaataatactagttagtgatggttgaattgtt

SEQ ID NO: 14114 - DNA, 786 bp, Oryza sativa
  ref <308>: DATABASE ACCESSION NUMBER: AK111462
  ref <309>: DATABASE ENTRY DATE: 2001-12-06
atgtaagcctcttcttccttcctctctccttccctttccctttccacggcccgccgcagaacgcctccgccgcctccgaatctccgatggcacaccgcacacctagcgcgccctccggacaagcctgtactgcccctggcacccgctgtagatctttacccggccaccaatgcaagaacacacacatccaagattgcagaacgtcaaaaacagagtctattttctacttgaactcttttttctttcttttttggctgaaattgtttcaattactgctcaagtttgatttcgaactatcaatgatgtgcttacatatctatcgttgaagcagatgatggccccggcaatgatgtcttcagtgtttcttttctgaccatggaagggtgttgctgcctcgtctgcgacggcgatggcgacatgcatctagatggggctgtgagcagcacgatgggcagagcccggtcgggaggaggaggacggcgccggagacggcgagcgtgaggaagccgacgacttgggtggagttgggcgcgtgcgtttgcaccgccggagcgtcgatgacaagtccgccgccgcgggcgcttaccttacccatggcgttgcgtcggacgtgcgcgtgctgctgccgatgggaagaaaaaaaagagtctgacatatgggacccacgtgggtcccacgctgagtcaactgccacgtaggacaaaaccgggtgtaatactgctctaggagctattgtaaccggttttaattagttaagagacactggatatctggttttgcggtttg

SEQ ID NO: 14115 - DNA, 1420 bp, Oryza sativa
  ref <308>: DATABASE ACCESSION NUMBER: AK111463
  ref <309>: DATABASE ENTRY DATE: 2001-12-06
actctcctctagccgccggcgcctccgccgcggccgtggccgccgtcggtcacttccattggcgaccacccctcgcgcatggtttcttccgcctctaccgccgctctcctccccctcccccgaacactctgacgacgcccaaagcgccacccgactcacctcctccgctgcggcggcaggtggagcgagactacgacgtggacggcaccgacggcggtggtccggcgcgacgcgcgacgtgctcctcccacagcatgctcctcgatgagctcgcgtgcgcgggcgggggatgcgcacgaggcgttcgacgaaatgctcgcgtcggacaacttcatggtcatggtcaagctgcacgtacgggtggatgttgcagttcgacctcgcctcgcctcgcctgcaagctcatcctggagatcggggggggggggagcacgggttggaggccggcattgccatgaactcaatgctcatcacggggtttgccggctgtggcgcatgcagtgaaggtcgccgaggcatggggcatcctcagactgaatgctgaataagtgatgtacacttgcacgtccagtgttaaatgcatattgccgccatggccgtgacggatcgggctagttgtcctcccaatgttatcacctacaactctgttcagagcaggtttcaacagtagtagaaccagcggttggaagcacagtatgctcgcctacaatacatataccttaatggcctctgcaagaaaggtagtgcaaaggaagtacttgatcagttggatgttatgctaagtgaaaggattggatccctcggcttttacatcgagtgttcttccgaattgccttctccatgactgagggtttcatatgccttgtgcttgttagcgagggtctgcaactctgcatacaacactctgatgagcgggctgttagatatgggcaaatggctgttctgaagctcttgaccaagtacatgatcgacaaaagtatcgtccaatcgcaaagacattcaacatttttattcatagtctttggctctttgcattagggagaaagtcttccataaccaagagcctggtccatggtcaaggttttactaatgttgtggcatacattatcctcattgattggctttgctgccttagaaaacttaatgagttgaagtacctaatttcgtgcacgacagcgcaggatattgctccagaatccagatgaagtcactcagatacattattggttgatgagattatgcagagatggaaaatttgacaaggatacttatatttttatgaaatcacttaaagtggatttccaatggatcttctggcttgtttagagtggtgaataatatagagattcaccgtgtatttgaaggaaatggtgtactctctgattgccatatgttcgactttataatcaagtcattctat

SEQ ID NO: 14116 - DNA, 1196 bp, Oryza sativa
  ref <308>: DATABASE ACCESSION NUMBER: AK111464
  ref <309>: DATABASE ENTRY DATE: 2001-12-06
gtccatggctccatgcctgtgcagcaaggccattcaacagtgcggtgagttggatcggtgctccacggtgccagctcaataaaacgcagacgtggagggtgtcgcggcgcccctgcaaagcacctcgcccccacgcagagcgccgcacttcctcctctcggcgagtccgcgcgcgccgtcacgaggtgaagttccgcgcactgaggagcgcgtgtcctagacgcgcgcatgccctcgcggcggacggaaggtggaatcccggattcgccctccaaaatcgccctcccgccacaactatttggtcgacgcttgccctattccgtcgttgccacgctcgatttctccctcggattcgtaggtaggtctctctccggcctcaccatcgccaccctgaagtcccaatccatggcggcctctccatcgcctcccatgcttgctgcattcattgttcaagaatcaaacaaatccattgcaagctcaagaatttgtagcccaaaactacattcacgcaatcatcaagaaaataatctacaaaccaatccgaaccgtacgcaagaactccccgtcaactccggtcaatccttggttgacgaactcgagaaccaaggagaaaacaagaagcaagaaccccagaaacccaagaacacacccagcgaaaagttcgcccctccatgtggattcaagaaccaagaaccccaaaaagtagcacccggcgacggggcggcggcgagctcgctatcgcctcgggaggaggtgggggggagagggaggcggaggcatgtgtcccctcctgacgaccggagttgacgggagaccgcgtcgccaccccccgaagcccaccgccgcggacttcatgtctcccaccgccgcgccagccgctccccccggggatgcctccctccgcctcaccagccaccgccaccggggacacatcccaccgccgtgccagccactgccgcctgggacgcctccggctgccgtgccagccgccgccgcgaggggttggagagagcgaagcggtcgagggctaggcatccgcctgcgcgctgggttggagagaagggtaggtgagaaataaattttgctccgctacccgtgtccaaaagcatagggtcacgcccactgtgggcttcgtttccttcatcagtgtctccatccaactaagccacacatatattggtgcttgcactgtaggg

SEQ ID NO: 14117 - DNA, 1708 bp, Oryza sativa
  ref <308>: DATABASE ACCESSION NUMBER: AK111465
  ref <309>: DATABASE ENTRY DATE: 2001-12-06
aaacacaaggggggcatgggcctctatggcgagctgatgtatccgatcgaaagagcttggaaagagcagggggggattcgagcaaaatcaaaggtgccttgcagcttcggtggtggaagaagaaaccagttgttgatgctggtaggtctggtggtttcaagctagcagttacatggcgatgctgaggccggcggccatggatttgttcctgtcggcgacgtccatcgtctccaacgccaacgaatggttcgagttcctcggcacggccttctccgccgcgtcgttgctgctatcccggtggaggcgtcggcggcaaggggacgaggcggagaggaggcagctgcagtggaaagggcaggacgcgaagatgaagcagctccactactgcatgctccagctcccggatctgatccaccatgccgagtggctcagcttcgtcaaggacgacaaggaggtggccaagctcctccccgagctcaaggccagggtgcacgacgcctacgacctcctcgaggagttcaatcaccaccaccatcaccagcagcagctccaactggatctgggtcaggacgccgccgcggagaaggccggggacgatttcttgcagagcatcgccggtggcaacacggtgagggagatcctggatgatctcaactgcctgaggaacacgcttgagggtgtcattgaccgccatgctcgctccgagccgcatcagattggcaagctgctgaggccggccatgacctctttctatgacaaatccaagttccgcagccttgaggatgaggtgaatgagctgctcgagttactcggggtgaagatctgctcggcacggccacacaagcggcgaatcaaaggcgaaaccgcttcggctagcaagaggaccaagcggaacagcggtgtcccttctgcatccaccaggacatcatgcagcaatcaggaaattgcatctgacaatgtaactgtcttagcgatatctggcattggtggtgttgggaaaactactttggctcggcaagtttacaatgatgagagggtcaaggggtattttgatgtcaggatctggatttctgtctcggatgatttcaatgtcaagagattaactaaggagttcatagagttcgctcttgcgaattggatgcagtctgataatctgtgtaacctccagcagagtctcactgaaagcattgtcaagtttaggttcttgcttgttcttgatgatgtgtgggacgatgtatatgctaatcaagacaacagatggcagaatttccttgagccattgaagtctgcccaacaagggagtgcgattctgttgacgacaaggtctcaaagggttgcggatctagtgaatgaaaacaggcacttccgactggaaggtctgccgcctaccattttcgatgaattttttgaggcgtgtgcatttggctcagatcgctgcggtgttaatccagaactgaaccccattgggaaaaggataattccacagctgaagaggtgtcctttagctgctgaaactcttggacgtttactgaagcctatgctggatagagagcactggaatcagattgcaggaagtgagttgtgggagctgaaacaggagaaatatgacattttgccagtccttcgcttgagctatctgtatctaccttcctatctgagaaactgttttttgttttgctccatgtatcctaaaaaccatcagtttgac

SEQ ID NO: 14118 - DNA, 1409 bp, Oryza sativa
  ref <308>: DATABASE ACCESSION NUMBER: AK111466
  ref <309>: DATABASE ENTRY DATE: 2001-12-06
gtgcgacaacatggtggaggagatcctcgtccgcctaccggaggagcagcacctccgccgcgccagcgccgcctgccgccgctacggcgacatcatccgccgccccggcttcgccacccgccaccgggagctgcactcgccgctcctctccggcggcgtcgtcctccacggcgtgcggcgccgctgcccccgcgtggacggcaccgcagcccacgtccgcggatcctacgccttcttcctccccgccggcgccggcgacgcctccgcgtcttcctccttggagttggacctcgccggcctcttgcctagccccaccgacagggagctggcctacctgctcagcaccggcgccgccgatccggacgccgcccgcaggagcgtcttcatcgtgcactcgtcgtcgtcggccggcctgctgctgtgctgccgaggctatgtcaacccggtgcattactacgtctgcgacccggtggctcgccggtgcgtggccctcccggagctgccatggccgcccgccttcgacaagtccggcatgctctcggtggctgccggcggcggcggcggcttccaagtggtcctctttgaaaagaggggcttcgcgcatggtggagggcacctagacctcgaggttttctcctcggactccggcgagtgggcggcgatgcgcatccctcgcccgcaggacctcgccgggttccggtgcttcgcgccgccgcacctccggcacgacggcgccgcggcgtactggctcgggttcgagcccagggaccgggccgtggtgtacggcgccgcggaccactccatccgcctcatcccggtgccacgccgcgtccacgaccccagcgcgctcaaccggttcgtcggggagcggcgcggcggcgcgctcctccggtacgcgcacttcgacgcggcagagttcgaggtgtgggacacggacgacgccacgccgacgcggtgggcgctggtgcaccgggcggcgctcaaggacgtggtggcccgcagcccccgggcggtggccgccaaattcgtgcacggtcgcatcgtccggcacatccaccaccacgacgcgaactggaactggtgctcctccttcaagctcatcggcttcgacccggtccacgacgacgacgtcttcttgttcggggcgaccaatggtagtggatgcgtcgccgcctactccctcacgctcggcaagctgagcctccgctgcaagattgacactgccgacggctcgtcctccttgtgcggctgtgacatgttcccgtacgtacgcgcgtccaccacctcgccccgtgcggacataccaggcatggtgtataccaatgcctagagtggaatatatatcatgcatgtttgtacaccagcgtgtaggttcataaacttgacataatgaacttctctttaaactt

SEQ ID NO: 14119 - DNA, 1433 bp, Oryza sativa
  ref <308>: DATABASE ACCESSION NUMBER: AK111467
  ref <309>: DATABASE ENTRY DATE: 2001-12-06
cgacatcccagatggtggttacgagatcggccgcgtctacagcttccgagtggagaccacgcggtggcgcgccgaccaactccaccgctggtgcgccgcgctccagcgcggccgtgttcgtgaggtcaccctcgccaacctcaccatggaagggcaccccgagctcccccagggcatccgcgactgcgccacaagcctcaagggactccacgtcttcttcttcaccatggaagccgaccacatcgactccctcgtcaacctccgcgtcctcgggctgtatggctgccctggcatgatcctgcgagcactccgccccgaatcggaaatccgggtgctgacgatcgacttcagccgtctggtagacgtcctcgtccagaccacgcgcctccgctctctggagatgcacaacaacgtggtgcagggcacggtcgtcgtgcacgacgccatccaactccggaagctgcacctgttaccaccgacgagaccatccaagatcttcatcggtgaagcgcccagcctgcgaagcatcggctatctcgatctcttcaacaccgtcttcgtgatcaaaggcattgtgattcaggctgggatggtgctgcatcctccaaagatgcgttctgtcaggattctcggcttacgggtgaactacacagagatgggtcacagggtgccccgtgagatagagcagattctgaagtgtttcccatgcttagagaaactggagatcatgagatacgatgaggttgcaccagaagaagggctcctcaaagcggatgatgaacacatctatcaagggaacaatttcttccgtgaccttggttgtttcagccatcacctgaggtggatatatcttacagctttcagagggggcaagtatgaacttgctctgggcaaagccatcctcgacgaagctcgagccgggacaatgttcaaaatgctacacccacaaggcagctatacggactacatctctaaccagctatggcgggctctcgaacatttcagaatgaccactccaaatcatgctgtcagagatcgacatgtgtccgttattctacgtttgagaaaggccgggggtcttcctggatagcaacgcaagctgcgagctagccggtccgggttcgagcctcaccctctccttaattcaaaattaatctagtcattcctagattggtcttatttgttttgtgtccattattctaagttgagttacttgaagaaggctactccaggttgaagaaggctactccaggttgttgttctgcgctgctgtactactgtcagagaggttaggctgcgctcttttcttcaatttgtctagctggtcaaatgatgtatgctaagtgagcgaattgtgaatgatgctctctttgagtctgcataattgaacaattacaaatcttgatagcagtaaaagaagatacagtatcttg

SEQ ID NO: 14120 - DNA, 1605 bp, Oryza sativa
  ref <308>: DATABASE ACCESSION NUMBER: AK111468
  ref <309>: DATABASE ENTRY DATE: 2001-12-06
actatcgattatggcgcttctcctgctcctcgtatcatcatcttgcctcgtcgtggcagccagtatcgccgtgctgtgctacgtcaacaatgacgccgacgagcggcttccacctgggccgcgagtgaggctgccgctcattggcaacctcttcctccacgctccgaccatggcgttcctcccgtcggcgctccgccggctacggcgctcgcatggcccggtcgtcacgctctgggccggcaaccgcccggccgtcttcgtcattggccgtgatttcgcgcaccgcaccctggtcctcgcgggcgccgccctcgcgcaccgcccgccgtcgccattcgcctcctcccgcgcgctgagcttcaaccggcacggcgtgaacgccgcggagtacggcgatcgctggcgccgcctccgcagcaacatctgctcatgccttgctgccaccgaggcgctgcggcgtcggtcggtggacaggcttgtagcgacactggagttggaggcgcgcgccggagccggcgccaccggcgttgtcgcgccgaccgatgcgttccggcacggggtcttctccttcttcgccgtgctctgcttcggcgagtgggtgcgcgacggcgagcacgacgctgtgctccgtgatctccgacgtgcccacgccgacatactcgctctcaccgtcgagctcggcgcgttccacctcgtgcccgcggtgctgatggtgccgtacttgcaccggtggtggaagctctccggcctccagaggagtcaccgtgacattgtcgcggctctcatctccgttcgccggctccggcgggagaaagccgacggagatgttgctgactcagctaccttttgctacgtggacacgctcctggagctcgagctcggcgaggacgagatggtgagcctgtgctgggagttcatgaacgccgccgcgaagacgacgtcgacggcgctggagtggaccatggcgcgcctggtgcaccacagcgacatccagcggaagctccgccacgacatcgccaagaccaccaacagcggcggcgtgggcgtctcgccatcgccgtacttgaaggcggtggtgcaggaatcccttcgcctccacccgccggcgcactacctgctggcgcacacggtggaccgcgacgtcccgctcggcgccggtggctacgtgatccccaagggagccattgtcaactacgcggtagcggagatcggccgtgacgcaacggcgtggacggacccggacgagttcgtgccggagcggttcatggaaggcggggagggcgccatggtggacgccgtctcctgcggtggcgcggagatcaggatgatgccgttcggggcaggccggagggcgtgccccggcgcaagcttcgccgtctctgtcctgcacttgttcgtcggcaggttggtcgaacagttcgagtggtggccggtggccgaggacgagaaggccgccgccgtcgacttttcagagaagaccgggctcgtcactgttatgaagacaccgctgcgggctctccttgtcccgattacttcgtcttaggtagcacctgcactgcatgccgcaggcttactagcggacactgattttaaaactctttacag

SEQ ID NO: 14121 - DNA, 1056 bp, Oryza sativa
  ref <308>: DATABASE ACCESSION NUMBER: AK111469
  ref <309>: DATABASE ENTRY DATE: 2001-12-06
acttccacactgctctccccctccccttcctcccgctccggcgaaggcgagcgcgcggatcggcgtgatggcggcggcggcgccctctcccccacccgtcgcggcgctggagcagatgagcaggaccaaaatgttcggcggccacaacctccgcttccgccaccacagcgccacgctcggctgccccatgaccttctccgtcttcctcccgccgtcgccggcatccgacctccccgtgctgtactggctctccggcctcacgtgcaacgacgagaacttcgtcaccaaggccggcgcgcagcgcgccgccgccgcccacggcatcgccctcgtcgcccccgacacctccccacgtgggcttaatatagagggagaggcagacagttgggattttggtgttggtctctcaactctcaaaacggtcaacatttcatccctgcaatgacaaggataattaggtgtggcttcatgatcccaagatttcatcattccttcctcttgatcccaccattgtcctattctttgcaaccctacccttatgtctaagtgatcgattactctccatctccatcgctctctccaagtgtttcctggctcccccatgcgtgacagcgcaaaagttaatgcacttaatggtctggatctgggaggcaatgcttaggctgagctgtcatacagacacaaatcgatggcgaactcagtgttgcagccatggattggtttctttcttgcccccgatgtactcttgatggtgtattttatggttgtctctttctagaatttcttgatcgaactgtcactgcaacaatagctgtttttgtgggttgttggtatctatcccttttctcgttttcctgtagctttcctgatagatctgttttgtctgaattgaattgtttgggtaatagatctgtctaaatccaagtttctcagactttgcctcagatcataactggtatgccatatcaattctctcaaccaagcagtgtaatgtattcgactacaattctttagtaaacattagcaaattacattaattttatcttctgttgaacc

SEQ ID NO: 14122 - DNA, 1879 bp, Oryza sativa
  ref <308>: DATABASE ACCESSION NUMBER: AK111470
  ref <309>: DATABASE ENTRY DATE: 2001-12-06
atccatttggtcccgtgctcctggaaatgaagtgtcgtcgcctcctcgtcgccggctgccccgccacgaccaagaacgccacgccgccacccagtccttccatccccgcatgcctccatctcctccccggcgcgctcgcctcggcgtaaagttcgccgccaggcgccaccactcggctgacgcagtgctgccccgtcgagtcgcgttcgccgtcgcgaacaccatcctccgcggagcccggccgcccttcccgccggcttcccgtccttctcatcatcgaaccatcgccgccgacgtcgttccctcccgtcggtttttgattgtttgcgcctagttgcggttaccggatatttttcttcaagtggaattctcgaagatttgtgaagcttcgtgaagaccctgagcaaggcaagccacctttgaacatcttgagcctatatttgaacttaattatattgcttgaaaaatattatgcattgataggattgcacttaatctgcttgccccgtctgcgaggcagattggcaagtctacctaacttgttgcatttgatccttccattgtaattgttatatcatgttcccttgtaaccatctagttgcgcctcgatattcgtgcactctgtgcgagtatcgacggtcgccttcaaacttaaaatttgagtaacttcttgggtaaaacttggtttacaaaaggattggaaaacccgacgcctgagtcagtgccttgtgaaagaaaatgagttttaaaaataaaactcgcgacacaaggccattcctaggcggaatgcttgtgtggtagcatttaaggaccgattccttcggaattacatccgagcatacaatagtgcgaccacacgggtggaatgggacacccctggctgagtaaattgctaagcgggggagccttgatgccgagagacatgtggattcaacagggtggtgttggggagaacccccgggcttcctggcacagtatggtctgggatctaacctgttgttggtctgggacccctctcgtcggcatatggcaaccttgtgtcggccttcgaaatgccttgtcatgaaagccttaaggtctccagatgtggccgttctgcacgggctgagtgatccgggttagtaatgtcgtgtgggtaaagtgtaccccctctgcagaggttaacaaactgttcgaacagccgtgcccacggtcatgggcggatgtgaggtgattccttagcgtagtttttgttttacccagctttgtgaaaatgtgttaaggttcaggaaacctgatgcttggaaagcatttggctgtccgggtgacagcgggactgggagtccctagaagtgaatggtcgtttggggaccactattatcgggatgtttggaaaaaaaaattggtttggtttgggaaaccagccttggaaccaactctgggagttgtgtaaatcttgataaaattttggtcactagtcacctcccgaccgagctgagacttgtctcgctctggtcgcggagagcacacacttagattattaaaatgcttgcaaacaaaaccgattgcaaaataacagccttatctttgaagcttgcattaaccacctaagttcccatggcttgctgagtactcctgtactcacccttgctctatataaatatatagttctgccagctctgaagatgaagttgaagtgaagtaaagattaggatttcgtcctagttccctgttgttgcctatggtgttgggtgttagaccgttggttccgctgctgccgctgttgttggtgtttgcctcgtccgtgtcgtcggttgcattctcgggctgtctgagctgcaacctaagttaaggtaaataagtcctctatttattttaaggattgcaatgattcatattt

SEQ ID NO: 14123 - DNA, 1881 bp, Oryza sativa
  ref <308>: DATABASE ACCESSION NUMBER: AK111471
  ref <309>: DATABASE ENTRY DATE: 2001-12-06
aaaggaaaccaaactgacgccaaagcatcacccgaacacagaaagaggccatggcgaagaagccatgtgaatttccaacggccgttctctccttccgtcgcttcctccagagacgcttcttgggagggcggcaccaccaccgcccaacgtcgaccacggcaactggtgcagctataccaccggcagataagctacacaaccaaactgtaatgattgatctggagtcatggctactgaggtcgcccatgtcgaccttcccttacttcatgatcgtcgccatcgaggccggtagtttcctccgcggcctcatcctgctgctgatataccctctcttatggctccttctcagccatgacatgcttctcaaggccatggtcatggtgtccttctttgggttgcccgagaaggaggtggtcaggattggtaaggcagttctaccaaagttcttcctggaagggatggccatggaggggctggaggtggtgaggaacgcgaagaaagtggtcgtgtttagtccgttgtttccgagggtgatggtcgagggtttcttgaaagagtacataggcgtgaacgctgtcatcggaagggaggtcatagcggttgccgggcgttacgtcgggctcctcgtcgaccacattgacatggacgatggaggttttgttgacgaggtgatggaagagacgaagcgcggcaagggcgacggagctgttgggcttgctggagtgggcagcaagatgcatcatctgttttctcgttattgcaaggaaacctatgttgtatgtgacgccgacaagaaggaatggcagccggtgccaagagagaagtaccctaaacctttgatcttccacgatggccggctcgccttcaagctgacgccctgtgccgcggtggcgatgtacacctacctaccttggggtatcttcctcgccgtcttccgcagcctggcatttggcctcctcccctaccgtgtgtccgtccctctcgccgcgttcactggcatgcgctcccgtctgatcgccggcccgtcgcctgatgccacccgccggaacagcgggacggccgggggtcgcctctacgtctgcaaccaccgcacgctcctggaccctattaccgtcgcggccgtgctgaacaagcccatcactgcggtgacgtacagtgtaagcccggtatcggagttgattgcgccaatccgcacggcgcgcctgacgcgcgaccgggacgaggaccggcggcgcatggaggcgctgctggcgcgcggcgacctcgtggtgtgccccgagggcaccacgtgccgtgagccgtacctccttcggtttagcccactcttcgctgagctcaccggcgaggtgacccccgttgcgctggagacacggattgacatgttctacggcacgtcgacgaagcctgccgccaagtggctggacccattctacttcatgctgaattcgagaccggagtaccacgtcgagttcctgcagcccgtcagcaccgctccagtagacggtgaggcaggcggtcacggccacagtatcaacgccgcaaacagggtacagcgcgtgctcggcgaggcgcttgcattcgagctgacagagcagacgcgaaaggacaagtacgagatgctggccgggaataaagggaacgtgaaaggtgaagccaagatgtaggtgcgacctgatatcttgagagattgtattgaattaatgttctgtatgggattctttattgcgttcatttttttaaactcgtttcagacatgttgttttattttagtaagtttatgccatgcattacttattcttgttctaatgttttattgtgtgcgaaagttcttgtaaacaaacatattaattaaaataagattgttctgccttcttttctatt

SEQ ID NO: 14124 - DNA, 1745 bp, Oryza sativa
  ref <308>: DATABASE ACCESSION NUMBER: AK111472
  ref <309>: DATABASE ENTRY DATE: 2001-12-06
agatccttctctcccgatccccttcctctccggcgatgagcaagcggaacgacggcaaaggcggtccagcgagctggtggcgcgtgcggtgacgaccatcgagcggctcctgcttcgccagccggggggcacacccgagggcggcgccaagccgtgccatgacattagcggtccgcgggcgtgcaaacggcgccgagcggcccggacctcgtcgccgggggaggggaggggggcacgccaagctgtcggtggaggggtgctccaggatagcgcgcgcatggcgaatgcgacgtgactggcatgcagccatgccatggagcaaagaacagcgccgcatacgcacatctgcctcatactctcatcatcttctccatgtggcgcggacgtagcgtcgtagcgagaggagtggtacaccgtcggcagctgcggcatcgtgtactacttcttgcacgcgagcacgcttctggtggccacgcgtcgacggcgaacatccacgagttccgcgaggtgatctggaagaacaccaaccacgccggattccttggggtgaccgagcgcgagcaccagaacgcgccgcggcatcatggattcatggtcttccggtatatatgtgtcatgtggtcccagatctggttgatgcgcaccccgtgggcgtggcggatcgaccaaatcaacttctcccccgcgtcagaactgcagcgtccacatgctgatcatgatcatcgatggcgcgccggcggcgtcgtcgtggatctgcacgaacgtcagctcaccgtcgctcacgttcacgcaccggtacttggcttggggggttcgcatcgctggagtacgcggtagcttgcatccctcagggagcggcacgaagcgcatgtcaggctggagctcggccaccaaacggatccggtgtttgccatccgctgcagtcctggggatcatgccgacgttcccggcgcagaggagccggtagtcgtcggagcagggcgggtagaggaaggccgtgcggagccaagcgtcgcagaggatgtagccgccatcgttggcgcagctcggtgcagggtcgaagccgagcgcgacgccgccggggccgaaatcgtgggcgctgcggagcaggagtcggccggcggagacgcggagtcgacggagacgacaaggggtgatcgtcgcggtcgaggcagaagtcctgaggcgcgggggagacagagatctaaaggagggaggcgcccgccgcccggcggatcgcgccactcgaaggcgggcgaggtggtcgccggcctagaagttgaagtcgtcgtcggaagaggacacgctcgggacgcatgccaggatcacccacgtggtcgccggcggcggcggcggcaaggacgaggagagaaacgtacccacagggtcctcgcggtcaccgatcgtacatagaggatcaaacgagttggcatcgccttgcttgaaattgatctccggaacagcgagggtggccatgctcgttcaccgccggcaacgcgtgtgcatattagtccatggcggcggcggcggcggcggcggtggagcgggtggcgaactggcgacgtgcagtgcgggcgaggcgaattggaaatggtgcgctgcgctcccatctcaatttgccggcttatgtagagggagaaaaggaggagctactagtcgtgtactcgtgtcttgtgcttgtcttgcaggacaagctggttaattagttagttaggcttatccaattctaatctctcagtttgtgc

SEQ ID NO: 14125 - DNA, 1613 bp, Oryza sativa
  ref <308>: DATABASE ACCESSION NUMBER: AK111473
  ref <309>: DATABASE ENTRY DATE: 2001-12-06
aaactacatatctactccattaattagcttattaccgtcaatcttgaataatttgagagcaacatttagctgccccaatggccggcgaagtggtggcaatacatgtcgacgtcggccatggcgtcccagatgaagcacaagcaagtaccaagatacagaaactggatggcagccacatcacccccattgcgcagggcaagatccacaggttccctcgaggcctgattgggatcggcggctcaaacgagcagcggtacatcgtgccgaccttcgtggccattggcccctaccaccatggcaagcctcacctgcacaagatggaggaggtcaagctcgcggcgatgaaccgcttcatcgcaaccgcgaacggcgcctctgccggtgatgtctccggcaagctcctctccgtcgtcggcgacgtgcgcggctgctacgccgacgacgagaagttgaagtgcttcagcgacgatgacttcgcggccatgatgctcgtcgacggctgcttcctcctgcagttcatgatggagaaaaggaagccgctgttcgagggccgcgcgctgtcgtcggagtacagcatcctcaaggacatgatgctgctcgagaaccaggtcccatggctggtgctcgacaccctcatggagttcctgcccatggagatggaggtggagcaaaatgtccgctgttttgtggccgacgtgggagacatgttcctccgcaataataaggaacacgaagtctcgttgacaacctcctgtttcagcgtattgttcgaggtcagtccacataaaagcagcttcctcaaggactacaagccggcgaacctcctcgacctcctccggtccagccaaatatttcgcatgccaacggaagagctctcggtacggctggtcggctcgtcgctgctgtccagcagcgccgtcgagctggcccagatcggcgtcaacctgacggcaagcacggcggagtggttcggggatatgagcgtcaaggagggccctgtctacggcgagctttccctgtcgccgatctttctcaacgacgtgagcgccggctggctcgtgaacatggcggccctggaggcgagcggcggcgccaccaccgcggatcagtcgtcctcgtcctcgtccgtgatgtgctcgttcctgtcggtggtggcgatgctgatggacagggaagaagacgtgcatcagctgcgggcgaagcaggtgctgtacagcacgctgagcaacgcgcagacgctggacttcttcaagcggatcagccagcacctcggcttcggccaccgctacttctacatcttgcaacagatcaacaagttcaagcaaggcaggccggtgaggtccgccgtccacaagttcctgtacaagcacataagggccatcagcatcatcttgtccatcgccagcgtgctcgttggcatcttcaaagcactcagggagctatagtaattaagctttcttagttaagcgttgttactttctccaacaaacaaaaaatatataatttgatttaatcgtttggacacttatacaaagccgtttttgagtaaattgtccacgaatattcttttagtactactatttatgttaataaatctttaattggttttgctt

SEQ ID NO: 14126 - DNA, 1257 bp, Oryza sativa
  ref <308>: DATABASE ACCESSION NUMBER: AK111474
  ref <309>: DATABASE ENTRY DATE: 2001-12-06
aaacggcgagcaagaaccagtgaaccaccaataatggcagctgacgagcagtaatggcaggtcccggcgttggtgcaggagctattagccaccgtgcaggagccacccggccggttcgtgcagccggagcagcaccgccccgacgccgctcctcccgcatcgtttcccattgtcgaccttggccgactgtcctcgccatcgccagatgatgacggcggcggcgacgaagccgccaagctccggcgagcgctcgattcttggggactcctccaggttactaaccatgggatcgaagcttctctgatggacgaactgatgagcgcgtcaaaagagttcttcagacaaccactccagatgaagcgagaattcagcaatctgaatgacggcgagcaattccgggccgaagggtacgggaatgataaggtgaggagcaaggaccagatcctggactggtctgattggatctacctcaaagtggagcctgaagacgagaggaatctcgcactctggccaaaacatcccagttctttcagggatgccctgcatgagttcgtggtgagatgcaggagggtgaaacgcgacgtccttagagcgatggcgaggatcgcggggctggacgacgacgatcagcacttcgtcgatcagctcggcggcagggcgaccgtgcatgcccgattcaactactacccgccgtgcccaaggcccgatctcgtgatgggcataaagcctcactccgacggcacggtcatcaccgttctcctggttgcccgcggcgccgacgggcttcaggttctcaggtatggggtctggtacagcgtgccatcatcgagcactcacgccttgctgatcaatgtaggggaatccacggaggtaatgagcaatgggatgttcagaagcccggtgcatagggttgtgaacagtgcagagaaagagaggatctcgctggccatgagaagcggctgacactgtacaagaaaatgaaagcaagggacttcttggttgggctctctgaacatttttctcgaggcacaagatttgttgacacgctcaagatcagtccttagtttcttaggctattggcaatccactcgtgctgtattgcaattgcagaggtaacagaaagtatttttagcacctaggtgtgtgtgtatatatatatatatgcacctagtgcatgcaagtcaacatgtgatttaaatagttaaataaaaatgtaaaaaaattggtaacataaatggtgatgatataaatttgtat

SEQ ID NO: 14127 - DNA, 1461 bp, Oryza sativa
  ref <308>: DATABASE ACCESSION NUMBER: AK111475
  ref <309>: DATABASE ENTRY DATE: 2001-12-06
tctggagaggcgtcctcagcgacggaccgggcccaagtcccctggaaaggggcgcctgggagggtgagagccccgtccggcccggaccctgtcgccccacgaggcgccgtcaacgagtcgggttgtttgggaatgcagcccaaatcgggcggtaaactccgtccaaggctaaatacaggcgagagaccgatagcgaacaagtaccgcgagggaaagatgaaaaggactgcagacaacgacgccggcagctcgcgtgagcggatccgtgacgacggtggtgctcgctgctggcggcccgcagatcgaaccgccgtggaggcgctcatcggaggaggaggcgtcggagcagagcttgcagatgatgacgacgccaggtcgtgagcggatcctcgatggtggcggcggcggcggcactcacgtgagcggatccacggaggcgctcgcggacggcgtcggcagagctcgcgctcgcggatccacggcggccctcgcgaacggcgtcggcggcactcacgggcggtttcggcgacagatctccggcggtggaggtggggcctgcgcgcgaactccagtggcagatctccggtggcggtagggcttgcagcacaactccacacgggttctcggtactcccccttcccgggccttaatcttctttgttccattcccttggcggcaatcaacagagctggagaaagaactaattttttaatccttgagaccggtccttagccataaggacggctcatccaaaaacctcctataaggatcatctccacgatgtataacgaccgctcaagaggcttaaggccccccttatttttacattgtgcatgccctcatgggtgatggaacacgtcggcgtcctaggataatacatagtactgccgatatgattttctttaaagaagactatacggaaggtaatgtaatcacgatgtcagcatcatatcgtagataccggatatgatacatttaaaatcaaagaagtatttcgtagatattatgcacatcatgataccttcatgatgatgtcgacatagtcctatagatacataggtatccagatctagtatctaaagtatcatgctgacatcagcatgatactgtatatgtcagatccgtatcggatatgatatcttgtaggtatcggatctgatatttacgcaccatgctaacatattacgacgtcagctattccgtagaatggtgttaccgatttgtagtatttttgtttttttccctacttgtacttcctctatcccaaaataaaccaacctcataccggatgtgacatatcctagtgcgatgaatcgagccaccattgtgtccagattcattataagaggatgtgttaaatcccgtacgagtttggtttattttaggacagagggagtaggtggtagccttttcccttttttgtttttgctaaattttgctatagaacaacatggctttgtg

SEQ ID NO: 14128 - DNA, 689 bp, Oryza sativa
  ref <308>: DATABASE ACCESSION NUMBER: AK111476
  ref <309>: DATABASE ENTRY DATE: 2001-12-06
gcaggcttgcagctctcaacctcctcgtcgacgccggggaagggaagcctgcgttcgggcgagcgatggagcagggaagcgagaggcaggacgagcggccgccgctcccgtgcgcgaacggctgcggcttcttcggctctgccgacacccgtggcctctgctccaagtgctaccgccagaccgtgatgtcccaggcctccgcgccgtcggccgcagcacagtccgcggagcacgaccaggtggtgttgccggcgccggagggcgtacccgtggacgagggggcgatgccgccgccgccgccgcggcacggggcgaagacgaagagcaggtgcgctgcgtgcgggaggagcgtggggctgatggggttcgagtgccgctgcggtgccgtgttctgcggcgcgcatcgctactcggacaggcacgactgcggctacgattacaggggcgccgggcgcgacgccatcgcccgcgccaaccccgtcgtgagacccgacaaggtggagaagctctgaaaaaaaaggataagctacaactgctcgatcttgccaacattgccatgcccgaaccaaacgattggtcgattgctgatttgcttcgcgtgcgagatggagtcggtactcggtactgatctatgtatggagatatgatatatgtagagattggaaattgatgattctgtgtggctaaag

SEQ ID NO: 14129 - DNA, 1075 bp, Oryza sativa
  ref <308>: DATABASE ACCESSION NUMBER: AK111477
  ref <309>: DATABASE ENTRY DATE: 2001-12-06
gtgtttgtagccgtaattactatttggttgatcttaccgtttggtcgtttattccgatcgctaacccaccaacagtacgtgagttacacacatctggacttctgaagtactactaaaatggaagtacaaaatcagttcatctgatccccagcgtccccttctccagatcaaacagcagcagattgttctccatctggaaacctccgatgacaatcgccggcgagtcggccgccgccggcgaggtccccatcatctcgaggaacgcgaagcacaccgtctgttcgtccacctgcaccagcgagctgccgccggggagcgtccagtcccggccgccgcccagcaccaggtcgatgttcgccacggcgaagccgagccgcgtcgtgccgagcgcggacgcccggtagcacgtctcgaacggcctcaccgccgccgcgcgtgggatacccgacgtggccgcgtcgaacgccccgagcagcgcgcggtagacgtcgggccggagcgtggtgtacggcgcgacggtgctcagcgtgacgccgcccgtgccacggcggacgtcgaggtcgagcgcgcggggcggggtgggcaccgcctcgaggttgacggcgatgccggtgacgcggaggtagtaggcgccattcttggggttcttgaggaggggcacggggttgcggcggagaccttcggcgatctccatgggcggcgccgctaggagctggaacggcccgccgccgaagatggccgcgccgtcgccgccgccgccgctggccggaaggcacagcgcgaactgcctctccaccttcagcgacgacgccacctgggacggcagcgacagcggcagcctcgacatccccgcgacgccggcgacacccgacgggagcgacgccaggagcccgctgggcgcgcacgacgcgaacgccgagaacgacaccgggaacagcgggttcttgccgtccgtggcgttcgcggcgagcggcacggcggcgacgtccccgcgtccgcactgcccactcaccgggttgtacgggtacgcggcgcaggcgcaccccctgtcgccggagcccggccggccgccgtc

SEQ ID NO: 14130 - DNA, 638 bp, Oryza sativa
  ref <308>: DATABASE ACCESSION NUMBER: AK111478
  ref <309>: DATABASE ENTRY DATE: 2001-12-06
agcagaggctgggctctctcccacgacgaaacgagcggcccacgaaaatttcgccgcgccgcggccgcatcggagccctagcccagccgccggagtccggcgccagcggcggcgaggcggcgaagtgcgggggagggagatgtcggtgcggatcaaggcggtggtggacaggttcgtgaaggagctgcaggaggcgctggacgcggacatccaggatcgcgtcatgaaggagcgggagatgcagagctacatccaggagcgggagcgcgaggtcgccgagcgggaggccgcctggaaggccgagctctcccgccgcgaggctgagattgcgcggcaagaggcaaggctgaagatggaaaaggagaacttagagaaggaaaagagcgtgctcatgggcactgcttcgaatcaggacaaccaagacggtgccctcgagatcactgttagcggtgaaaagtacaggtgccttcgtttctctaaggcaaagaaatgagatatgaacttaggcatcgagaagtagttgtgtaagacagattcatggtaatggtaaaaccttattttgtttcaaattggattcttttgtacagggaattctgaaacgtgcgtaaactcagtaaaatatccatagtagtttggct

SEQ ID NO: 14131 - DNA, 2075 bp, Oryza sativa
  ref <308>: DATABASE ACCESSION NUMBER: AK111479
  ref <309>: DATABASE ENTRY DATE: 2001-12-06
gagaagaagaggagggaggaagaagagcagaggagagaagaggaagaagaagagcggaggagagaggaagaggaggaggagcaagaggatggaagaccacatccatcgtctttgacttgctccagctgcgtatatctggcgtaccagtcgacaaagacagctttcactccacaacatacattctccccctggctcgcaagcaccatcatgcgatcctcttggctctcaaccgcctcggccgtgctcgtgtgcgctgctgcgctcgccaacgcggccaagctccccgcccccgtcgagcagatccactacgaccagtcgggcaacctcgtctggaacgaagattccgacgctgctcctgccgtcccttcgctcggccgtcccgacttttcgggcctcagcctcagcgacatcgctgctgccgctgctcccgctaagcaagccgcccatgacgtctacgccgactcgatgaagtacgccgacgacgttctctcctgggctgagcacgagatcgagcgcatcgaggacaaggtccaggaggtcgtcgccggcactcacaaggagatcaaggactggatccacgccggcaaggttcttgtggatggcctcgagttcgagcgcctcacccaccctgccttccccgagtactcgctccgcctcaacgccaagtccgagtccttctgcgaccaggacgtcgtccagcacagcggctacctcgacatctcggattccaagcatctctggttcatcttcttcgagtcgcgcagcaagcccaagtccgaccccgtcgtcctctggctcaacggcggtcccggctgctcctcctccaccggtcttctcttcgagctcggcccctgccgcgtcaccgacgagggccgcgccgtcaagaacaacccgcactcgtggaacaacaacgcaaacctcctcttcctcgaccagcccgtcgacgtcggttactcctactcggacaacgactcggtcaacaactcacccgccgctgccgaggacgtctacgccttcctccagctcttcttcaccaagttccccgagtactccaagctccccttcaccgcctcgggcgagtcgtacgcaggcacctacctgcccaacatcgcctccaccatctacaagaagaacaacaacctcgccctctcccgctacgccaaccccgagctcgctcccaagcacatcaacctcgacaccgtcatgatcggcaacggtctcagctcgccccagtaccagttcccctccgttcccacctacgcctgcggcgccgagaacaagtatgcgctctttgacccttccagctccacctgcgccacgctcgagcagcaggccaccacgtgcaagtcgctcatcgagtcgtgccagaagtacaactcgcgcctcacctgcacgcccgccgcgctctactgctggagccgcctctacggccccgcacaggagaccggcaggaacctgtacgacgtgcgcaagaagtgcgaccgcgagaaggacggcccgctctgctacaaggacatggagtacatcgagacgctcctcaacacgcccagcatcaagaagaacctcggcgtgcccgagtcggtgaccttccagtcgtgcaacatgaacattaaccaggccttcctcctccagggcgactcgatgcacgactcggccgccctcctgcccgagctcatcgaggacggcatccgcgtcctcatctacgccggcgaggccgacttcatgtgcaactacatgggcaacctcgagtggatgcagaacctccagaccagctacctcgacgactttaacaacggcactgcccaggactggatcgtcaacggcaagaaggccggctccgtacgcaagggcggcaagggcgccggttccgtcgcctttgtcagggtcgcagaggccggtcacatggtcccctacgaccagcccgagaacgcgttggacatgatcaacaagtggctcgccaacaagcctcttgcttgatcacctcctcgtctttggcggagcgatccgcggtccaaagctgtagattcgcacttgcatagctgggagatgaatgacaacgccaatatttgaatgag

SEQ ID NO: 14132 - DNA, 1161 bp, Oryza sativa
  ref <308>: DATABASE ACCESSION NUMBER: AK111480
  ref <309>: DATABASE ENTRY DATE: 2001-12-06
tatgcctgagcggggcgaagccagaggaaactctggtggaggctcgaagcgatactgacgtgcaaatcgttcgtctgacttgggtataggggcgaaagactaatcgggctgccactccagtcccttcgcttccgaggcttgacggcggcggcggaggaggatgcgcttcacggcgtctccggtggtggagctgccggtgggcggcgcggtgctgacgttcgagcaggacaacgactccttcgaggtgggcacctccgtgtggccttcctccctcgtcctcgtcaagttcgccgagcgctgcctccgcgacccggcgctccccttcgccgacgtcctccgcttcccgggcacccgcgccgtcgagctcggctcgggctgcggccccgccggcctcggcctctcccgcctcggcctcgccgacctcgtcctcacggacatcgccgcggtgctccccgcgctccgccgcaacctccgccgcaaccgccgccacctcccgcgcgccccacgcctcgcccagctccactggaactgccccgcgcacctcgcctccctcgcctccccgcgccgcttcgacctcgtcgtcgccgccgacgtcgtctacgtcccggaatccgtgccccacctcgtcgctgccatggacgtgctcgccgacgccgaccgcggggtggtgctgctcgggtaccaggtccggtcgccggaggcgcatcaggccttctgggacgccgtgccggcggccttcccggtgatcgagaagattccacgggagcatctggacccggattacgcctacgaggaatccgatgtgttcgttcttcgcaggaggccgcgacagtgaactggtgagcaatttgcttaccatttgctcctcaatgactctgcagtcagtggattagtgttagccgatatcgcgacggattcgaccgcgttgatgagtggatctctgccatgagttatggttgacgatacattttgttgctatttttgctactagaactctactagaagagcatattaagtggtattgatggatgttcatgattgattttcttcgtgctgttctgtgattgacaaaacaaaaattaacttgtagatttatcctcgctgaggatatccatgctcaacctttatctgtcagtttttattcgttttatggttgctacc

SEQ ID NO: 14133 - DNA, 1161 bp, Oryza sativa
  ref <308>: DATABASE ACCESSION NUMBER: AK111481
  ref <309>: DATABASE ENTRY DATE: 2001-12-06
gagaccaacccccaactcgacgatgaccatggaggcggagcgcgacggcgaggagcagcgccgccccctcctctcctcctcctctccgccgccaccgtcgccaggtaggcgtactgccaccgccttcgccgtccgccctcgttctctccccgatcccccatttcaggctccgtctcgtgatcgtctcaccctgcctgcctcgtttcgtcgaattccgttccctgcagcggcggaacatcagcatcagcaccagcagcagtaccagtacctgggccgcagcagctcgtcggcgctgcgcggcggcggtggcggaggaggaggaggagcgggctggggcgtggggccggaggccagcgccgcggaggtcaggtccgccgcgtcgatctcctccgccagctactacccaccgccgccggctctccaccacgacgtctacccgccggacatccactccccgtccccatcgccagctgcccctactgctccgcaccctcacggaggattagcaattgttcctcaagggccgtacccgtatggcggcgaataccagccttctcatgatggcagaaggtgagcacttccaatcgaaatcgggtatttgctgattagctgttatgatcctgctgccgcaagatcatataactaaaatgggtagtatgaagtgtgaacgtggtaagaaattggggaccgaagacgaacataagagagaggcgctgtgtccattaaaacgcgtgagatatccaccctacttgaatcccagttgctcctatatgtccccttctgaacttgtttgcgcctccttttcccatgccaggtacttgtaaaggttcttaagagtagccagctagttggcaagcagtagccagattatctctcatatttagcaagcggaatgtgcaatattttgatttggtgttgcagtggccagttggataatattgcgaaacgatatgtctgcacaaatggcacagtcaggccagaaagattttgacaatttgctagctaatgtagtgccaattacacatactcagattgtaagtagggccaattcagtcatctttctgattgtagcctgatgcatgccacctccttttaccagttattgttgaataggtagtattcacatgatggtcaaatagtgcagtgatctttctagcctcc

SEQ ID NO: 14134 - DNA, 1181 bp, Oryza sativa
  ref <308>: DATABASE ACCESSION NUMBER: AK111482
  ref <309>: DATABASE ENTRY DATE: 2001-12-06
acgctgcgccgcccgctggaactaacccacggcgccgccatcccccacgcacagcaagaaatcgctaatctccgcccccacgccactgctccgcctgccgcgccgcccgccccacgccccacgctgcaccgcccgccggacctgatcccgcctcacctcaccggcgccgccctcccccacgccaccatcgccgccctgccccttcccatgccgcgccgcccgccggacctgagcccgcctcacctcaccggcgccgccctcccccacgccaccatctccacggccctccccacgccaccgccatcctccctcgccgccgccgccaccgggggcggttcccaactccgcctcccccaccacgcctcccacatcgcgtcacccctaccgccccgcatctaccggccgacggttcctccgcgtcgccgccggctcctcccgcggcaccccacccccatcccggcgcttctgtccgtggagatcggcggggtagccggctcgcaaggtggagcatcgatgtgacgtgatgcagcatttggggagtctttggtagaggtggagcggtggagattccgacgccgccgaagccccacccagtgcacatcggcgtcgcgactcccgccgacgccccgccatcttccgaccggcgccgccgcccgcatcactgccgacgcctcgccatcgcgcggccgccacgccaaccgcgacgcccgcctcgccgatctcctccgcggtcgctgccgccatctccaccggccaccgctgtcctcggtacgcactgctaagtcctaacccacccatgcctctgccttgccgccgacaccaataacccctgcgtccgcagtgcttcacgttgactggtcatggaaccagtgcagcccactccactggctggagctgcttccctcaggctgccggaggtagctcgctgtgccaggttatcagtcatctcaagcaatgtgctcattaggctattgtttgattcacgtacagaatctgttgcagtagtttagacgatcttgcactatacattcctgtatttacaaaatctgttgcagtgtttgattatacattcggcatcatattttgcattatattgttattttcaactcctgtatttacagagtgttgacatgttatttgtatttagatcccagccaatgtgaattctagagctctgttct

SEQ ID NO: 14135 - DNA, 725 bp, Oryza sativa
  ref <308>: DATABASE ACCESSION NUMBER: AK111483
  ref <309>: DATABASE ENTRY DATE: 2001-12-06
atcggtcgaccaaattccataatagttcttgttgcaataaaaaccaggactaaaaaacatctttagtcccgattcaaaaggttagagctactttttaatctttaatcctagttcaaaaaaggtaggcggtgtcagacccctcctttacctttaatcccggttggactaaagagctatttctagttccggttgttaaacaaccaggaaaaaaaagatccgcatgcgcggagaggatgaggcgtgcgcgcaacatcgaggaggaggaggaggcgcacgggataagttaataagttctatctcctcctccctcacctttatctcctctcctcactcaccccatctcttcctcttcctcctctggatccgcccccctcccctctcctccccacttctcaggaagcggaggcggcctcgcgcagtggcggcggcctcgtgtggaggaccgcgcccggtggcggcttgcgcggaaggccacgcggcggcaggcggtggaggctggcgcggctgcacggattttttttttcttttttctttctttgtgttgaatgattcgatctgtgttgtctgtgttgaatgtatgattcgatctgtgttgagaatgaactatgttgttatgaatgttgttgtgaatgatttgggaggaactatgttgttgtgaatgatttgggatgacctatgttgctgtgaatgatttgggataatggacgtgaggtatacaaaatagc

SEQ ID NO: 14136 - DNA, 438 bp, Oryza sativa
  ref <308>: DATABASE ACCESSION NUMBER: AK111484
  ref <309>: DATABASE ENTRY DATE: 2001-12-06
actcaaggatgggccgcgtcaccgccgccgccccctcctccgcgtcaccctccgccgccgcccggtagatgcgcacctccagccccaccgactggtcgatgatgtggtcgaacgacgacaccccctccagcggccgcgcgttcgccggcaccctcctatccaggtactccccgaggtcccgctcgaacgtcccgtccgcccgccgcagaatgttgtacgacagcttgaagttggagatgagcacccatgtgtggagcggcaccaccgtctgcaccacaaccaaccacaaccacaaccacagtgagcgaccctctactactactactatctcgcaatcgcggaagcgaaaccagagcaatcaatcaatcggtgtgcatatgcgtatgtttttctttgctgattcctgctcggacaaaaaagaaacaacccccccccccc

SEQ ID NO: 14137 - DNA, 1070 bp, Oryza sativa
  ref <308>: DATABASE ACCESSION NUMBER: AK111485
  ref <309>: DATABASE ENTRY DATE: 2001-12-06
tactgggttttcggacgagcgccaccaccggacaccggaggagcatcgaggaatgaggaaagatatgcgaggcggttcggctctgcctctgctgctgctgctgctgctgtgctgctcgctcgccgccgtgcagccggcgcgcgcgctcttccacctgcgcggcgcgggcgcgtacgtcgaacagcttcgcggcggcggtggctacggcgaggagaaggtaccgatgacggtcgtggtgccggactactcgccgcggccggctccgttcggggcgcccgcgcccgcgccggcgataccgccgttgcctggctcggacgacggcggcggcggcgacatgccgacgctgccgtctgagcggcggagcccgcgcggcgcgcttcccggaggcaatgcgggtgctgaagccaacgccggcgcgccgtcgcctgccgccgcggcggcaagcacgagcacggccttcatcagcagcagcccggcggtgccgctccccgccggcgtcaccgactccgccaccgtcctgcccatgcccacccccggccaggaacagcagcaggtaaccaaccaaccaaccaatcaaacaactgttcatcacctctttggatgccaatgccatctcctcctctgataaactccaaagcaacccagcaaacatctgattcatttcatttcttttagtttcttgtaactccccaaaaacctttttctcagagctttcttgctgcatctttgcgagctcatattacttttccttttccctttgcatccatcatacctttttctagcctagtagctcgctctctgactgacgacgaacttttgcaatttgctccattggttggtggtgacgccttttgcaggccgtggggatgggcaccctgcctcgagctaggacggtgcaggtgcagctcgccgttcctctcgtcatgatgctgttcttttcggctctctggtagtagagtagaagtacaactagtagtaatagttcttttttactattgtaatcactagtgtttactgctttctcctctgtagattgctcgaagtcctaaccatgcgtttgtaaaaacagt

SEQ ID NO: 14138 - DNA, 654 bp, Oryza sativa
  ref <308>: DATABASE ACCESSION NUMBER: AK111486
  ref <309>: DATABASE ENTRY DATE: 2001-12-06
accgctgcctcctccagtttcagagcacgtccacgggcgcgcccctcctgcctcccagccgccgccctgcccttggcgccttgctgtggtgtggcgtggagccgtgctagctacaggcgagcctccgttcgtgccatgggtgccgcttcatcgtcttcgtcgtcgtcgtcgtcgtctccgtcgccgcagggtcaagcccaagcccaagcccaaggtgccgtgtggtgcttcaccttctaacttctttacctacctagtgggagcccgttgttgcctgcttcctttggatgcaagggaattattcgcgagtggaaatagaaattgaattaatggtgattagtttgtatgtgcattcgatgcaaacaaggagggagtttgattgatcttaaaagatctgctgtaggccgtttctatgtctaattctttccgcatttaagaaattttagaaaattactagaccgtaattcgggagtgaagcccctattgcccgctcaagtttgcaactaagacatttttataagttagctacataggtcctgagtggttttagctattttcattcaaacagttatatgttactcacaagtgtattcaccagtcaatagtgcggacattctttataggtgtgaatttcggactgtgtacctcaaagac

SEQ ID NO: 14139 - DNA, 1122 bp, Oryza sativa
  ref <308>: DATABASE ACCESSION NUMBER: AK111487
  ref <309>: DATABASE ENTRY DATE: 2001-12-06
attgtgtttgtgtagcttttagtttgggggcatttattctttggtttggccctagaaaccaaaaccaataactcttctcaaaagaaccactagtagctcacacaaactagtacagggggaatttattcatcgtactagtctagtagctctctctctcacacacacagagaaatagagctagcttgctcgctctctctcttttcaccttgagataaacaatgccgttcatgcccgagcagagctgctcctcctcctcgccatgccgctacatccggggaggacgcgcacggcacgcccagcctccatgccgtcgagcagagctgctcctcctcctcctcgtcatccccggccaccgcctcaagccgccgtctcttcctctcctcttcccgtctcctccgctggcgtcaacctcgagttcctcgtcgtcaacgcggccaccgcgggggagtaggagctccgggccgtcgccgtctcccacaccgacgctgaggacggctgcgcccccgagtggcgcacggtggcgtccctcctcccatgccgcatcgaggaggagaaggtggcagcgccggcggtggccgcatcgaggacgccgcccagtcgagctcgaggccagatctggagtgctcgaggtcatcgcgacctccacaacgcacggcaagggcgacgacggcaaacacaacagcggtggcggcatcgacggcgcgcggagcgaggaggacgcggcggagcgagatccgccgctgtcggccatggtcgccgtcgtcgcggggtcgtctccgtcgcagggttgtcgtcgtcgctgttgagggtggaagaggaaatttgtggtgcggagctgtgtccacgagacacacgtctagccaccgcgcgtccaacgcgtagcctggcgccgtggctcagccaaaagcgactgaggaacgcatccccccgcgagcaaacgcgcgcctacgcggggggacggctcaggccgaaaagcaaacggtacggcgacgccgtgagctaggggaacggctccaagacacccattgcttatgctctaaggctagtttcactgttcccgcgacagaaaaaaagatgtttggacaaagatggcttcataaacagaatcagataatttcttcc

SEQ ID NO: 14140 - DNA, 1199 bp, Oryza sativa
  ref <308>: DATABASE ACCESSION NUMBER: AK111488
  ref <309>: DATABASE ENTRY DATE: 2001-12-06
atgggtggcggcggcggcaacacgggcgtgaggacatatagttttcgtcacacacagtagcttatccataccatggatagaccatttctattcacaatctcacatgctctacaagaatcaagaattccagaacataaaccattttttccaccatattaattaattcacactgtcaaccacaatgtactttttctcccacgcatacagttcccaaattactcagatcagattaatttgaaccaaactaccattcgatgcagccttcttgtcctcctgttcgtcaacagcatcagcagcagcagcagcaatcctctgatcattcctgtacacatacctccacgcaaacaggaggtacgccatgaacgccaccagctcgatgccagacaccagccagtagaagagatcgagcctgctctcgttcaggttcgccccgtccagccacccgccgccgccgcgccgccgcgtgacgcggttgacgagctcgatgagcatggtgttgagccacgccgccatgccgagcatgcagtagaagatggagctcccgatggacttcatcccgtcggacgcctcgctggagaagaactcgaggagccccacgaaggaggtgacgtcgacgacgccgaggaggaagaactgcggcgtcagccagaacacggacatcatcgccgacgacgacgacgacgccactagtctcctccgcttgacctcgacggcggcggcgacggcgcaggacgccagggaggagacgaagccaacgccgatccgctgcaggtgggtgacgccgccgacgcggcccgtggcgcggcgcagcgccggcacgacggcgcggtcgtagacgacgaggatagcgagctggaacacggtggggatgacgaagagcgtcgccggcgagacgcggatggcgcccatccgggtgtccatgatgttcccctgctgcaccgtgaaggtgagcaccacggacaccggcatgtaccccagcgccgccgtcaggaagatgggcaccatccggagcacgatcttcgtctcctccacctgcgacacgctgcacaccgaccacgctccgccattgctgccgccgccgcgcacaatcgcagccttgtcaaggcacctgcaaaacatccgaacaacatttttcatttgatttgcttcatttggtttagtatattttgggggaaaatggaattgaataaattttgatc

SEQ ID NO: 14141 - DNA, 623 bp, Oryza sativa
  ref <308>: DATABASE ACCESSION NUMBER: AK064766
  ref <309>: DATABASE ENTRY DATE: 2001-12-06
tggcggaaatctcaaaatcaagcggaagcaatggaggagaggaagtggagatcaacgtcgtcgtggccgccgatgctgccggtgatcatgatggccatggcgatcttggcggtgtccttcaacggcgccgccgcccagccgccgccggacaccaacgtgctgtgcgtcagcaagtgcgggacgtgccccacggtgtgctcgtcgccgccgccgccggcgtcggggaactataatccggtgctgtcgccaccgaagggcaccggcagcggcagcgttggtgggtcgtcgtcgtcgccttcggcgccgttggcgaagggagggcagccaggcggcagcaactactactacttcttcacctccggcggcagcagccatggctgcgcggcggcgctgctcctgccgccgcttgtgtccctcgccgtcgccgctctgtcgcagtgatcgatcgatcgtgtccagtatgatcacagtagctagctagctatagctagtgggttaattagctgcttgtttaatttgcacctatatatttttcttttgctgatcccgatcgagttgttgatatttcgtgaattacttacttattattacctgtttaatacgaaacatgcagtttaattttc

SEQ ID NO: 14142 - DNA, 2755 bp, Oryza sativa
  ref <308>: DATABASE ACCESSION NUMBER: AK064767
  ref <309>: DATABASE ENTRY DATE: 2001-12-06
ggaggctcccttttttctcttcttcccctcccgcaaccctaattttttttccccatccgcgaaaccctagccgccacgcgaaaccaaatcccgccgcgcgggatccttttccgccggattccacccgcgaatcggggttccccttacgattcgcgggcggattagcgcgaggcgcgcctccccctacctctgtgtgatccgggggtgaggttaggccggacgccggggcatcagccatgtcgaggtgcttcccctacccgccgccggggtacgtgcgaaacccagtggtggccgtggccgcggccgaagcgcaggcgaccactaaggtttgttgaaccatcggatttacacacgcacgtgccggatcatttgctcttgcctgttggttttgatcggatctgttggttgtgcgtgtgtgatttggggatcgcacgtgcggggaagctaacctttgcatggataacttgagatttgtgaggccgcgcttcgaccagatcggtcgccaatcttttagtggctgaccgtggaaagaggatattactgaccttcggtttgctaattttggttgtgccgttgaatctgaaataaccagaatagtcatggggaaaaaagtctgatctggaaggttcgaattacatttctatatattgttgtgctcccagacgatggttgcaagaaatcactcatgctggataaaattgtggatgtaagagtctgcagtcgttaaaatctggaaacagcacattttgccgtagtaaatttgaatccatgttgctgtctcgttattggtgtgttacgagtaacctgtgtgttgttatctccgcttggactagattccaagtaatccagtgccttcatgacctgcaaattctatgcctatgaagtaacatgaacagtttgtatgtatgtattctgttgatgcatacttgcattatttgtgagatgtacatgttgtggtaaaattttgcattcaccatatagaaatagtaactgactatccttgtttagttcgaaaactactgcaggtttagttattctctgttgccaagagtgcttgttatgattgtaagggttacagttctgtgactaaccatgtaacaaatatattaaggattatcaaattattctatgtgaagtgtccgtgccctaattgtgttatcttctgtaactgatagcacaacatttgtttcctgctgtgtgcttgtgtaaattggtacttcatcattactatatatttcaaagaaaattctgcattgcattcccgtcgtccgttctaaatcagaactgacgattgctctggtggctgaagctccagaaagaaagggaaaaggctgaaaagaagaaagagaaaaggagtgacaggaaagctcttccacatggtgagatatccaagcattcaaagcgaacccaccacaagaagagaaaacatgaagacatcaataatgctgatcagaagtcccggaaggtttcctccatggaacctggtgagcaattggagaagagtggactctcagaagagcatggagctccttgctttactcagacagagcatggctctccagagagttcacaggacagcagcaagagaagaaaggttgtgttacccagtcctagccaagctaagaatggtaacatccttcgaataaagataagaagagatcaagattcttcagcttccctttcggagaaatctaatgttgtacaaacaccagttcatcaaatgggatcagtttcatctctgccaagtaagaaaaactcaatgcaaccacacaacaccgaaatgatggtgagaacagcatcaacccagcagcaaagcatcaaaggtgattttcaagcagtaccgaaacaaggtatgccaaccccagcaaagtcatgccaagagtcgatgttcctccatctatgagggcatcaaaggaaaggattggccttcgtcctgcagagatgttggccaatgttggtccttcaccctccaaggcaaaacagattgtcaatcctgcagctgctaaggttacacaaagagttgatcctccacctgccaaggcatctcagagaattgatcctctgttgccatccaaggttcatatagatgctactcgatcttttacgaaggtctcccagacagagatcaagccggaagtacagcccccaattctgaaggtgcctgtggctatgcctaccatcaatcgtcagcagattgacacctcgcagcccaaagaagagccttgctcctctggcaggaatgctgaagctgcttcagtatcagtagagaagcagtccaagtcagatcgcaaaaagagccgcaaggctgagaagaaagagaagaagttcaaagatttatttgttacctgggatcctccgtctatggaaatggatgatatggatctcggggaccaggattggctgcttgatagtacgaggaaacctgatgctggcattggcaactgcagagaaattgttgatccacttacttctcaatcagcagagcagttctcattgcagcctagggcgattcatttaccagaccttcatgtctatcagttgccatatgtggttccattctaggtttgtgtagtgagatggagtaggtgagaagtagagagatgttgggagagagctgtgtgggtctgggagattatggttccctgccacagttttccagctttgttccagagcgtttcttgtttcaggttgctgagcctgtcaaacttcatgtaatgttgtatttttgcttcgtttattgcagcaattgaacttc

SEQ ID NO: 14143 - DNA, 1425 bp, Oryza sativa
  ref <308>: DATABASE ACCESSION NUMBER: AK064768
  ref <309>: DATABASE ENTRY DATE: 2001-12-06
gacctcactcgccgccggtgatcagcctcctcctccttcttctccatcgccggcgagagagagagagagttagctagctaggatgggttctacagccgccgacatggccgcggcggccgacgaggaggcgtgcatgtacgcgctgcagctggcgtcgtcgtcgatcctgccgatgacgctcaagaacgccatcgagctgggcctgctcgagacgctgcagtccgccgccgtcgccggaggaggggggaaggcggcgctgctgacgccggcggaggtggccgacaagctgccgtccaaggcgaacccggcggcggccgacatggtggaccgcatgctccgcctgctcgcctcctacaacgtcgtcaggtgcgagatggaggagggcgccgacggcaagctctcccgccgctacgccgccgcgccggtgtgcaagtggctgacgcccaacgaggacggcgtctccatggccgccctcgccctcatgaaccaggacaaggtcctcatggagagctggtactaccttaaggacgcagtcctggacggcggcatcccgttcaacaaggcgtacgggatgacggcgttcgagtaccacggcacggacgcccgcttcaaccgcgtcttcaacgagggcatgaagaaccactccgtcatcatcaccaagaagctgctcgacctctacaccggcttcgacgccgcctccaccgtcgtcgacgtcggcggcggcgtgggcgccactgtggccgccgtcgtctcccgccacccgcacatccgggggatcaactacgacctcccccacgtcatctccgaggcgccgccgttccccggggtggagcacgtcggcggcgacatgttcgcctccgtgccccgcggcggcgacgccatcctgatgaagtggatcctccacgactggagcgacgagcactgcgcgcggctgctcaagaactgctacgacgcgctgccggagcacgggaaggtggtggtggtggagtgcgtgctgccggagagctccgacgcgacggcgagggagcagggggtgttccacgtcgacatgatcatgctcgcccacaaccccggcggcaaggagaggtacgagagggagttcagggagctcgcccgcgccgccggattcaccggcttcaaggccacctacatctacgccaacgcctgggccatcgagttcacaaagtaggtgattggtgatcgatcgccattgttgagctcgatcaaggtgttcgaccatcgtcttcttcttctcgtacttcttgttcttcatccaaaagcgtgggtaatcatgtcgtttgctgctggctgatgctgctgctgcttgtgttgtacttttgatgttcaattccggtgattctgagttctaatggatgtaacctgtctgctattatatatatatataatcgaatatatgatatattt

SEQ ID NO: 14144 - DNA, 3973 bp, Oryza sativa
  ref <308>: DATABASE ACCESSION NUMBER: AK064769
  ref <309>: DATABASE ENTRY DATE: 2001-12-06
gacccaccccgccgtgagcgaaccctacccagacctcgccgggaaccagtccaagcggaggacgccgccgatcactccgacgacgaggacgcccgcccggtagcgtctctctggaggagatcaagtacgtgaggaaggagacaaagatgctgaggaggaggatctcgttatccaggacaggaggccgccgtcaccatcgaggattccaacatccgcgtttaacttcgtgttgagatatgtggagaatgagctgttgaagaagaggggccaagaagattgatgtgatagacaaggaggagaaatgaccaggtcgatgagctcaaggtttttagccgagtagagcttcgatgtactcctgttaggaagaactcggaagagagctcaacgcagtggatcaccggcattgctgaagttcatctgcctattgtttctgacgactgatttaaactggggtgtgaatttggaaatgcaagctgtgttgtgatgcaaaacctcagtgctggacctgctgattgcctccttgttgcaaattaaccaagctaaaatatgttccagagaggcccttggccatgagggatgcgtgtgtgtccttctccacaactgtccctttttcgagcacagtgataaggtcgcagttttgtatagtgctgagcctgtgtgcgaccaccacacttgttctgccaatcatcacccgatccagtgcctcttgtaccactttctcagactggctgtctagcgcacttgtagcctcatccagaagtaggatagctgggttcttcaggatggcacgggcaattgcaatgcgttgtttctgccctcctgataactgaactcctctctcaccacaccacgtgtcatatccatccttcaggttgctgatgaagtcatgtgcattagcagatcttgctgcatcctcaatttccgcctcactagccgtttctgtgccatacacaatgttttctctgattgtacctgcaaatagtgttggctcttggctgaccagtccaatgtgccgccgcagggctcgaagattatatgctttgatatcccttccatctatcttcaccgaccccctaattgggtcgtagaacccctctatgagcccaatgatggttgacttgccagagccactttgcccaaccagggctgttgacttgcctggttggatgctcaatgtgaaccctttgaagattataacatctggccttgatgggtatgcaaaatcgactcctctgatgtccacctcgcctttgagcttctctggcttgtatccctgagggttgtcaggatcaatttctgtttcccggtcaagaacagcaaatactgaagcaactgcatctgcacccttagctaggtctgttgtcatgcttcctgcatctgcaatcacacgacctgtgcttactagaatcatgaaggtttggaagagctccttagcactaatgtggtgctcagccataagcctgccaccataccaaaagtcaagggcccatgtgcatgtcataaggctcatggaggtgccgagtccgagccctgcaaaccatgattgccggatgctttccttgcgtggtccatcttgtgattgttcaaaaaggcgtaagatgcgctcttgggatgagaaggctgtaattgtacgaagattggagactgcctcagcagctagcttgctactttcagcttgtgcatgtattgatttcttggacatgctcttgagtaagacacggcgagcataaaagcaaacaatgatcagaggctgcactgctatcataacaagggccaaacgccaggcaatgaccagacccatggtgcatgcaataagcactgctgaaatagtctggatcaccagagccattcgatcacccacgagagacctcacctacaacaacaacaaaagtatggcagctagctgtgagcatatggcaccactggagttctcgtcacggtcaaaccacccaatttcgaagatttatcttctaggaaacaagttatgtttcctggcgaataaaaaagaagtcaagaggcaaaacttctatacaaatagaaagatgcaaggtctgctggagaggaactatgctgaagcagcggcaaggaaagctgcacctcaaggactgccatagtcttcagcgcctgattggggccctgaggcagctgggagatgaagttgtgtgcgttggccgccttggcggcggcgaccacctcctccgccgtggcctcctcctttccgaacaggatgttctccctgatgctggtggcgaacagcgccggctcctggctcaccagccccatctgcgctcgcagccactttagccggagcctccggatgtccacgccgtcgaccatcacctcgccggccgacgggtcgtagaaccgctccagcagcgcgatcaccgtcgacttgccggacccgctaccgccgaccagcgccacggtgcgccccgccggcacgcggaggttgaagctgacgaagatggggctctctggccgcgacgggtagcagaactccacgttccggaactccacctcgccggtgacgttggccagctcctcaccggtgtcgctctcggagtcgatcttcggcacccgccggatcacctccaggatcctctccgccgccgagctcgcctccgagaagtacttcacgttggacagccccgaccccagcgctctgcaatcccatgcaaaaggccaccgacgacaatggcggcggagacggcgaagacggtgccgccctggtatccatggtacatgacgaggcggctgccgtaccagacgttgaaggcccagatggcgaaggtgatgccgttgctgccgacggcgatgcccttggcgagcccctgcttgagcccgagccgcgccgactcctcgagcgctgccgagaactgagccatggtggtccgctccgccacgaacgagtacaccgtgcgcgccgacgacacggcctgctcggcgatggcgccggggcgggtgtactgctccctgatccggcgggcgaggccgacgaggatgcggccgtacatgaaccccgggatgatgagcagcaccaccgacggcagcgccaccagcgtcagccgccacagcagcgcgaacccgacggcgtagctgccggcgaacatggcggcgttcatgacgaagttgggcaccttctcgctcagcacgtcctgcaccacgaggctgtcgttggacacgctggtgatcacctccgccgtcgaccccttcttcaggtcgaagtactccacgtcttgccggagcaccgcccgaaggtaccgtgcccgcatccgcgatgcctgccgctccgccgtcctcgcccagcaatacccctctgctcacacacacgacacccctcgccggcggcgtcagctcgccgtcgccgcagcattggcatgcaacagttcaggatcgagctgggcggcgaggagctacaaggtacgtaccacgttgaccttggagctgaactccttgacgatgtcggcgccactgccgaggtcgttgaagatgcggctggtgatgagcagcatcaccggcgtcgagatgccgtcgcccatggcgcccagaagcccaagcaccatcagcgccacgtccgccgcgtccgcgtgcatgaacactgtcatgaacgacgagaacaccggcctcgccttcgccttgccggcgccgccgtcgccgcctcccatggccgtcgtcggcgagttctcagctatagcttggtagctatctagctcaatttgctgtctccaagtgtgacagctagttgtaattgagttggtatagctttggcctcttcttttatttttttcaggccgtttagatggtaacctctctgacttgagagagttagagaggccttgtatatacggagtatatagtactccagtttagttgccatgccagcagttgcatgcactagtaagcaactagtctctcggtttcatattacaactcgttttaactaagtttatagaaaaaacatagtcgtattttt

SEQ ID NO: 14145 - DNA, 4748 bp, Oryza sativa
  ref <308>: DATABASE ACCESSION NUMBER: AK064770
  ref <309>: DATABASE ENTRY DATE: 2001-12-06
gtcccctctatcctccactgctgccgcccacctctccgtatcagctgcgtcgcgttggtttccgccggcgctgctgctgctgcaccagtccgctagggcgggcgggcatggcgcgccgcgccgcttcccgcgtccgcgccggcgctgttggcgcccttcgctcggagggctcgacccaagggcgagggggccgcacggggggcagtggcgccgaggacgcacgccacgtgttcgacgaattgctccggcgtggcaggggcgcctcgatctacggcttgaactgcgccctcgccgacgtcgcgcgtcacagccccgcggccgccgtgtcccgctacaaccgcatggcccgagccggcgccgacgaggtaactcccaacttgtgcacctacggcattctcatcggttcctgctgctgcgcgggccgcttggacctcggtttcgcggccttgggcaatgtcattaagaagggatttagagtggacgccatcgccttcactcctctgctcaagggcctctgtgctgacaagaggacgagcgacgcaatggacatagtgctccgcagaatgacccagcttggctgcataccaaatgtcttctcctacaatattcttctcaaggggctgtgtgatgagaacagaagccaagaagctctcgagctgctccaaatgatgcctgatgatggaggtgactgcccacctgatgtggtgtcgtataccactgtcatcaatggcttcttcaaggagggggatctggacaaagcttacggtacataccatgaaatgctggaccgggggattttaccaaatgttgttacctacagctctattattgctgcgttatgcaaggctcaagctatggacaaagccatggaggtacttaccagcatggttaagaatggtgtcatgcctaattgcaggacgtataatagtatcgtgcatgggtattgctcttcagggcagccgaaagaggctattggatttctcaaaaagatgcacagtgatggtgtcgaaccagatgttgttacttataactcgctcatggattatctttgcaagaacggaagatgcacggaagctagaaagatgttcgattctatgaccaagaggggcctaaagcctgaaattactacctatggtaccctgcttcaggggtatgctaccaaaggagcccttgttgagatgcatggtctcttggatttgatggtacgaaacggtatccaccctaatcattatgttttcagcattctaatatgtgcatacgctaaacaagggaaagtagatcaggcaatgcttgtgttcagcaaaatgaggcagcaaggattgaatccggatacagtgacctatggaacagttataggcatactttgcaagtcaggcagagtagaagatgctatgcgttattttgagcagatgatcgatgaaagactaagccctggcaacattgtttataactccctaattcatagtctctgtatctttgacaaatgggacaaggctaaagagttaattcttgaaatgttggatcgaggcatctgtctggacactattttctttaattcaataattgacagtcattgcaaagaagggagggttatagaatctgaaaaactctttgacctgatggtacgtattggtgtgaagcccgatatcattacgtacagtactctcatcgatggatattgcttggcaggtaagatggatgaagcaacgaagttacttgccagcatggtctcagttggaatgaaacctgattgtgttacatataatactttgattaatggctactgtaaaattagcaggatggaagatgcgttagttctttttagggagatggagagcagtggtgttagtcctgatattattacgtataatataattctgcaaggtttatttcaaaccagaagaactgctgctgcaaaagaactctatgtcgggattaccgaaagtggaacgcagcttgaacttagcacatacaacataatccttcatgggctttgcaaaaacaatctcactgacgaggcacttcgaatgtttcagaacctatgtttgacggatttacagctggagactaggacttttaacattatgattggtgcattgcttaaagttggcagaaatgatgaagccaaggatttgtttgcagctctctcggctaacggtttagtgccagatgttaggacctacagtttaatggcagaaaatcttatagagcaggggttgctagaagaattggatgatctatttctttcaatggaggagaatggctgtactgccaactcccgcatgctaaattccattgttaggaaactgttacagaggggtgatataaccagggctggcacttacctgttcatgattgatgagaagcacttctccctcgaagcatccactgcttccttgtttttagatcttttgtctgggggaaaatatcaagaatatcataggtttctccctgaaaaatataagtcctttatagaatctttgagctgctgaagccttttgcagctttgaaattctgtgttggagttcttttctcctacagttgtattagaggagggatcttctctttatgtgtaaatagcgagattggtacaacaaattattgattcaattttggttttgaacattgatgatcctccctgcactattggtgcagctgctcttctattcattttgtgaagtgatgttcaagaaaatcatttgttggattcagaatctggtgtccattttcttcttaaattattaaatcctccagtgaatcttgttgattccaaagcaccatcgataggttccaaacttcttggaatcagtaaagttcaaatgcttaatggatcaaataaggattctgactgcatttcagaggaaatcctttcaaaagttgaagagattctcttaagctgtcaagtgatcaagtcgctcgacaaagatgacaagaaaacaacaaggccagaactgtgtccaaagtggcttgctttgttgacaatggaaaatgcatgcttgtctgctgtttcagtagaggaattgaattggagtagtggactgcactagaagcacctatggccattgtcatactaggaaggttttcccttatcaaatatttgattgttacagagacttctgacacagtgtccagagttggaggaaattttaaagagacattaagggagatgggaggtcttgatagtatttttgacgttatggtggattttcattcaacattggagaatctcataaaggatacatccacttcagctttggaccgaaatgaaggaacatctttgcaaagtgctgctctcctcttgaaatgtttgaaaatattggaaaatgccatatttctaagcgatgataacaagacccatttgcttaatatgagtagaaaattgaacccgaaacgctccttgctttcttttgttggtgtcattatcaatactattgagttattatcagctctttcaatacttcagaattcttctgttgtttccagctctacatatccgaaatcgtctaaagtctctcaacagagttactctgatgtcatggggggaacttcatttaatgatggaaagagcaagaactcgaaaaaaaaaaacttttgtcgaaccagacacgtcattgttgcttatcttcaaaatcagaagtttctcatattactatatcttctggtagtgatgctggtctgtcacagaaggcattcaattgttctccatttatatcaagcaatggggcatcaagtggttcattaggcgagaggcacagcaatggtagtggtttgaagttgaatataaaaaaggatcgtggcaatgcaaatccaattagaggctcaactggatggatttcaataagagcgcacagttctgatgggaactccagagaaatggcaaaaagactccgtctatcttaaaatgtaatcaccgacagtggtggtggtgatgacccttttgcatttgaccgccgcgtcggcgtcgccaccacgtaatcgcccacgtcgctgcccccgctgccacgtcgtcgaccgcgcacggtaatcacacgcatctcgaggccgccgctagctgatatcttctcatccggttgatttgtgattttggcgtttttgcagtggtgatggcggggggcgaccgtggccgaggcgtggagtgccatccgcatcagggtgtatcggccgcgctgctccgccctggtccgcaggctttggcggcgagctggcggcggagggagactgtggtgagatcggatttcgccgctggtggtgtcgctaccatgggggattcgccgcaggcgctctcaggcctcatagccattaatgtagtttgctggaacatttacatttggaacgttgttggcaattgcttgacaaaatgtggaattgtggaggggagaaaaatcattgaacctgcagtgacaaaattgccatctctaattttaaaactgaaggtgtggaaatcaaacataatcattgccagcgcatcattcttgttaaccaccatgatatattgttggttataacagttagctccacaccaaccttgaaggtgtcaatagaatgtttagtataaattgaggagaacaggcagttgttaagactttctaaagaacttgtagcagctaatactagctattgtgcatttgtgtttcatggaatttgagcagcaatggatatttcttactaagatgtatgatgcaaaacaaaaaactatgtctatacagtttacatgtaatgtgcggatgcaaataaaatcatgtacatgg

SEQ ID NO: 14146 - DNA, 1820 bp, Oryza sativa
  ref <308>: DATABASE ACCESSION NUMBER: AK064771
  ref <309>: DATABASE ENTRY DATE: 2001-12-06
gagacaaggagaagggggcagaagcagagcttagctctcccctcctcctcctcctcctcctcccatggcggccgggtgggcccgccctgccggctttgccctgctggtggtggtggtgctggcggcggcggcgagcgcggacaggccggcgaggggcgggctgtcggtgacggccggggcggaggagtcctccgccgtgttcccgctctacggcgacgtgtacccccacggattgtactatgtggcgatgagcatcggcaacccgccgaggccctacttcctggacgtcgacaccggcagcgacctcacctggctgcagtgcgacgccccctgcgtcagctgctccaaggttccgcacccgctgtaccgaccaacaaagaacaagctggttccatgtgtggatcagatgtgcgccgctctgcacggtggtctgaccgggaggcacaaatgtgattcaccaaagcagcagtgtgactatgagattaagtatgctgaccagggatcatcacttggtgtgcttgtcactgacagcttcgcactccgacttgcaaactcctcaatcgtccgtcccggtcttgcatttgggtgtgggtatgatcagcaggttgggagcagcactgaggtgtcagctactgatggtgtccttgggcttgggagtggctctgtcagcctgctttcacagctcaagcagcatgggatcactaagaacgtggttggccactgcctcagtacaagaggtggagggttcctcttctttggtgatgacattgtgccttactcgcgtgcaacgtgggctcctatggctcgtagcacatcccggaattactattcacctggctcggcaaacctttactttggtggccggccactaggtgtgaggccaatggaagtagtctttgacagcggcagttcattcacttacttttctgcacagccatatcaagcacttgttgatgcaattaagggtgatttaagcaagaacctgaaagaggtacctgaccactctttgcctctatgctggaaggggaagaaaccattcaaatctgttcttgatgtaaaaaaggagttcagaacagtggtattgagcttttctaatggcaagaaagctctcatggagatccctcctgaaaactaccttattgtcactaaatatgggaatgcatgccttggcatcctcaatggatcagaggttggcctcaaggatctgaacattgtcggagacatcacaatgcaagatcagatggtgatatatgacaatgagagagggcagattggatggatccgtgcaccctgtgatagaatccccaagtttggatcttcccttctgtgatcatttcacacacctgaacatatatacccataattactctctgtttattcaaacagtgacaataccattcatggatttgaggacggttattgttggcctcagttccccaacatcattggttatcagaatgagcagtccgcagtctgttacagttcaattacaaaatgagcgacaagggaaaaggccattaggatgatagaaggaccaaccgtcagaaggatgaacatcaaagggaggctctacacggtattattaggtgaatgtattctttagaaaagagaaaatctagttacctgtaaacatcatcatgttcatatgaaataaaattatgatgttcctatgaaacagtcccagtcccagtcccactcttggttggcacaaagttcttcctgtatacttgtaagactgaatataattagttccacaatctgttattggctgggactatacattatgtagtctaatatgctatgtatatgatttgttagcc

SEQ ID NO: 14147 - DNA, 4132 bp, Oryza sativa
  ref <308>: DATABASE ACCESSION NUMBER: AK064772
  ref <309>: DATABASE ENTRY DATE: 2001-12-06
ggatgtctcctcactcctctcctctctctctctctgctctgctttgaccccaattcccaacacccctcccccttcgcttcgctgctcccgattccggcagcctcgcgccgccgccacattgatggtaatagttggatccgccgcctccgccgcagccgacgacgatgggactctgctcctcctccagcgcccgccgggacgccggcacacccggcggcggtaacggcgcggggaacaaggataacgcggggaggaaggggatcgtggcgtgcgggaagcggacggacttcgggtacgacaaggacttcgaggcgcggtacgcgctcgggaagctgctgggccacggccagttcggctacaccttcgccgccgtcgaccgccgctccagcgagcgcgtcgccgtcaagcgcatcgacaagaacaagatggttcttcctgttgccgttgaagacgtaaagcgagaagttaaaatactgaaggccttacaaggccatgaaaatgttgtacatttttacaatgcatttgaagatgataattatgtgtatattgttatggagtaagtcatggaaaaactctcaaatgtttatgaaatcagtagaagtatatctaagtataaccataaaatgtctaagtgaacttttcatggccttagccaagttgaaggaaggttcatatgtgtgtttatgcttttttttagaaaccacccatattttaagtaattgatcttactgaggtctagtattttagtttgtgcccctccaaacaggactttggcaattcaggatctaattacatggaaaagaaacaccacatgcaaactggcataatattaataccctcgtaaaaatctagaaattgtaccgggtaaatatcaagttcaggataaatagttggcaaacactttcatgtttctcatctttgttctctttgtatcaaggaactgtgcaagctaatgaagatctgaccctgttacatgtatttgacagattatgtgaaggcggggagttacttgaccggatactagccaagaaagatagccgttatagcgagaaagatgctgcagtagttgtgcggcaaatgctcaaggttgctgctgagtgccatttgcatggtttggttcatcgggacatgaagcctgagaacttcctcttcaaatcaaccaaagaggactcatccctcaaggctacagattttggtctttcagattttataagaccagggaaacactttcgtgacattgttggaagtgcctactatgtagcaccagaagtgcttaagcgtaagtcaggcccagaatctgacgtttggagtattggcgtaataacctatattctactgtgtggaagacgacctttctgggacaaaactgaagatggaatatttaaagaggtgttgaaaaacaagccaggttttcgtcgcaagccctggccaaatatcactccttgtgctaaagactttgtacaaaagttgcttgttaaggatccccgtgcaagattaactgctgctcaggcattatcacatgaatgggtgagagaaggaggacaggcatctgatatacctctagatatatctgtattacataatatgcgtcagtttgtaaaatacagtcggtttaagcaatttgctttacgggcgttagcttctacactaaatgcagaagagttgtctgatcttcgtgaccagttcaatgccattgatgttgacaagaatggaacaattagtctggaagaactgaagcaggtacatccttgttggaattcctcgctacactattggcttgtttttttttactaatatttagcataatccatggaatacatttctttgtaatttctcttcatcttatttttgggccactgttctgaccaagctctcttccattctgccacttccctcatgccaacattctgtccgtttggaaacaaatactggaaatgtagaaaaatgaaaatagggaaaaccataggataatgtaagaagtatataatggcaaaactgtttagggattgccattgttaaattgtacaaaccccagtggctgatgcaggattttggagatgggggtacaaacttgtaaagaaacattaatacatggaaaaacctaaagctccctattaaagcaaataatactcaattattcagtaaatcagaaaataagaaaaaatatttataaatcctttgaaaaaataaatattaaggtttcagcacaagcttatatataagttggctggaactcttttggggctattttgcaactatggaatcaaatactgctgttctaactcaacaaatcatatacacatgcattctaactattgaatgaaagggtgtttacaaaatccatttacatagttatgtcccatgctggtccaccatgacaaagcatcagatttttcttaaaattttacttttgtacatttctcaagaaatcacaccacaaaaaatgtttctgttttctcaattattctgaactattctaaaattttcaattggtaattgtttgtaagtcaggtagatttaatgatatcttctgttaagtgctagagattataactactatttgttactctccctagtgaaagatgtgcgataaagctcttttgttcattaaggaaagcatcctgatgaccacagctgcaccatcaaagttcttttggtagtcattgatgcatagacattttgattatgaaattttctttttaacttgtattcaaagaattggaaacatgcttctttttctttgaagaagtaccatatatttgctcttatacacatatcaaagaaacaaattctatgttgtaccttctcttatacatatgacatgcggaacttcggcagtgtcaattttttacctcacattataagtcatctgtcttattagctatcactatatgatgtcaacactaatttgcaggctcttgcaaaggatgttccatggagattaaagggtccacgtgttttagagattgttgaggcagtatgttctcattcttataatttaccgtagtaacattatctattatcggtctcagattcacatgctttcttgtggtcacttggttggaactatgtgcaattgcaatgaagcgttaaatctttctaaaacatttaatgacgttatgcaaatagtttgcattttcaaaatttcactgtcccatccttgacagcttttgagagtgaagtcatcttccatgttttagtatatagtaatagtatttttccaaggcagctagggtaagagatgataaaaattatatggatttcatatattttattatttagtgctgaagatatagaagattggagtacttgtatacttattctagctatttcgagatgatgtggggggttttaggtcaaatgagttaagatgcctaaatggtactgtttaataatagataacagtattgaaactgagtaaatatattcctctctgcctttttgttctttgactaagcaaatgcatccacttccctctctatgactcttatgacaatgcttgatgttgttttactgatgatcctcaagtatagctttgtagtaagttttaaattatagttccagatgcaatgtttcaagttccattgtttctattaaatttgcatgtatgcaattgaacggacatcatcaagttttctccttgcaaaggggagtatttgctatcatggcataaagattttcattgctgggcagattgacagtaacacagatggattagttgatttcgaagagtttgttgctgcaacattacatgtgcatcagctagtggaacatgatactgagaagtggaaatcattgtctcaagctgcatttgataaatttgatgttgacggagatggctatatcacatctgatgaactgagaatgcaaacaggactgaaaggttctattgatcccctcctggaggaggctgacattgacagagatggaaaaataagcctagatgaatttcgcaggctcctgaaaactgcaagcatgagttcacgcaatgtacaaactccgaggagtgttcacagatcgtagcttttcatagctgtgcacacttcacaaaagtgaacaaagggcagtcattgttgtaatatttttcatcgacacgtgtaatcaaaattgttgccagaaaagctcttgatgt

SEQ ID NO: 14148 - DNA, 3746 bp, Oryza sativa
  ref <308>: DATABASE ACCESSION NUMBER: AK064773
  ref <309>: DATABASE ENTRY DATE: 2001-12-06
gtcatatttcgttcactctactaatttttatattatactcttgtagtagttcacaggcaattcagaaattcgactaggttactgcaaacagattatgctaattacttatccagtgttaccgggacactgacacgggtgtcggagtccgactcggcaagctaagaaaaaataggattcggggactcgctccataaatatgatttttagtgaaaatattatatatatcatcaaataaaacatactcttagtcagtaaaacactaaaacatatggtgtcacacattattctgcacagaagatcctatcttcttattagttaggacaaagactgacagccaaaataagtgaatttcatgtgtagaggatcccttgtgcagttgtgcacaaaaaaacccactgctatcctgccatccacatgccactaccaatactactcatgagtactactagttgtctctggagtactactagtatgcctgtgcattgtagatgcacgcacgcagctacttttcccatcgagctctcccatcccattctctctctctcttctgccttctttttcccatcctctcccacaggtctgccagacaaccaccggcactgctcgcctatggcagctgagagagacaccgctagtagtgtctgatgcgtgtcgaaccgtgtcagacacgagctgacacggggatgcgtgtcgacatggaaaatttttttggactcgcgtgtcccggtaacactggttacatctggggaggtcggttttatcttaggattcaacttcaaaccattctgctgtagaattcctacaaataaaaaaaaaatagcagtcttgtgtttgacccagattgtttctgtatcctctgttcgtctcaactggcctcaagaacacaactattttaaggaatatataagcagaatggagagtttaaactccattctaattttgttcggttttgtctgttgtgcgtgtaattaggcatttaattttcctatttcatgttttttttgccaaacggccaaatggccacactctggcattcgatgtaacaatttatcatatcgggaactattgttacaatctgtatcttctttgtgtgctgtctaccacaagtcttatctgtaagatgtcatattttttatgattggttctacctgttactgagaatatcttctactatttctctttttgccaggttttggtagaagcaaatggtgtaacacggacattggttttgaataggccaaagcagttgaatgccctctcctctgcaatgataacgtgttttttgaggtgcttcactgcttatgaggaagatgatggagttaaactattgattgtgaagggaaaaggaagagcattttgtgcaggtggagatgttgctgcagttgtccggtctataaataatgatagctggaaatatggtgctcattttttccgaaatgaatttctgttaaactatatcattgcaacatatagcaaacctcaggtttcgcttctaactggaattgtcatgggtggaggtgctggtgtttctatacatggaaggttccgagttgtcacagatagcacggtttttgctatgccagaaacagcgttgggtctctttccagatattggggcttcatattttctatctcgacttcttgggttctatggagagtatgttggtcttactggtgtaaggttggatgctgctgaaatgcttgcttgtggcctagcaactcattttgtaccttcagataggctgtctttgctagaagaatcacttaaaaaggttgatacatctgatccatttgctatatgtggaattatcgatcaatattcgcaacaaccatctctgaaagaaaaaagcgctctgaataggctagaaatcatcaacaaatgcttttccaaaaaaacagtagaagaaatcatagcctctcttgaacaagaggctccaaatgttgctgatgaatggattgcttctgcaatccagtccatgaggaaggcttctcctactagtatgaaaatatccttgagatcggtatcctctcaaacatttccaaagcatacgtctttatgttactcaagtcattctatcttggtgccttctgatgcaaattattgtagtgtaaggcactactatttatttagacccatcaatcctttatatggtttcatatgaccagtatttatattgctcaagcgcatacttcagatagctttatgaactgaaccctactcttttgtcttggcagttggcacaacagatcagccctatagccaaaaaaacaaaccttctaagattatagcttttgcatagtcaaattgcatgtatgggcataccagttctaaaagctttgtaaatgtctttgaaactagtcgttggagggaagacaaggctcgttcactccacagaagagtacatgtgctagaaaaggcagccagcttaaaaacaccaactactttcttaagccttatttagtttggttgcctacgctgatctccggcgtgctatgcaacaccccctgcttgcttctttctgttcgacttggagcttgcagcctccctacccttgcttatgacctattcttaatagaaccgatctgattttcactacaagaggaattccgtgcttctgccggatcctccctatctcctgatcaagcttgtgttggtaaatactccctccgttttttaatagatgacgctgttgacttttaaacacatgtttgatcattcgtcttatttaaaaattttatgcaaatgtataagatacaaatcatgcttaaattacgttgagtgataaaacaactcacaacaaaataaattataattacgaatggtcaaacgtctgacaaaaagtcaacggcgtcatctattaaaaaacataatgtagtactccctccgtcccataatataggggattttgagtttttgcttgtaacgtttgactactcgtcttatttaattttttaaaaaaatattatttattttatttgtgacttactttattatccacagtactttaagcgcaacttttcatttttgatatttgcaaaaaaattttgaataagacgagtggtcaaacgttgcaagcaaaaactcaaaagccctcatattgtgggacggagggagtattgtttagtatggcctatagtagtacactgtttgggacagagttagtgcccttctcacaacatcccgtctggcggaaactatggagggggtggctagcgcgcgcgtgggcaccaggaaagtagctggcgagcattccccccttccctttagtcttaactacctatattagttaatatacttaacagtaatgatagtaattaggaaagattcgggagattttttttactaacagattaaaaaaaatttaagttagatttgaaaactttcgatttaagttttaaattttaaagtcaaattttaaaaactttcaactcatatttgaaaactttcaacttgagatttgaaaactttcaactcagattcgaaactttcaactcaagaatcgagattcgaaaactttcaagttcggatttgaaaattttgaaaactttcaatttgagatttgaaaactttcaactcgagattcaaaaacttccaaatgcagatttgaaaattttgaaaactttcaactcgagatttgaaaactttcaaatcgagatttgaaaactttcaagttcagatttgaaaactttcaaactcaaaatatgctaaagataaaaaaaaatcagaaaaaagtgagaaaaaaaagg

SEQ ID NO: 14149 - DNA, 1567 bp, Oryza sativa
  ref <308>: DATABASE ACCESSION NUMBER: AK064774
  ref <309>: DATABASE ENTRY DATE: 2001-12-06
gctccttcgcacgtattacgtgcgaaaaaaaaaatcatcagcacaagatcgaggaggctttatctgaacaagggagatggcggactacgtgtatgggccggggcggaaccacctgttcgtgcctgggccggtgaacatcccggaccaggtgatccgcgccatgagccgtcagaacgaggactaccgctcgccggcggtgcccgccctcaccaagaccctcctcgaggacgtcaagcagatcttcaagaccaccaccggcacccccttcctcttccccaccaccgggacgggggcgtgggagagcgcgctgacgaacacgctgtcgccgggggacaagatcgtgtcgttcctgatcgggcagttcagcctgctgtggatcgaccagcagcaacgcctcaacttcaacgtggacgtggtggagagcgactggggctacggcgccgacctcgccgccctcgactacaagctccgccaggacccctcccactccatcaaggccatctgcatcgtccacaacgagaccgccactggagtcaccaacgacctttccgccgtccgcaaaatcctcgacaagcacaggcacccggcgctactactggtggacggggtgtcatcgatatgtgcgttggacttccgcatggatgagtggggagtggacgtggcgctgacgggttcgcagaaggcgctctcgctgccgacaggtctgggcatcgtgtgcgcgagccccaaggcgctggaggcgagcaagacggccaagtcggtgcgggtcttcttcgactggaaggactacctcaagttctacaagatgggcacctactggccctacaccccatccatccagctcctctacggcctccgcaccgccctcgacctcatcttcgaggaaggcctcgagaacgtcatcaagaggcacaaccgcctcggcaccgccaccaggctggccgtggaggcgtgggggctcaagaactgcacgcagaaggaggagtggttcagcgacaccgtcaccgccgtcgtcgtgccgccgtacatcgacagcgccgagatcgtgaagcacgcctggaagcggtacaacctcagcctcggcctcggcctcaacaaggtcgccggcaaggtgttcaggatcggccacctcggccacctcaacgagctgcaattgatgggtgccctgagtggagtggagatggtgctcaaggacatcggctacccggtgaagctcggctccggcgtggcggcggcggcggcgtacctgtcgaattcgacgccgctcatcccgtccaggatctgaagcacaacgaacgaaggaaggaaagcaattctcagcggcgatggttctgcctgcagtttggcagaacggaacagcggcaaattaatcctattgcatataatttggtctctgtatgtaaagttaaatttttatacgctccatcgatcagctctatgctaaggagtaaggagtataattttgtgaaggtactgcagcttttacttaattaatcttgaacctcgatgtatacaacagtgaacagttaaattaatcatcattccctaatgcctcttaattttaact

SEQ ID NO: 14150 - DNA, 3358 bp, Oryza sativa
  ref <308>: DATABASE ACCESSION NUMBER: AK064775
  ref <309>: DATABASE ENTRY DATE: 2001-12-06
gattccttcctctcgctgtcctgccgtgccctgcctgcatcctcccagcctagctcccttatccaacaagcgtaatcgagcgaccgatcgatcgatccatgcatgtctctgcatccgggtacaaataagctgaggccttctcgcgagaaatcaaaaccgtatcacctcacactcacagcagtttggctaaccatggcgagagcggcggcggccttcgtcttcgtctcactcaccctcctctgcaacgccagcagccaaggcgaaggggcggcggcggcggcggcgtgcagggcggcggatttggtggtgaggcagagggcgacggggcgggtggtggaggggaagccggagtacgcggtggaggtggcgaaccgttgccggtgggtgacgctgcggctgcacccggtgggcccaccgctgctcgtcccgcaccatgccaggcaggacacggtggtcgccggctacgacgtccctgccgacgcgcgcgtgctagtgcacgtgcgggccatcgcgcccgacccggcgtcgtggcccgaccgcaccgatgcgttcctgccggagcgcttcctccccggtgccggcggctgcgatggcggagtggacgtgcacgggcagcacttcgagctgctgccgttcgggtcagggcggcggattagtccggcgaccaacctggcgaagaagatggtggcgctgggcgtggcaagcttgctgcaggggttcgcgtggcggctgccggacagaggacgtgagcatggaggagctggtcaggctgtccacacgccggaagatgccgctcgtcaccgtcgccgagcccaggctgccgccacatctctacgccgccgccgccgcatgaacgttggtgagcgaactaccttgctgcgaataagtaagaaaaaagaagagaaaaaagagaggggaaagagagtgttgacgtggcacgctgacatgtatggcccacgagggtttcacgctgactcagccgccacgcagaccaaaaccggggacaaaaccaccgaaggacctcgggtgaccggttttgtatacttaaaggaccctacgtatctggttttgtggttcgagaacgttttggtatcccgatgacaagttgagggacctttggtgcactttttccggatttcttgtggtttagaccgcttttcggggacagaatagaatagcgtgcgcgccgcaaccagattgtctcggctcggcggcgctggtcacccgccgtttcaaatcccaactgccagacagagtcatacacgtacggaacacggacctttgagatgtgtacttagagcaggtacaatagtaggctataagctagctataaatatattttaaagagataaaagaagagagagaatagcatcgggctatagatctgtagccagctgcagcacggactccaatacgtaatgtgtgtatgacaaatgagatcaggtattaatagtatagtaagcactattgtatgaattggctattagggcagccacaatggttatctataggctctctacaagagatctatatcagcatatttttctacttggaagagattaaatgaaaagagagagcaaagctatctactaacctggagatagtctatagagaaaaacgaggcaatggattagagagctatagatacccatgtagacataccattgaagtggtttactattaatctaatatattactgaaatacacatgttttatagatagcaccttactttactattgcgggtgctcttacattgactatatatgatttggagttaatagtgggttatactattaaacttgctcggaggatgtctctctcttcagacaacatggtatatgatttggtggaatatcatgtcaaggagcaaatgcgacaaggcaatcaaccatatctctactctacataaacaaatccggagccgttcacgcgttgcaatttcattaatcgcagttacaatttcattaatcgcagttattcacataggttctggacttctggttccgatgaaagccaggctcgtggtgctcgcggccgccgtggcggcggcggcgttgttggtgtccctggacccccggagcgacgacgtgccagtgctggagatatgggagcgcgacgtcgagcttatcaccgtggacgccggcggcgcggtcgggccggagagcgtggcgttcgacggcgacggcgacggcccgtacacgggcgtgtcggacgggagggtgctcaagtggcttcccctggagcgccgctgggtcgaacactcgtccgccgtcatcgagccacatatgttggatagctgcagaggatccaaggacacgaaacgggagcaggagtgtgggcgtccactgggcctcaagttcaatagcaagactggtgagctgtacgtcgcagatgcgtaccttgggctgagagtggtcagcccgggtgagaacgtgtctaggccgcttgttcctaagtggacagaaagcccattcagcttctccaatggcgttgagattgaccatgaaactggagtaatctacttcaccgagaccagtacaaggtttcagagaagggagtttctaaacatagttataacgggtgacaacactggaagattattgaaatatgatccaaaggaaaacaaggttgaagtcttagttgatggcctatgttttcctaatggtttggctatgagcaacgatggttcttatttgctacttgcggaaaccacaacgggtaagatcctaagatattggattaaaacaccaaaagcatcaactattgaagaagttgtgcaactacatgggtttccagacaacatcaagatgagtcctagaggagggttttgggttggtcttcatgccaagagagggaagatcgctgagtggtcaatttcttacccttggctaaggaaagtaatcttgaagctaccagctcaacgcattcaacgcatcacatcgttcttgacaggatttggtcgtcaggtgatagctttgaggttgagtgaggatgggaagaccatagaagcaatgagtgttcatggtgatgttaggaagttgttcaagtctattagcgaagttgaagaaaaggatgggaacctctggataggatctgttttgtcaccttttcttgggctttatcgtatatagtttaatacatagagagagaatgcataagttacaaaggtagtgaagatattagtatacaagcgtgggttatgatatgaagcatatgtaacaaaataatagatctagcatttagtgagtgttcaaaataatggttgccaatttttattgaaaagctaatgtctatcatcactaccagcaacgagacttaagattacaatgatatgaataaaaaaccacctgaacaact

SEQ ID NO: 14151 - DNA, 2805 bp, Oryza sativa
  ref <308>: DATABASE ACCESSION NUMBER: AK064776
  ref <309>: DATABASE ENTRY DATE: 2001-12-06
gagttgagtagactctgctactacttgcttcaccggctcaccgcaacagcacccagaaaaaaaaaaaagctctcctcgttcgtctcctcctcctccccttctcattcccaaaatccaccaaatcccggcagcaaggcgcgatctctggcgcttccgcggttcgcgcgatccccgatcggtccgcgccaggggcgctggtttcatggattggagttgctgggacggctcttcgtgggaaccctcgtgctgacctgattcgtttgggcgtggttgatttgggtcttagtttttggtggactttgagtccctttgcgggtggttcttgtttgtaggctgtgattggggaatcctgggaggttgtaggaatgggattatctagattgctgtaaatagaggtgaagacaattcttttaggtactaatttggtgcacataaggtgagaattttggttaggactaggtggagatcaggattattgttagggaaggggatgggtggcctctgctcaaaggtttcagcggtagacaagtccccgagcgacaccacgcttgttcgggaccagatagttgatcctgagcctgccttgacaaagcgggctaagtcgcctgtggttgaagaggcaacggcgaagcgggtggaagaccagcagcagtcttttgcattcttggagagcgttgttcccgggcttgctgtttacaatggtgcagatgccggtcaggccgggtctaggacaccacaactggcccggactctgtcgcagaaggctggtttgggcaagactaaggccggtgctgcaaaggtttcagaagtgagctcccttttaggcagggctggcactgttggtcttggaaaagcagtggaggttctagatacgcttggtagtagcatgtcaagtttaaatactagcagtggttttatatcggcagcaaagggagataaaatatctattttggctttcgaggtggcaaatactattgttaaaggttccaatctaatgcgtgcactctcaaagaccaacataaagcacctcaaagaagtggtgctttattcagaaggtgttcaacaccttatatccaaagatatggatgaattacacaagattgcagcaactgacaaaagggaagagttagaaatcttttcaaaagaagttgttcgatttggaaatcgttgcaagaatcctcaatggcacagcttggaccgctactttgaaaagtgcagtttgatttctgccttgtatttaatggaggtttattttaaggcactaatttattttttgtattgattatactagattggcatcggaacgaactcctcagcatcgcctgaaagaagatgcagaatcagtgatgcagcaattgattatttgtgtgcaatatacagctgaattatatcatgaattgcatactttggatagatttgaacaagactgtcgtcgtaaacagcaagaactggatggtttgggttcaagaggtgatagtctgcatatgctaaagcaggatgtcaagagtcaaactaagcatgttaaaagtctgaagaagaggtcactttggtccaagaatttggaagaggtgatggaaaagctcgtagacattgttcatttcttacatttggagatcaataatgcctttggcctcgctgacagtgaagcgccacaagaaccagctaaacaccacaatagattgggaccagcaggccttgcattgcattatgcaaatatcatcaatcagattgatactcttgtttctcgatcaagtttgatccctcccactacaagggatacactataccaaggtttgccactgactatcaaatcagctctccgttcgaagctacaatcctttgaactcaaagaagagcttacagcttctcaaatcaaagctgaaatggagaagactttgcgatggcttgtccctattgcaaataatacaacgaaagcacaccatggcttcggttgggttggagagtgggcaaatacaggatctgagctgaactgcaagctatcagggcagatggacttaacccgaatcgaaacactatatcatgctgagaaggaaaaggttgatggccatatccttgagcttgtcgtgtggctccatcatctcatcagtaaatccaaaaatgccaatggaggtgtaaggtctcccatcaagtctcccgtccgttcaccaacacaaaagggtatcaccttgatgccagacaagtcgaacagttcatcgccaatcctcacacaagaggataaggatatgctgaagaatgttaagttccggaaattcgtccctggaataagcaagagtcaagagtttgacacaaagtcaagacatagcaaacagattagactgataaagagcaacagtcaatctccaaccagtggcagtaggaaagacatgctttcactcaggagatcatccatgcttcctgtcatcgacttccagatggataggaccaaagctttggacttaatcgaccggcttgatggtctgaaaaaacaatgaggaatcatgaagctgtttaagaacatgaacctgaaaatgggcagtcgtttgtctatcttgaaatccatggccccagcaaagatgtcgaaaattggcgttaaactgcagcaatgccgcccgtctgaggtgaagaacaagcagtatgccaattgccaaacaagcagtacgcccgtcttggcgctgtgagtaatcagttgtagctaaaaattgtatcatataccttgtactgaagaaaaggaactgatgtacaaaacatttctttagttgattctgcctgtacaagaaatgcaagtttgttctttgttttaacagg

SEQ ID NO: 14152 - DNA, 1490 bp, Oryza sativa
  ref <308>: DATABASE ACCESSION NUMBER: AK064777
  ref <309>: DATABASE ENTRY DATE: 2001-12-06
atggcgcaactgcatccacgaacaaaacggctgcctctctctccctccatctccctcgctggagtggagactcttcaaggccaaggagagtagcaggcagccagcacagcagcgagtgataaaaaagaggcagctcttggtcgttggtgtgcatgctcacgcgattcgcgtccaaaaatttatcaggaaacctttttcgagagtatcaatacatcttcgtgctagtgcgtgtgtgagagagagggaggcggccatgaccggaggggaggagcaggagaggaggctgtttggcgtgtcgctgacagacaggcccaggtggcagcagttcttgatctgctcatcggggttcttcttcggctaccttgtcaatggcatctgcgaggaatacgtctacaaccggcttcagttcagcttcggctggtacttcacatttgtgcaggggttcgtgtacttgggtctgattcgcctgcagggattcacggtgaagcagatggtgaacccgtggcggacgtacgtgcggctctcggctgtgctcatgggatcccatggcctcaccaagggttccctcgcattcctcaactaccccgcccaaattatgttcaaatccaccaaggttttgccagtgatgataatgggagcatttatacctggattaagaagaaaatatccgttccatgagtacatatcagcagtgatgcttgttatcggcctcatactattcacgctcgcggacgcacaatcatcacctaatttcagcatgattggtgtggccatggtttctggagcgcttgtcatggatgcatttctaggtaatctgcaagaagccatatttaagatgaaccctgacaccacacagatggagatgttgttctgctcaactgttgttggcctacctttcttggtggtgccaatggtgttaacaggggagctgatgcgggcgtggactgcatgttcccagcatatgtacgtgtacgccgtgctggtgttcgaggcgatggccacgttcgtcggccaggtctcggtgctctccctcatcgcgctcttcggcgccgcaacaacagctatggtgacgacggcgaggaaggcggtgaccctgctcctgtcgtacctgatattcaccaagccattgacggagcagcacgtcacagggctgctgctgatctccatgggcatcgtgctgaagctcctgctggagaacaaggagaacgtcccgcgcaggcaggtgaggaagacggtgcagcattgggacgacaagcagcgggagatcagagaagtagaagaggagaaagctcccttggtatgaccatttttttagttggcccaagcaaaggctgaacgaatcacaatacaccaattgcaggacaggatagaaaatgctcaaaaaagagtaacaacccctctccctctgtctctctcatgtaatgttttgctgttgtgagattgttttgtgggtctatgccaaaggattcgattgacgataattacagatt

SEQ ID NO: 14153 - DNA, 2084 bp, Oryza sativa
  ref <308>: DATABASE ACCESSION NUMBER: AK064778
  ref <309>: DATABASE ENTRY DATE: 2001-12-06
gaggaggagccgcacaagcgacgagattttcgcccccgcttcggattaaaaccctagccggctaaacctgctccgctcccccccgccgccgccggcgccgccgccaccaccactgccggagagagagagagctgcctgggaggagcagcctcggtgcgcgcgcgcgcgctaatcccctcctccactctccgtcgccgccgccgccgcagccatgatctgcgcaatctccggcgaggtgccggatgagccggtggtgtcgaagaagtccgggcttctcttcgagcggcggctcgtcgagcgctacatcgaggaccatgggaagtgcccagtcaccaaggaggagctcaccatggacgacatcgtggcggtgaagaccaacaaggttgtgaagcccagacaattgcaggctgcaagcattcccggactcctggggatgttccaaaatgagtgggatgctatcatgctttctagttttgctttggagcagcagcttcatacagcaagacaagaacttagtcatgcgctatatcagcatgatgctgcctgccgtgttatagctagattaaagaaagaacgagatgaagccagagcacttttggctcaagctgagagacagattcctgcatcgatggcaggagctgcacctacagctgttgtctccaacgggaaaagagcatttgaagatgaagttggaccagacgggaagaagattcgtcctggtatcaaccctgtgatgattgatgaactaacagagtgtaataccatgctctctgcgcatcgtaagaaacgacaggttcctccaactttggcatcaattgatgcaattgagagatatacccagatctccagtcatccacttcacaagacaaacaaaccaggcatcttatctatggatattcatccttcaaaggacattattgcaactggtggcattgatacaaacgcagtgctttttgacaggccatccggtcaaatcttgtgcacacttactggtcactcaaagaagataaccagtttgaaatttgttcctcgggatgagctctttgtaactggatcagcagataagactgttaaaatttggcaaggaagcgaggagggaaattacaattgcatccatacattgaaagatcacactgccgaggttgaagctgttacagtccatgcgactcagaagtactttgtgactgcttccaaggataatacttggtgcttctacgatattccatcaggatcttgcctcacacaggttggcgagtcttcaggacaagagggatatacatctgcatctttccacccagatggtcttatcctggggacagggaccactgaagctgttgtcaaaatttgggatgtgaagacgcagtcaaatgttgcaaagtttgaggggcatgttggaccagtgactgctatgtccttctctgaaaatggttacttccttgcgactgctgctctcgatggagtcaagctttgggatcttcgaaaattaagaaactttaggacgatatcaccttatgactcagacacgccaacaaattctgtggaatttgactttagcggaagttatctagctgttggtggttcagatacaagggtttaccaagtagcaaatgttaagcttgaatggaatcttgtcaagaccttaccagatttgtcaggcacagggaaagtgacaaacgtcaagtttggcaccgatgcgaagtacattgccgtaggttctatggatcgtaacctacggatatttgggcatccgggagaagatgatcaaatggacgacgcaaagccatcggaagagtgatgaaaccaattgtacttcatttggcctgcgtaaattgctccctgtttgtgtgttttgacggtggatgagctggctgagattggaggcacataacaacgggagacgagaagttccttgcaggagcaatttggtgggctttggtcgatgtaaacaaatttgacattgttattgtatttgtaggccttactacctaatgaggatacggtttgttttggagatgaatacaatgctgaagtgctcgacttgcggacatgccaatgaaatctagaatgtgtttaaatttgtggtt

SEQ ID NO: 14154 - DNA, 1479 bp, Oryza sativa
  ref <308>: DATABASE ACCESSION NUMBER: AK064779
  ref <309>: DATABASE ENTRY DATE: 2001-12-06
gagtgcagcacaaagccctcctccttccaccgcagctgcgctacctacctccaagagggctggtccgctggtcgtggagaaggaagagagatcttccaggctgatccctcctattgctttctccttcccgagcccgcttgaggatccccgccggagtagggattagggaggggagaacaggaggcggcgattcaccatgaaggcgctcattcttgttggaggcttcggcactcgccttcggcctttgacgctcagtttcccaaagcctcttgttgatttcgcgaacaagcccatgattctgcatcagattgaggccttgaaagaagttggagtaacagaagttgttttagccatcaactaccgaccggaggtaatgctcaatttcctgaaggactttgaggataagcttggcatcacaatcacgtgttcccaagagactgagcccttgggaactgctagccctcttgctctagcaagggacaagcttgtggatggatctggtgagccattctttgtcctcaacagtgacgtcataagtgaatacccttttgctgagctcataaaatttcacaagagccatggtggtgaggcaacgattatggtcaccaaggtggacgaaccatcaaaatatggtgttgtggttatggaggaggtcactggaatggtggaaaaatttgttgagaaaccaaaaatatttgtaggcaacaagatcaatgcgggaatttacttgttgaatccatctgtcctggaccgcatcgagctgaagccaacttcaattgagaaagaggtctttcctcgaattgcatctgatgcaaagctctttgctctggtccttccaggtttttggatggatgttggccaaccaagggattacattacaggcttgcgcctttatctggattcacttaggaagagatcaaccaacaggttagccactggagcacacattgttgggaatgtgctagttcacgagagtgccaagattggcgaaggctgtctgattggtcctgatgttgctatcggtcctggatgcgtcgtggaggatggtgtgaggctttcccgttgcacggtgatgcgtggcgtgcacattaagaagcatgcttgcatatcaaacagcattattggatggcactcaactgttggacaatgggcacggatagaaaatatgactatcctgggagaggacgtacatgtaggtgatgaggtctataccaacggcggtgttgttctcccgcacaaagagatcaagtcaagcatcctgaagcctgagattgtcatgtgaactaaccctccttttatgttatggtatactcaagttcttttaatgcagtatctttagtttatacctgtgatccttccaagatgttgacctagcatgtgtgttactcacattctgaaaactgcttctcaatgagaattcagtgtgccatatttgattgtaccttcatttggaccatccagtaaagttctcaaccctgc

SEQ ID NO: 14155 - DNA, 2410 bp, Oryza sativa
  ref <308>: DATABASE ACCESSION NUMBER: AK064780
  ref <309>: DATABASE ENTRY DATE: 2001-12-06
ggctctcaaaaccctctcctaaccctagccgccgccgcagccgcagccgcagccgcgcgtcgtctcctccgcccgcgagctcctcttcccgccggcgagagatcaggagcacgcaaggcgcgcggccatggcgtcggagaccgagacgttcgccttccaggccgagatcaaccagctgctgtccctcatcatcaacaccttctactccaacaaggagatcttcctccgcgagctcatctccaactcctccgatgcattggataagattaggttcgagagcctcacggacaagagcaagctcgatgcgcagccggagctgttcatccacattgtccccgacaaggctagcaacaccctgtcgatcatcgacagtggtgtcggcatgaccaagtcggacctcgtcaacaacctcggtaccatcgccaggtcggggaccaaggagttcatggaggcgctcgctgctggtgctgatgtgtccatgattgggcagtttggtgtcgggttctactccgcctaccttgttgctgagagggttgttgtgaccaccaagcacaacgacgacgagcagtatgtgtgggagtcacaggccggtgggtccttcactgttacacgtgatacctctggtgagcagcttggacggggtactaagatcaccctctacctcaaggatgatcagctggaataccttgaggaacgtcgcctcaaggatctggtgaagaagcattctgagttcatcagctaccctatctccttatggactgagaagacaaccgagaaggagatttctgatgatgaagacgaggaagagaagaaggatgctgaggagggaaaggttgaggatgttgatgaggagaaggaagagaaagagaagaaaaagaagaagatcaaggaagtctctcatgagtggaacgtgatgaacaagcagaaacctatttggttgaggaagccagaggagatcaccaaggaagagtatgctgctttctacaagagcttgacaaacgactgggaggaacatctggctgtcaagcacttctctgtggagggtcagcttgaattcaaggccatcctgtttgtaccaaagagagcgccatttgacctctttgacaccaggaagaagcaaaacaacatcaagctgtacgtacgccgggtgtttatcatggacaactgtgaggagttgatcccagagtggctcagctttgtcaagggcattgttgattctgaagaccttcccctcaacatctcacgtgagatgctccagcagaacaagatcctgaaggtgatccgcaagaaccttgtgaagaagtgcgtggagctcttctttgagatcgctgagaacaaggaagactacaacaagttctacgaggccttctccaagaatctcaagcttggcatccatgaggactccaccaacaggaccaagattgctgagctcctgaggtatcactccaccaagagtggtgatgagttgaccagcctcaaggactacgtaacccggatgaaggagggccagagtgagatctattacatcactggtgagagcaagaaggctgttgagaactcccccttccttgagaagctgaagaagaagggatatgaggtcctgtacatggttgatgccattgatgagtacgctgttggtcagcttaaggagtttgagggcaagaagctcgtctctgccaccaaggaaggtctgaagcttgatgagagtgaggacgagaagaagcggcaggaggaactcaaggagaagttcgagggtctgtgcaaggtgatcaaggaggtgctcggtgacaaggtggagaaggttgttgtctctgaccgtgtggtggactctccctgctgtctagtcactggggagtatggctggactgctaacatggagaggatcatgaaggcccaggctctgagggactccagcatggccggctacatgtcgagcaagaagaccatggagatcaacccggagaattccatcatggacgagctccgcaagcgtgccgatgctgacaagaacgacaagtctgtgaaggacctggtgatgctgctcttcgagactgccctcctgacctccggcttcagccttgaggacccaacaccttcggcaccaggatccaccggatgctcaagctcggcctgagcatcgacgaggacgagtctgctgaggctgacgccgacatgccgccgctggaggacgacgccggcgagagcaagatggaggaggtcgactaagcgccatggttgtcattcggcccccatctcctggagccctagttctctatagctttatctgactctgtgctcttcgccatttttgctatgctggatgtatcggtattgccgtatcttagcgcctgaacatttcgtggtatttgctcaaacagttacgttttaaatttaaatatgctagttaatt

SEQ ID NO: 14156 - DNA, 1022 bp, Oryza sativa
  ref <308>: DATABASE ACCESSION NUMBER: AK098843
  ref <309>: DATABASE ENTRY DATE: 2002-08-28
gcttgccgccgccaccgcctccccctccaccccccgcctcgccgtctcccgttcggaacaccaagctccagcgccccccctccggcgaaatggccccgaagcgaggcggcagggcgccggtgccggcgaagaagaagacggagaaggtgacgaacccgctgttcgagaagaggccgaagcagttcggaatcggcggcgcgctgccgcccaagaaggaccttcaccggttcgtcaagtggcccaaggtggtgcgcatccagcgccagcgccgcatcctcaagcagcgcctcaaggtgcccccggcgctcaaccagttcactcgcaccctcgacaagaacctcgcaactaatctgtttaagatgctcctcaagtaccgccctgaggacaaggctgctaagaaggagaggcttttgaagagggcccaggctgaggctgaaggtaaaaccgttgaggcaaagaaaccaattgttgtgaagtatggtcttaaccatgtcacatacctcattgagcagagcaaggcccaactggtcgtcattgctcatgatgtcgatccgattgagctggttgtgtggcttccagccctgtgcaggaagatggaggtcccttactgcattgtgaaaggaaaagcccgtcttggatcaattgttcacaagaaaactgcatctgtcctctgcttgaccactgtcaagaacgaggacaagcttgagttcagcaagatcctggaggctatcaaggcgaacttcaacgacaaattcgatgaggttaggaagaagtggggaggcggcgtcatgggaaccaagtcgcaggcgaagaccaaggccagggaaaagctgctcgcaaggaggctgcccagcggatgacctaaattatagctcctgtagtttcatttttcagtcagattttgacgaggaactcgaattagcactgtacaaccgtgctgtggttttctgagtcttggtttcatatcttctctgttcaccggaccatgttgggatactatgcaattagtacaaccgtgcttc

SEQ ID NO: 14157 - DNA, 1842 bp, Oryza sativa
  ref <308>: DATABASE ACCESSION NUMBER: AK064781
  ref <309>: DATABASE ENTRY DATE: 2001-12-06
ggtaagcttatcaaaaaaaaaagaaaaaaaagaagtgaagaagacggaacggtggggctgtcgaagcatccgcgtcctccgggctccggcgactccgcggccgcgatctcttcggctctccccgccggagacggccaccgcgtcgcctcccccttcaaccgcctcgatcccttcctgttctttcggtattttggtgtagtttgcactggtttctggatttcttgacaaaatggtgaagctgacaatgatagcacgtgttactgatggccttccactggcagaagggttggatgatggacgggatcagaaggacgctgacttttacaagcagcaagctaaacttctattcaaaaacttatcaaaggggcaacatgaagcctcgcggatgtcaattgagactgggccatactattttcagtatccttatgttctctgtggctattttattctgggtattgttcatgactgttgaatttgtttctgttcttttgcagtccgtgtgatatagcatatctggctgctaaatattgacatctgaatgtgcacagtcattcggatatttttttttatcaagttcacacgttgcatctcattacatttctttgctggtaatgaagatttcaaatatgctggatagttgtatagctacacaggtaaacaagaaaatgggtaggcatttgatgaatctatgtgattggtccaaattatcaatcatgactgtacaatagctagtctatatattctctagtatttctctattttctatagcattcacttaatttttaggatcttacaacttgcaagcacatggtacttatttgatgctcttgttgatcttgctattaatatttgagtccatttatcattactaactttaagatcataagcttatttaacctgagacttacatcgtgttctgttgagaaaaggcagcactcagcacccagctaatgttgttcttgtaatgcatgttttagcttgtattggtttgctaagtttattgcagtgtgatcttgttgaaccttaattcaaataaacagttacatcattgaggggcgagtatgctatctgactatgtgtgaccgttcttatccaaagaaactcgcattccagtacctagaagatctgagaaatgaattcgaaagagtcaacggcagtcaaatcgaaacagctgcaaggccgtatgcgtttattaagtttgaacccagaggaatcttgcgaaattaaatgatgagctctatgaggtgcatcaaattatgactcgtaatgttcaagaagttcttggtgtcggtgaaaagctagaccaggtcactgaaatgtcagctaggctgacttctgacacaagaatctatgcagataaggctaaggatctcaatcgccaggccttgattcggaagtatgcccctgttgccattgtgatcggtgtagttttgatgctcttttggttgaagaacaagatatggtaactgcactaaactaaggaagctgggcctgcattaccacactggtgcaagaaaaaccgaaaatttaggtagattctggatcaagagatatcaagagatgctttggtgacttgtatcccgtatctgcccattcaagcgactacttcagctgcctttcaccctcctcccgacaagctattcaagccaattcgttgtagcatacagtagaccttataacggaactcggacttgattttgtgaacccttggaaccgtatatacaagagctctgtagagttgaatttttttatattgggatgatattgcattttattttgcaaactcatgtaagaattcaggctgaatatcctatattacaatatctctgctgcatgtgactc

SEQ ID NO: 14158 - DNA, 3413 bp, Oryza sativa
  ref <308>: DATABASE ACCESSION NUMBER: AK064782
  ref <309>: DATABASE ENTRY DATE: 2001-12-06
ggcacgccgccttcctcccagatccaaacctccctcgtcgtctccccttcccctcctcctcctcgacccccacggcggcggcgccaccggactccggcgaaccctcgcgcgcgcgcgcacgcaccgagacgtaccgtaccggcgacatgaatccctacgacctccgctacgccgacccttcctcctaccgcgacaggcgcagcgaccttgccggggctcccgtgctcgccgcgtcggcccccgcggccgccaacccctacgccgccgcgtacgcgcccgcgccggctgctcccgtggcccccgctggtggcgacttctcgcgcttcggcgggagaggccgtggtggaggcgcgggcggcggtgggtggggtagaggtggtggtggtggtggtggcgctggcggataccgaggcggcggtgggagaggaggtggaagggacgcgctggactcgctctccttgccgaagcctgacttccggagccttatacccttcgagaagaacttctatgtggagtgccccgccgtgcaggccatgtcagacatggatgtgtcgcagtatcgtcgccagcgtgatatcactgttgaaggccacgacgtgcccaagccggttcgctacttccaggaggccaacttcccagattactgtatgcaagcaatagccaagagtggattcgtagagcccacgcctattcagtcacaaggttggccaatggctttgaagggcagggacatgatcggtatcgcacaaactggctctgggaaaacactatcttaccttctccctgggttggttcatgttggtgcacagcctcgactagaacaaggtgatggcccaattgttctgatccttgctcctacaagagaactggctgttcaaatacaacaagaatctggcaaatttggatcatactcaagaactagaagcacttgtatctatggtggagcacctaagggaccacaaatacgtgaccttaggagaggggttgagattgtcattgcaacacctggtcggttgatcgatatgctggaaggtggtcacactaacctgcgaagagtaacatacctcgtcctggatgaggctgaccgcatgcttgacatgggttttgagccccagattcgtaaaatagtggcacagatccggccagacaggcaaaccttgtattggagtgccacttggccaagagaagtagaatccttggctagacaatttctgcagaacccatacaaggtaatcataggatcacctgatctgaaagctaatcattccatacagcaaattattgaggtcatatctgaacacgaaaagtatcccagactcagtaaacttttatctgatctaatggatggaagcagaatcttgatatttttccaaactaaaaaggactgtgacaaggtcactcgtcaacttagaatggatggatggccagcattatctattcatggtgacaaagctcaagcagaaagggactatgttctggcagagttcaagagtgggaaaagtcctataatggctgccacagatgtagcggcacgtggtcttggtatggtgacttgtttgaaaattagaattaggttgtagttccaagtgctcaaggatgataagtcggagggctgtcagctgtttttggttgagtgaactgaacttgtggattgatggtgtatgcaaggtgccatcatgtcagaggtagatcgtcttttctcctgtttatttccctcgagagtaagcgatggcagtgttaccagggcacttcaacctaatgttgacatttagtcttggttaggaattatttgaaaattacttggcttttggtctttcactcttaggggaacttatcttcaggtagaaatatagaatcgatgagagtctatggccattatcattagcactattttttttttcatctgttgacctctaaatttgttttgtatttttatgtttgaaaatttagagctctaggtgctttcgctttcaggcctgttaattttcctgcgctaaaattcatatggttatatgaatctattctctcctcaaggaattactttcttttgcatctttagttatttattattcatgtgttacttagttccctttttgctgtggacttgtgatctcgtagatctatgtgtggcttaacaacaatttcagctcgcatgcatgcatacatgaaaatgtctactaattattatttgtctaagtcactagtgtaaattcaactaaatttacaaatgaagtaatttagaagtgtggatctcgctgttatgctttcccttgttttccatgaatttttagaagtttatatgctgctattttaaacgtgtgccctggtcttatcactgccaactggtcccaagatgtttgtagagctattgcctactactgtattgttcttgacagtgtgaagtgtgatcctcatattgacctctgatgcagcaccttaagcattgcagcctgtgttggaattggttacagattttcattgggttcatttggatagttatggatactggtatgttattggataactttcagtattgtgagttaaggctgacagatcaatcaccatcatatccacatccaacagttattgatgcccagttcagtttttcagccccttcgacttgtattagttgtagaacttgaaagtgcatccatgggcagtttttgttcttcggctctggttcaagccatgcgctgacttctatggagatcgacaatgttgatatcccagtttggtctgctgtggtcttcagggcaaaagtattatcttgattacatactcatcattttcttgttatttttgcagatgtcaaggatattaagtgtgtgataaattttgattttccaacaactcttgaagattatattcacagaataggtcgaactggccgcgctggtgctagtggaactgcattcacctttttcacactctccaatgcaaaattctccaggaatcttgttaagatcttgagggaagctggccaggttgtgaatccagcgctagaatctatggctaaatctgccagttctatgggaggaggcaatttccggtcaagggggcgtggtgggtttggtaacagatctggctcaaatagcattcccataagaggaagaaggccatactgagggcggcaaaaagattaaaacttttactgtataccgataggtattaaatgcattctttggtaaatttcctttgagattccctcgactgcttgattgacataagtcaattttcattgattggaggtggaacatgtcacacgaatggccaaatatacttatccaacagcgtaggatatgtgttccaagtttagcttcgacttggagaatggtttgtccagtgttattttgactattgaggcaacgtcctcgtgcggtactggttattgtttactattgttgggttacttg

SEQ ID NO: 14159 - DNA, 2014 bp, Oryza sativa
  ref <308>: DATABASE ACCESSION NUMBER: AK064783
  ref <309>: DATABASE ENTRY DATE: 2001-12-06
ggcggcgatccaagaacaatccatccatccgattcgccgttcgtccgagttggcattcctccatctcttctcctcttcttgcgcagcgcgccattgctgcagtcacagatctctctctagtcccaccattttctttcttgggtgaggagaagggagggggagggatgaaggagatagtggttgggtcggtggcggcggcggcggcggtggggaggtggggagcggcgccgccgcaggcgatgctggagaggatgaaggattacgggcaggagggcgcgttcgcgctctgggacgagctctcgcccgaggaccgggagctgctcgtcagggacatcgagagcctggatctttcaaggattgatcggatcatccggcgctcccttggatcacaaggattcactttgcccaccgtcgagccggtgccggagtccagcgtgtccaaggtggaggagaggttgccggaggacaaagaacggtggtggaagaaggggctgaaggccatttcggaggggaagctagccgtcgtccttttagccggtggtcaggggactcggcttggtagctctgatcctaaaggatgtttcagtatcggacttccgtctggaaagtcgcttttccaactccaagctgaacggattttgtgtgttcaaaagcttgctgctcaatcaagtccaaataacaccgtacctattcattggtatataatgaccagccccttcaccgatgacatcactcgcaaattcttcgaaagccgtaaatactttggcttagaggcagaccaagtgacatttttccaacaaggcacccttccatgtgtttctgctgatggcagatttattatggagacaccatacaaggtagcaaaggctcctgatggcaatggtggagtttatgctgccctcaagtccagaaggttgctggaagatatgtcttcacggggtgtaaagtatgtagattgctacggggttgacaatgcactggtccgcgttgctgatccgacgttcctaggttacttcatagacaaagctgtatcttctgctgcaaaggttgttaggaaggcttacccacaagagaatgttggagtatttgttcgacgaggacgtggtggacctctctctgtagttgagtatagtgaaatggacgcagctatggctactgaaattaatcagtcaacgggacgccttcgttattgttggagcaatatttgcttgcatatgttcactttggattttttgaatcaagtagcaaacagccttgagaaggacagtacttatcatcttgctgagaagaagatcccttccatccatgggtacgcaatgggcttgaagcttgaacagtatatattcgacgcgttcagttactccccatccacagcactttttgaggttttgcgggaggaggaatttgcgcctgtaaagaatgcgaatggcgcgtcttatgatacccctgatagcgcaaagctgatgctgcttcgtctccatagtagatgggtagttgctgctggtggcttcttgacccattctgtcccattgtacatgacaggtgtggaagtttctccacttagctcctatgctggagaaaacttggaagccatttgccgcggacggacattccatgcgccgagtgagatttccttctaggtgacctgtgacacaaacagctctgtaacttcaaatttgtggaacagtggcagagaaaggattgcaggatttcatctcaaacagaaaaaaaaaaaaagatcacagggtttccattttccctatgtcatgggatgaatggatgctgtacagttcagtgagctcctcagatattggccgggttgttttatgttgtgtcatctgtgagtattgtaatgtagcccccaaaattctaaggccatcttgattttcacacaaaaacatttgtgtggcagtgccattttggtttctcctgtagtcctgtgttgctcccatgtaatctgtagatgttttttcccccttcaaaacaatatagatctttgaatgcccatgatttc

SEQ ID NO: 14160 - DNA, 987 bp, Oryza sativa
  ref <308>: DATABASE ACCESSION NUMBER: AK064784
  ref <309>: DATABASE ENTRY DATE: 2001-12-06
gagtagcatagcagcggaagaactcaagcggagtgggcgaagaagcaaagcccgatggatcaacaccaggtggtcggcgagaattatgcaaatccaaagacatgtttcttccatgtcctcttcaaggcaggggcattggcgttctacatactgtctgcgctgttcgtgaccaactttgttattatctttgtcatcaccgtgctcctggcagcacttgacttctgggtggtcaagaacgtcagtgggaggatattggttgggctgcgctggtggaatgagatcgatgatgagggcaatagcgtgtggaagtttgagtgccttgatggagagtctcttgctaggatgaacaagaaggactcatggctgttctggtggactctgtacttgactgctgctgcatggattgttcttgggatattctcactcatcagacttcatgctgattaccttcttgttgttggagtttgcttgagtctcagcatagcaaacattgttggcttcaccaagtgcaacaaagatgccaagaaaaacgttgcagattggactagaactacgctcctatcatctggtgtcaggtcaacaattcagtcagcattcggtgtctaaatagaggcgccctaatgtcacatacagtggtgtgcaatttatgaatcagatgatgcattctgcttttgtttactttgcctagttgcttattgaccctatacatctttgtgtcccctgatatccttggtattgtttgattcactgtgacaaaagattgagggtcaagataggcacactactcaacctacaagttcttgatgttctttgtattttttagccttgtcactggtgacactgtatagcagctgaactggaaaacgttctacttgggatagattgtagtgtacagctaacatcttgaaacattatcatagtactgcatggagtttgtcttgtcgaacttttaaccatgaggcaaaagcaatggatgttgatgttgtg

SEQ ID NO: 14161 - DNA, 2110 bp, Oryza sativa
  ref <308>: DATABASE ACCESSION NUMBER: AK064785
  ref <309>: DATABASE ENTRY DATE: 2001-12-06
ggccatataccacacctaagctagacagacagcaacaagaaagcagagagacagaggtagagaggcttagagagctattgacgtgcaattcttgtgcgcgttcgcggcaatggatgtggagagctgcgcgtcgtcgtcgccgccgccggatgccgccgtcgactggcgcggccggccgtgcgagccgcgccgccacggcggcatgcgcgccgccgtcttcgtgctagggatccaggcgttcgagatcatggcgatcgcggcggtggggaacaacctgataacgtacgtgttcggggagatgcacttcccgctgtcgcaggcggccaacgtggtgaccaacttcgtcggcaccatcttcctactctccctcctcggcggattcctctccgactcctacctcggctgcttctggaccatgctcatcttcggcttcgtcgagctctcgggtttcatacttctgtcggtgcaagctcacctgccgcagctgaagccgccgccgtgcaacatggcggccacggacggcggctgcgagcaggcaaggggcatcaaggcgagcatcttcttcgccgcgctctacctcgtggcgctcggcagcggctgcctcaagcccaacatgatcgcgcacggcgccgaccagttcgcggccgcggccggcggcggcggcgccgccgcggcggacaatgccaagaggctctcgacctacttcaattcggcctacttcagcttctgcgccggcgagctcgtcgcgctgacggcgctggtctgggtgcagacgcactccgggatggacgtcgggttcggcatctccgccgccgccatggcggccgggctcgtcagcctcgtctccggcgccgccttctaccggaacaagcctcctcagggcagcatcttcacgcccattgcaagggtgtttgttgccgcctacaccaagaggaagcaaatctgcccttccagctcctccgatcccgtcaatgccggcgtttgcgagcctgcgcacctcgccggcggcagcttccgccacgccagcaagttcaggttcttggacaaggcgtgcatcagggcggcggagcaggggccgaacacgaagccggagagcccgtggcggctgtgcacggcggccgaggtgcggcaggccaagacgctcctcgccgtggcgcccatcttcgcgtgcaccatcgtcttcaacaccgtgctggcgcagctgcagacgttctcggtgcagcaggggagcgccatggacaccgcgctcggcggcgccggctcctcgttccgcatcccgccggcgtcgctgcaggccatcccctacgccatgctgctggcgctcgtcccggcgtacgagctcctcctcgtcccgctcatgaggcgcgccacaggggcgcggtccgggatcaccccgctccagcggatcggcgtgggcctctgcaccgtgccgctctccatggtcgccgccgccaccgtcgagcacaggcgccgcgacctgtccctgtccgccggcggcgcgccgccgcgggcgatgtccgtgctgtggatcgtgccgcagttcctcgtgttcggcgtgtcggagatgttcaccgccgtggggctcatcgagttcttctacaagcaggcgcgcggcgccggcatgcagtccttcctcacggcgctcacctactgctcctacgccttcggcttctacctcagctcggtgctcgtgtcgctcgtgaaccgtgtcacggcgagccgcggcggcggcggccatggcgggtggctcggcgacaacgacctggacaaggacaggctggacctcttctactggatgctcgccgtgctcagcgtgatcaacttcttctgctacctgctctgcgcgaggtggtacaactccggcggcgccgacgacggctgcgacgcctccgcctccgctcaggtcgccgccgaaggcgacggcaacggcaaggagatcatctgaagaaaaaaaaacatagaattataattctatgcgactgaaaactgtatatgcgtatagctgtaatgtatgtatgtatgtatgtatgtatgtatgtatgtatgtatgtatgtatacatgcacgaggaatagtggcaagaaatgaagaaaatgagtaatgttaggttg

SEQ ID NO: 14162 - DNA, 1318 bp, Oryza sativa
  ref <308>: DATABASE ACCESSION NUMBER: AK064786
  ref <309>: DATABASE ENTRY DATE: 2001-12-06
gattgctgtggtggttgccttggctgctttggagagttgggaggagcagcgagagagtgggggttgatggcggcgatggcggcggccgtggcctcgtccccctccccctcccccgcctccacccgcctcctccgcggccaccacccgcccccgtcgtgctcggcgccgtcgctgctccgcctgaccaggtcgtcgcggaggctacggctgcgcgccgcggcggcggcggaggaggccgacgtgctccccgggcctggggccgagggggagatggcgacgggcgggaggctggaggagcaacccgaggggccgatcgggggcagccaggtcgacatcggcgggctcgccttccagggcgacatgggcggaggagggttcgccggcgggagcgggggcgccggggccggcggcggggacggcaacaagatgctcgaccgcggcatcaacacggccatcgtgctcggcgccagcacctacgccctcaccaagctcctcaccgtcgaccacgactactggcatggatggacgatctttgagatcttgcggtacatgcccgagcacaactggtcggcttacgaggaggccctcaagaccaacccggtgcttgccaagatgatgattagtggcgtcgtctactccctcggcgactggattgcgcagtgctacgaaggcaagccgatcttcgagttcgaccgtgctcggatgttccggtctggcctcgtcgggttcacgcttcacgggtccctttcacattactactaccatttctgcgaggcactgtttccattcaaggattggtgggttgttcccgcaaaggttgtgttcgatcagacggcctggtctgcgatatggaacagtatctacttcgtggtcttggggttccttcgtttggaatcaccggccactatttccagtgagctcaaatccacgttttggcccatgcttactgccggctggaagttgtggccttttgcacacttggttacatatggcctagttcctgttgaacaaagacttctgtgggttgactgcgtggagttaatctgggttacaatactgtcaacttactccaacgagaaatctgaagcaaggaactccgaggacgcatccacatcaaatgcttccaatgacaattcaatatagcgaacggtatagccagccaagctgccctttaccttcatcattttgggcttgtatatattgtacaatttgtagctgcagctctgcaggtgtaacctttttgcaaagataaattaaacatataagatgtgtagcaactgccaaaggcaatcagaacgaaattaccttgcactggatc

SEQ ID NO: 14163 - DNA, 520 bp, Oryza sativa
  ref <308>: DATABASE ACCESSION NUMBER: AK064787
  ref <309>: DATABASE ENTRY DATE: 2001-12-06
gaaagcattagagagggagtgccacagtgtcaccgtgctagccatggagtccggtctccttgcacattccgacgagccatgcgacgccggctccaagcccgacgccgacgccgacggccgccgcggcgggtggcgcgccgcgcgcttcctcatcgccgtcgggttcctggagcgcgtcgggttcaacggcgtgcagagcaacctggtgatgtacctggccgggccgatgggcatgtcgacggcggcggccgccgccggcgcgaacgcgtgggccgggacggtgctggtgctgacgctcgtcggcgcgcttgccgccgactcgcgcctcgggcggtaccgggccatcgtggccgccggcgtgctccacctgctggttagttagttctccttgctttccttgcccctgtagctgtaactgtaattaagcccgaggttccctggatgttctcgggagctagcactgtccgtgctagtgaatttgttagctaccaatacttgcgattactattttttttatacg

SEQ ID NO: 14164 - DNA, 1524 bp, Oryza sativa
  ref <308>: DATABASE ACCESSION NUMBER: AK064788
  ref <309>: DATABASE ENTRY DATE: 2001-12-06
gaggcgatcccctcgcgcagctctcactctctccaccgccgccgccttcgccttcgccttcgccttcgccgccgcaactctccctccgccggagtcggcgtcggcgtccgccgcaagcaagctgagcgatcatgtcttctatggaatcatcgtacctccctgcaaccactgagtcaatagcgaaggctcaggaagctaaagatgcttcggagtccatttcaatcctttaccgtgttctacaagacccgtcatcttctgcagaggctctgagaaccaaggaacttgcaattacaaatcttaccaactacctcactaaagagaaccgggctgaggagctgcgaaaccttctaacccagctcaggccttttttctcgttgattcccaaggcaaagactgcaaaaattgtccgtggaatcatcgatgctgttgccaagataccaggaacatctgaacttcagatctcactctgcaaggagatggttgaatggacccgtgctgagaagcggacattcctcaggcagcgtgtggaggcaaggctagcagcccttctgttagagaatcaggagtacactgaagcgcttactctccttactggtcttatcaaggaagtcaggaggcttgatgacaagttgcttcttgtggacattgaccttctggagagtaaactccacttttctctgagaaacctgccaaaggccaaagcttcattgactgctgctagaacagcagcgaatgccatttatgttccaccagcacagcagggtactattgatctgcagagtggaatccttcatgctgaagaaaaggactacaagactgcatacagctacttttttgaagcatttgaagcattcagtgccctagaagacccaaaggcgatcttcagcttgaagtacatgctcctgtgcaagattatggttaaccaagctgatgatgtcgcaggaataatctcatctaaggctggtttgaagtatctgggtcctgatgttgatgctatgaaagctgttgctgatgcctactcaaaaagatctctcaagtactttgaaactgcccttcgtgattacaagtctcaactggaggaggaccctattgtgcacaggcatctttcatctctgtatgataccctcctggagcagaacctgtgcaggctgattgagccctactcaagggtggagattgcacatattgcggagatgattgagttgccagttgatcatgttgagaagaagctgtcgcagatgatccttgacaagaagtttgcaggaactctggatcaaggtgctggctgcctcattatctttgaggatcccaagaccgaggcaatcttccctgctacacttgaaactatttcaaatgttgggaaggtcgtcgacagtctttacatgaggtctgccaagatcatggcttaaatgccaaaatgtctttacagtcatgtgctagttatgttggctattatttcatattgcttcagttcccgttggtctccacagacatttaatcctgcatattgacattttgttctgc

SEQ ID NO: 14165 - DNA, 1902 bp, Oryza sativa
  ref <308>: DATABASE ACCESSION NUMBER: AK098844
  ref <309>: DATABASE ENTRY DATE: 2002-08-28
gagcacaaacccaatcccatccaccaaccacctcgccgccgtcgccgccgccgcagccatgggcgtctccgccctgctgctcctcctcctcgccgcggccgccaccgccgcgccgccggagcagcccgcattgtccgctactccctcctccgccgccgccgccaacaacagcagcggtggtggtggtggtgcggcgagcaacggggtgaactcgaactcggtgctggtggcgctgctggactcgcactacacggagctggccgagctggtggagaaggcgctgctgctgcagacgctggaggacgccgtcgggaaggggaacgtcaccatcttcgcgccgcggaacgaggcgctcgagcgcgacctcgacccggagtttcgccgcttcctcctcgagccccgcaacctccgctcgctgcagcggctcctcctcttccacgtcctccccgcccgcctccacgcctccgactcctcctcccccgacttcccctcctcccaccccaccctctccggcgagcgcgtcgacctctccgcctcgccgatgcgggtcggcgccgcggcggtcacgcggcccgacgcggtggtgcgccccgacggcgtcatccacgggatcgagcggctgctggtcccgcgctccgtgcaggaggatttcaaccgccgccgcagcctcgccgcgatctcggcggtgctcccgacgggggcgcccgaggtggatccgaggacgcaccgcctcaagaagcccgcgccgcccgtcccccccggcgcgccgccggtgctgccgatctgggacgcgatggcgccgggcccatccatcgcgccggcccccgcgccggggcccgggtccgggaaacaccacttcgacgggcacagccaggtgaaggacttcatccagacgctcctcctctacggcggctacaacgagctcgccgacatcctcgtcaacctcacctcgctcgccaccgagatgggccgcctcgtctccgaggggtacgtgctcaccgtgctggcgcccaacgacgaggccatggcgcggctcaccaccgaccagctcagcgagccggggtcgccggagaacatcctctactaccacatgatcccggagtaccagacggaggagagcatgtacaacgcggtgcgccgcttcgggaaggtgaggtacgacacgctgcggctgcccaacaaggtgacggcgagggaggccgacgggtcggtcaagttcggccatggcgagggctccgcctacctgttcgacccggacatctacaccgacgggaggatctccgtgcagggcatcgacgccgtgctcttccctcccaaggacaccgccaccggcggcgaaggctcaggctccggctcgtcgggcgccgctcccgccaggaaggcccccgccgtcaccgcccactccaagtccaagctccgacgagggaagttgttggaaggggcatgccaagtgatgggcttcctaggccgaagatcgcgattcgcgagctgccaatagactacgacaatggcttgatggacaaatatgtatatctgccactgctttttgctcaactcatgacgctgaaacatgaaccgaaatgaaggctacagatgatgattggttggatggatgaatggacgaacaaattgatgatggttttacataagcttaattaagaggaagaaataaggtgtcatgagaacgagttgagagagacggatggcagacattctggttggttgttggaggtggaaaaaaaaaaggatggaaatttgtttatactggtcagtgaagatcaaacaccgatgtatagcaattaaacttttctatttttttatttgttttattttattttgttgatgatgatgttcagcgctttttgataatgaggaatgccaaaaacaaaaattgcagtgtcc

SEQ ID NO: 14166 - DNA, 929 bp, Oryza sativa
  ref <308>: DATABASE ACCESSION NUMBER: AK064789
  ref <309>: DATABASE ENTRY DATE: 2001-12-06
ggctccccccttcctcctctgcacctcacctctcctctcatggagttcgcctagttgtgtgctctgctcctccttgaagaagccttcagatctgtggttcctagcctttctcagcttcctcaacacagccgtccagatggcgtccctgacacccgaagctgaagctcccggaggaggagccctgctcgccgccggcgacgacgtcaccgccgcgaatctgctcgccgccgccgtagccaccgagggtcctgtatttgatatgcctgacttcaagatgggtgggaagaagagtgatgatgctgctcccactgatgccggggatgaagatggtggtgatgatgacggggacgaggatggtgactttggggaaggcgaagaggacgtttcagaaggtgagggatatgataatccaaaaggcatcgataacaacaagaaaagaggtgagcctgaggaaaatggtgaggaggatgaggaagagcctgaaggccaggagggtggtggaggtgatgacgacgatgacgatgatgatgacaatgaggatgacgacgacgatgatgatggtggtgaagatgatgatggagtagatgaggaagaggaagatcaggacaatgaggatgatgaggaagatgatgatgaagactcacttcagcccccaaagaagaggaagaagtgaatatcttcatgcggctatagttaccaacttaccatgcgctgagctgtgcttggttttcgtcatgttctcggaatcgaacttgcattagggagttaagaaaaaagggctccacacgttcagtaagtgtggatttgtaggagctttatgatttcaagcaattagacagaactctgttgtcattgttgcttgcttctgtggagttgaacagatgtttcgctagcataattcgacctgaatggtgaaagcctgaagattg

SEQ ID NO: 14167 - DNA, 2309 bp, Oryza sativa
  ref <308>: DATABASE ACCESSION NUMBER: AK064790
  ref <309>: DATABASE ENTRY DATE: 2001-12-06
gaccggacaagccaagcgcgcggcgcgtccacacacatttgcatagccacagccaagaagcgacgcgatggtgacggcggagtcgggcgtcgccggcggcggccgtggcgcggcggcgctgctgcaggaggtggcgacggcgcggttcgcgcggcaggtggtgctggggcggtggttcatggtgttcgcgtgcctgctgatcctgtcggcgtcgggggcgacgtacatcttcgggatctactccaaggtgctcaagtcgtcgctgggctacgaccagcggacgctgaacacgctctccttcttcaaggacctcggcgccaacgtcggcgtcatctccggcctcatcaacgaggtgacgccgccgtgggtggtgctcgccatgggcgccgccatgaacctcgcgggctacctcatgatctacctcgccatcgacggccgcacggcgcggccccccgtgtggctcatgtgcatctacatctgcgtcggcgccaactcgcagtcgttcgccaacaccggcgcgctcgtcacctgcgtcaagaacttcccggagagccggggcatcgtgctcggcttgctcaaggggttcgtcggcctcagcggcgccatcttcacgcagctctacgtcgccatctatggcgacgacgccaagtcgctggtgctgctcatcgcgtggctccccgccgccatctccatcctgttcgtccacaccgtccgcatcatgccgtacctccccagccgccgccgccgcgccgacggcgagctcgaggcctccgccgccaccagcaacgacgccttcttctgcttcctctacatctccatcgcgctcgccacctacctgctcaccatgatcgtggtgcagaaccagaccaacttctcgcacaccgcctacgtcgtgtcggccaccgcgctcctcctcgtcctcttcctcccgctcgtcgtcgtcatcaagcaggagtaccagatcaagaaggagctcgacgactccctccgtgagccccccacggtgaccatcgaaaagccagccgccgccgccatgcaaatgtcagcgatcaccaccaagcccaaaaccgagacaccgtcgtcgtcgtctccggcgccggcgccgccgtcttgctgcctcggttcttgcctgaagcacatgttcaacccgccagcgcagggggaggactacaccatcctgcaggcgctggtgagcgtggacatgctggtgctgttcctcgccaccatttgcggcgtcggcggcacgctgacggcgatcgacaacatggggcagatcgggcagtcgctggggtacccggcgaagagcatcaagacgttcatctcgctcatcagcatttggaactacgcgggccgcgtcacctcgggcttcgcgtcggagatgttcctcgcccgctacaggttcccgcgaccgctgatgctcacggcggtgctcctcctcgcctgcgtcggccacctcctcatcgcgttcggcgtcgcgcagtctctctacgccgcctccgtcatcatcggcttctgcttcggggcgcagtggccgctcctcttcgccatcatctccgaggtgttcggcctcaagtactactccacgctctacaacttcggctccgtggcgagccccgtcggcgcctacgtcctcaacgtccgcgtcgccggctacctctacgacgtcgaggcggccaggcagcacggcggctcgctcgccggcggcgacaagacctgcctcggcgtgcagtgcttcaggaaggccttcctcatcatcaccgccgccaccgtcgccggcgcgctcatctccctcgtgctcgtctggaggacaaggaacttctacaagggggacatctacgccaagttccgcgagaacaccgccaccggcgaagctaccaccaacggtaactccgccgatacagcggcggaaaaaaggtcaaccttagtcaatgacgaggacagtaaaaaggggtagtaatgtagtttactgatataaagattactacaccaaaagacaagagcttgttacttcttattagcagaaaagtcaaaaaatggtaggcttgctgctaatataagtttccagatatctgtaaaaaattttggggctaaaaagaaagaatctactactagtggagtaaacaagattaggcagcagctctgtgcttgtacccattacaagcaacagtaagctgcaagctagagtaaaatactgtcactgtaagaagttgggtgattaaggccctgtttagatgggactaaaagttttaagtccctatcacatcggatgtttgaaaattaattataaatattaaacgtagactattaat

SEQ ID NO: 14168 - DNA, 1251 bp, Oryza sativa
  ref <308>: DATABASE ACCESSION NUMBER: AK098845
  ref <309>: DATABASE ENTRY DATE: 2002-08-28
gctccttcctccgctcgccgtcttctcgacgacgacccgcggccaccgccgcgccgccctcctcgccgccgccgccgccgccgtctccgcagaatctgatcgatggcgccgtcgtcgacgtcgtcggagggtgcctccgacgagtggttgccacccagccggcggccggagctggcggacgtggtccccgtgacgcaggacgacgggccccaccccgtggtggccatcgcctaccgggacgagttccgcgaggtcatggactacttccgcgccctctacttcgccggcgagcgcagcgtccgcgccctccacctcaccgccgaggtcatcgaccttaatcccggcaactacacggtgtggcattttaggcgtcttgttctagaggcactggatgctgatctgcgtgaggaaatggattttgtggaccgaattgctgaatgtaacccaaaaaattatcaaatctggcatcacaagagatggcttgcggagaaattaggaccagatattgcaaataaagagcacgaatttacaaggaagatactttctatggatgctaaaaattaccatgcttggtctcataggcagtgggttcttcaagcactgggtggatgggagactgaactacagtattgcaaccagctgcttgaggaagacgtcttcaataattcagcttggaatcagagataccttgtaataacaagttcaccacttcttggaggccttgcagcaatgcgtgactcggaagtggattacacagttggggctattctggctaaccctcagaatgaaagcccctggagatacctcaaaggcctgtacaagggtgaaaataacttgctgatggctgatgagcgcatctctgatgtttgtctcaaggtcctgaaacatgattcgacctgcgtatttgctttgagcttgctgctcgatcttcttcaaattggtttacaaccttcagatgaactcaaaggaactatcgaagcaataaagaactctgatcctgaagcagatgaagcagtagatgctgatcttgcgactgcaatctgctcaatattgcagagatgtgatcccctgcggataaattactggtcctggtacaggaccactatttcttctcaaacctgaagcatgcagtggcctccatgaggtcataatggagatatcttctatcttcgtgtgattctgggcgttgaggtgcctagctacatttgttatgaactttccttgggcataactgatcactgatattactcc

SEQ ID NO: 14169 - DNA, 2402 bp, Oryza sativa
  ref <308>: DATABASE ACCESSION NUMBER: AK064791
  ref <309>: DATABASE ENTRY DATE: 2001-12-06
gaccctctccagatctcccctccgcctcgtctcgtctcgtctcggtctctctctctattaaggagcaagcaaagcggccactccggctcagatctccgcgcgtgcatcccaccacccccaaaccctcgcgcgcgcgctctctctcctcgtcaacgcgcgcgcccccgcccccgccccgacgagagcgatggcctcgccggcagcggcggcccccgcggcgctgctcgtccttctcgccgcggccctcgcggcgaccggcgtcgtcgccgacggctccgaccaccgctacaaggccaacgagctcgtcccgctctacgccaacaaggtcggccccttccacaaccccagtgagacgtatcggtactttgacctgcctttctgctctccagagaaagtgaaggagaagagcgaggcactcggtgaggtcctcaatggggaccggttggttgatgcaccttacaagcttgatttccgtgtggattatgactccaagccggtttgctcgaagaagctcaccaaggaggaggtggccaagtttcggaatgcggtagcaaaggactactacttccagatgtactacgatgacctcccactgtggggattcattggtaaggtggagaagggaggcaagacagatccgaaagagtggaagtattacctgtacaggcacatcatctttgacatcctctacaacaatgaccgggttattgagatcaatgtgcacactgaccagagtgcactagttgacctgactgaggacaaggaagctgatgttcaattcctttactcagtcaagtggaaggagacacccacaccatttgagaagaggatggagaagtattccagttcctccaacctcccacaccatttggaggtccattggttctctatcataaactcttgtgttacagtcctccttttgactggattcttggcgaccatcctcatgcgagtactgaagaacgattttgtcaagtatgcccatgatgaggaagcagctgatgaccaagaagagtctggatggaagtatatccatggggatgtcttccggttccccaagaacaagtcctttttttcggctgctctcggcaccggaactcaactgtttgccctcacaacctttatattccttcttgcacttgttggagtattctacccgtacaatcgtggtgctctttttactgcattggttgtcatctatgctctcacttcaggaattgctgggtatattgcaacctctttctactgtcagctagagggaacaaactgggtgaggaacttgctgttgacaggatgcctgttctgtggacccctattcctgactttctgcttcctaaacactgttgctattgcttatagtgcaacagcagctttgcccttcggcactatctgtgtcattgtgctcatctggaccttagttacatttccccttctagttttgggaggcattgctggtaaaaacagcaagactgaattccaagctccctgccgtaccaccaaatatcctagggagattcctccacttccgtggtaccggcaaacaatcccgcagatggctatggctgggtttttacctttcagtgccatctatattgagctctactacatctttgctagtgtttggggccacaggatttacacaatttacagcattctcttcatagtcttcatcatcctccttattgttactgccttcattactgttgcactgacgtactttcagcttgctgctgaagaccatgaatggtggtggaggtcattcctatgtggaggatcaactggattttttgtctatgggtattgtctgtactactattatgcacgatcagatatgtctggatttatgcagacatcattcttcttcggctacatggcttgcatctgctatgctttcttcctgatgctgggcatgatcggtttccgtgccgcattgttctttgtccgtcacatatacaaatccatcaagtgtgagtaatactgttgtcaaaggctggagagcagcggagttgtactcctttttggtgccactaagaagtcccagtatagaaaaggttagctctcgcacaacaggagcagctagagattgccatgtttcaggttaggccattattcataggaacaggtaatgaacctataaatttgttctccttttgtgcgactgctgtgataaatcgtcttttctttggtcatgtaattctccctgtgatgtctagacattttcacgttgttgatgcatgacctacctgagcatctctggaagataatgtcatgtcttatttcctatagcagaataactgaagtgtagagatgatgcctctagagcggcttgtctatttatacgtgtacccaccgctggttatgtattgtcaaatattgaaatactgaaccattctttttttttc

SEQ ID NO: 14170 - DNA, 1045 bp, Oryza sativa
  ref <308>: DATABASE ACCESSION NUMBER: AK064792
  ref <309>: DATABASE ENTRY DATE: 2001-12-06
ggattccccccctcctcctcccctccatagctcgcaccagataagcccccccgcctccgcctccgccgccgcccacgccgtcgccgtcgccatcgcggtcgtggttgtgttcgtctgttcgtgtactctggatcgatcgattgatcgggcgcgggtggaggaggaggaggaggagggtttcgagggggtgtgctagggtttcgagtggaggtggggggaggttgagctcagttcattcttctgtcgccgtggtgggggcgggggaggcggagccggatgctatgctgctaggctgctcgtccctgacgtcgtgggtgcgtcgcctcgtcgcctgcgttggagcagaaattgttttggatgtgcgaaacctactccaataatagccgttgatgagccttcaaaaggtttaagaattcaagggcgctcaataaagcagcggagtttgtcggaggacttttggagttcaagcccgccgggaatggagaatagtgccatgcaatctcagcgtagcatgtcttcaatcagtacggcagcacaatcgagcgatcagcatggagctggaagtagcaccaacccaaatgagtttgtaaatcaaggacttctcctgtggaaccagactaggcaacagtgggttggaaacagaaggcacaattctcagcgtcaacaacctcgagagccaaaaataagttggaatgctacatatgagagccttctaggaagcacaaaaccatttccacaagcgatccctcttggtgaaatggtagatttcctcgtggacggctgggagcaggaaggcctatatgattagtgggttaaatgagtgatgaagggtgttgtttgtggggtcaaattatgaatcaccgagaatgtactcagaaaaacttcagcctttcaaagcttgtgggtgataactgcggtattcctggagacaggatggcatccctatcttaagtaaacgtaacatattctttactgctaattgtgttaacataagtttcatattgtgatatcttctcgctgtgcataattggacattgttattacc

SEQ ID NO: 14171 - DNA, 2259 bp, Oryza sativa
  ref <308>: DATABASE ACCESSION NUMBER: AK064793
  ref <309>: DATABASE ENTRY DATE: 2001-12-06
ggcttcctcctcctcctcctccttctgcacctgtccgattcggttcgattcggtttgattgggttccaatctgcggaggagcggcaacgagctaggcggaacagagggttggtcgtcggatccgtggcatggagatctcgttcgaggcgtgggagggcgtgcagcggcacggccaggacatcgcggaccgcctcgcgcaggggttcaccggcctgctccaggcgcagccgccgcagttcccgtggccggcggcgtcgcacaagcggattcccttcgagatcgacctccccgtggtccccttcggcgcctcccgcggtgcccgggccgggaaggagttcttccccgccgcggccgtcgcctccgtcatcgacatcggcgggaggctcggccaggctggcgtggagattggggcgtccgtcggtggcgccgtgcagcacgccgtgcgccagctgcccctgccgttccggaacggccagatccggcgccgcaagctgccgccgcagcctcaggcgccctcgcccgcggctgcggtgggtgaggcggcggtggggctctcggtagagagggctgtcgacaggtgccctctagaggcagctgcggcggccgccgctgccgcaaccggtagcgctgcagcgtccacggtcagtggtgctgtgggcggagatgacgtagatgaggaagatgagggattcggctgcgagattggtacttttggaaactttaagaagtctaagggtacagtaaatgtctcggcttcatacaataccaggaaccacgacattgagagttctgttgttgcacgtggagacctttggaggctggaggcatcacgcagcagttcaacttccggaaacgatagctcacctctataccttgttcagttgggaccgttactttttgtccgagactctacactccttttgcctgttcatctatcgaagcaacatctgctttggtatggttatgatcgcaagaatggagtccattctctctgccctgctttttggtcaaaacatcggaaatggttgatgatgtcaatggtttgcctcaatccagtagcttgttccttcatggacctgcagttccccaatggacaactaacatatgttgctggcgaggggattacagcaagtggttttcttccattatttggtgggttgcttcaagctcatgggaaataccctggagaaactagagtcagcttctcttgcaagaataagcaaggcaccaggttcactcctatgtttcaatggcctgacaagtctctgtcatttggagttactcaagccttagcatggaaaagatctggtctcatggtgaggcccagtgtgcaagtcagtttatgccctacatttggaggaaatgatcctggggtacgtgcagaggttatccattcattgaaagaggaattgaatgtaatgtgcggtttgtcttgctcaagacatccatcagcctttactgctctgtctattgggagatccaagtggaatggtcaaatgggcagttccggagtggtcgttaccttggaaacaccccttaataacattggaaggccatctttatccgttcaattgaatggaggttttgaaatttagcattctgcgcagtaagttgtatataccactgtacatagccctactaatgtccatgtcctatctctgtggagatggctgtgcaacgcctatgaatggtatctggaagtggtttctgctcgtttttgttgtcagactcataggtgataagtctcagctcaacaaatcaactggtttattccccatgccaacaaaggcatccatatatataccttaaagagatggtgatcaagtgtgtaggcagttcaaggtttcttttgaagaaattggagagaaaagctgcaagatcagcacttaatactttttggaagttgggagaaggaaaaggctatgaggtgttttgcggctgtgcaagaagccaagacgaatgtggctttgcaagaagccgaagatgttcacccagaagctatgttcctttggagcaggactgaccatactggatgtttgctgatagtgaattgcttactggcttttgctaattgtgatggataattattatccatcacaattgatcgttagacgatctcattgctgagacaagctttgatggatgaattggtgtgcttttttcccctgcactcttgtattcctcatgtaagactcatgatcagtgaagctaagaaatgtctactgggatgggatggaggacctgtctggtggcattgtc

SEQ ID NO: 14172 - DNA, 2378 bp, Oryza sativa
  ref <308>: DATABASE ACCESSION NUMBER: AK064794
  ref <309>: DATABASE ENTRY DATE: 2001-12-06
gaacacaacccaccaaacccaccttctttctctcctctctttctctcgttctctttctttttctctcgctctcccctgcgccgccgcatcctcaggtctcgccgccgctccaccccacgccggccgatgctccctgcctccggcagccgccccgcagccgctgccggcctgaatcggtttcgtggctcctcatgagtctatccccaaactaaccctagccatcaacccctctccaatcgatgctgctgctggctactgctctcaacgactgggattggaattttcccagccccggcgcccctgatccaagcatgactcagaccagccgtgtctccccgagctccttctctctgatcccttcattccctacttctgtgatgtgatctgattggtgttctattatatagttacctactgtgaatttctatgcttgtgaactagtcctaatgaccaacttgatgatgctatactcagaattatcctgctatctgtaggttctagattaattgatttgctataattagatgataaccatatgctatggatggatgaatgaatgcttgcataatatatcatatgaaaatgcagtactgaaactaaaaacacactaacatgattttgtccttatatatatatgcttacatgtagaattaactgaaatactgaaattgttaaaacactaacatgatcagatccttatgtatatgctttgcatgttgaaataaccgaatttctgaaattagtaacacatcaagcggattagattcaataataaatcttattgaatggtgatgtaacttgcatggttctacacttgatgatcatggcaagatgtatgctatagataatggaattatgtaaatgttgactaatttccttaaataatttactgctactgactatatgtactacctcttgcctctatgtaatttacttgatttgaaatattcatgcaaggagaaattagactatttgatgacctaactgtatgctatggtttttattcagatactatactctcctgtttcctgacaattttataaactgcgatttcatatacttaaactgaagatatatttgcgcacactaatagatgccattcttttctctaattatgctctgctcctacgcatgcattaaaaattcatcctatgacggctttactgaaccttgatttatatcactgtatacagatataaatccttaactcaaatgcgcttatagatcatccaagataattcttgctgtcaactatgcactgagatggctgatctatacttcaattatcctactaagagtccattaaattttagacgatactatcttgtccaattactcataaaaattatgtcttgcttattgaactaaggatgcatattcagtaatataaccccaacacatagtactagtatatgcacatatcaacatggctgccatctactgaggttcatttttcaggtttaatggatataactatgtgcatgcacataactcctaaacatactaatatatgcatcaaccaagaatcatgccatgatgtgatttccctctcattcttatttcaggattaccttgtcaatgactctagtgtggctgtgaagattgtgtggtttctccctctctggttctaccgcttctcctgctgggactgtaacttcactcctttattggaactggaacacttgaatatttctcctccttgctcaggcaccagctgctcctccagaaactatagtaattgggcattttcttcttcttcttgagctggactgctggaacaccacttgctccttcttcaggttggtctctctgccgtctcacttcagcatcttcttgctgctatggtttatatggtaagcctggttgtttttctatggctgctactattgagatatggtgtgactgtggtgccggactactagctactgctctgccatttctctcttttgaggtggttttccggacaactgcttgctgctactgctgttgcggctgaggcttctgcgccatggctgtgctcttgctgttgctactactactgcaactgcttgctgcctgtgttgatctgcacgaccaaaccgaggctaatatatgtgtgaatttttaatgaaagctaagtgactcaccagctcgcatgccggttggataagggcttgctgccacctcaacaaagctggttcggtgggataatctaaagctatatttactaatttcccaatcaatagaagttttgtaaagtctaacatgtttggtgcttttgcacttgagtcccacaagcttggtaaattggagattactacgagttcagagactgggatgcaattgccctaaaactcaagagtttttctgaaaataaataattattgaatctttgactg

SEQ ID NO: 14173 - DNA, 2527 bp, Oryza sativa
  ref <308>: DATABASE ACCESSION NUMBER: AK098846
  ref <309>: DATABASE ENTRY DATE: 2002-08-28
gagtcggcgactgcggcgactccgactcctcgcacgcacgcacgcacgcggccgtggaaatcgcgccggctcgcctcctccctccccacccccacccgctagatctcgccggcttccgtaggtcggtagatctcgctgcctcctcctcctgggaatctccgtctcctccgcaagattccaatcgggaggcggcggggcggcggagaagctcgctttggtggagtagtttgactaaccggtgcggcaggatgagggggccggtgcggtgggcggtggtggtggtggtgatggcgatggtggaggcggcggcggggaggttcgtggtggagaagaacagcctgcgggtgacgtcgccggaggggatcaaggggaagtacgagtgcgccatcgggaacttcggggtgccgcagtacggggggaccttgcatggatgggtcgagtaccccaaatccaaccagaaggcttgcaagagcttcgaggacttcgacatctcattcaagtcaacccggtccggaggacgcccgaagttcgtgctcatcgaccgtggacagtgctatttcacaacgaaggcatggaatgcacaaaatgctggggctgcagcagttcttgttgtggatgacaagtcggagcctttaatcacaatggataacccagatgatgctggaacagagcaccttgaaaacatcactattccctctgtgcttataacgaagaaattgggcgatgacctaaaaaaatctgctgaaaatggtgatatggttagcgtccttctggactggagagaatctcttccacatcctgatgagcgtgtagagtatgaattctggacaaacagtaacgatgaatgtggtccgaaatgtgatatgcaaatggactttgttaagagctttagaggaactgcacaaattcttgagaagaagggatacacccagttcactcctcattatattacatggtattgccctgaagcttttgttgtgagcaagcagtgcaaatcacagtgtatcaatcatgggaggtattgtgcaccagacccagagcaggatttcagccagggatatgatggaaaagatgttgtggttcaaaatctacatcaaatttgtgtattcaaggctgctaatgagagtgggaagccatggttgtggtgggactatgtgcatgacttctcaattaggtgccctatgaaggagaagaaatacacacctgaatgtgctgttcatgttattaagtcactcgggttggatgttgagaagataaagaagtgtgttggagatcctgaagctgatgaggaaaaccctgttctgaaggcagaacaagatgcccaaattggtcatgataaacgaggagatgtcacaatactgccaacccttgtcatcaacaacaggcaatatcgaggtaagttggacaaatctgccgtgctcaaagcagtctgcgcaggatttgaggagacaactgagcctgctatttgtttgagcgaggatgttcaaacaaatgagtgtttggaaaataacggaggttgctggcaagatagggataataatgttactgcatgcaaggataccttccgtgggcgtgtttgtgaatgtcccgttgtgaaaggtgtaaagtttgttggtgatgggtacaccaattgtgaagcttctggcattggtaggtgcgaaattaaaaatggaggatgctggaaagaaactagaaatggcaagacaatatctgcctgctcaaatgaagtatctgaaggctgcaaatgtccaccaggtttcaagggtgatggaataaaaagttgtgaagatattgatgaatgcaaggaaaaactttactgtcaatgcaagggctgcagctgtgagaatacatggggtagctatgagtgcagttgtggcggtaacaacatgttatacatgagagagcatgacacttgtctcagcaaggaggctacgtcagctgttggctggagttttctgtgggttattttctttggacttgttcttgctggggtcggagcatatgcggtgtataaatacaggctacggagctacatggattcggagattcgcgcgatcatggcccagtacatgcctttggataaccaagaagcagctaaccaacatcatgtcgcgcatgctggtgatgatatttgaaacggcactcctttcccgggtgcgcgaacatttcatatgtgtactgatgcaccggtggccatcgactttacaggggtcaactgggcgcaaaagatagtgtgtgtgcgcgagaaagattagccgtatacatgtatgattgtaagagagacatcgtttgagatcatctttctgtaaaacccaaagaacagcataggcaaatattgtgacagttttagcccttcctcagactcagctgctcctgctgcatacatgagtactgaatacatgatacattcaaatgtcgtgtaaatacctgtctgttcttcagactagagaattcctcctcgcctcaacttaataaaagctcgagtcttgaaggggtctatgacatgcttgaagactgaattatctgt

SEQ ID NO: 14174 - DNA, 3008 bp, Oryza sativa
  ref <308>: DATABASE ACCESSION NUMBER: AK064795
  ref <309>: DATABASE ENTRY DATE: 2001-12-06
gacacattctcttctctcccctttttttttcctctctgctttctttcttctagcttccttctccaacattccaaatggtgatgctctgatgacctcctggctagcttctacacacactccaagaatcctctccagtgatgtagtatataaacctcatgaggggctaatcccttgtttgcatcaggggatccatctgaataattgatactggctattaagtcagtgattatttctgtactgtgctattactgatcgatgcaaatgcccttctgcccgaagctctggagctcggcggcgccggcgccggtgcagccggggagcgtggtcatcaatggcacggtggtcgtcgccaaccacttcggcctctcggctcccggcaagtccaccaccctccgcctcttcagcggcacggaggtcgatcacgagacgaggaaggggaggctgagcgcggaggcggcgttgaggggagggaagaagacgaggcatgggaaggcgagcacgacgatgtaccaggtgacgttcttcgtcgacggcgagttcgggacgccgggcgccgtggccgtcaagaacgggaaccggaacgaccagttcttcatccggcacgtccggctggacctcgccgaggaccggagcatccacttcgactgcaactcctgggtctacccctataagaagaccacctccgaccgcgtcttcttcatcaacacgagctacctgccagataagacgccagaggcgctgcggctgttacgggaggaggagctcagaagcctgagagggaatgggcgcggggagaggaaggactgggagcgcatctatgacttcgactactataacgacctcggcaaccctgacaacgatgaccatgtccgccccgtcctcggtggcaccaagacccacccctaccctcgccgctgccgcaccggccgccccctcagcaagaccgacggggtgacggagacgcggaagcacaagctgataaacctggactactacatcccgccggacgagcggttcagcccggggaagctggcggaggtgctggcgatgggggtgcaggcggtgacccacttcgtcatcccggaggcccgctccatcttccacggcgacgtcgtcaacttcaagtccacggagcagctgcgcgccgacctctacggcaagccgccgcagccggcggcggacgccagggtcatggacgagctcaagtcctccgtgccgtcgcacaagacgtacaagcaggtttccaggattgtcaaggacaaccccgccaagttccccacccctcaagtcatccactatgacactgaggcgtggaggagcgacgaggagttcgcgagggagatgctggcagggctcaacccggtggtgatcaagcggctggaggtgtttcctccaaacaagagcaagataaccacggacgatatcatgacccagattggaggtctgaccattcaacaggcgatggagcagaaacggatgtacatcctggaccaccacgactacctgatgccatacctccggcggataaacacggagggggtgtgcgtgtacgcgtcgcgcacgctgctcttcctcagggacgacggcgccctccggcccgtcgccatcgagctcagcttgcccgacggcggcgtcggcggcagcgagatcagcagggtgttcctcccggcgagccagggcaccgatgcgcacctttggcacctcgccaagactcatgtcgccgtcaacgattctgggtaccatcagctcatcagccactggctgttcacgcacgcgacagtggagccgttcatcatcgcgacgaggaggcagctgagcgcgatgcacccgatccacaagctcctggacccgcacttcaaggacaacatgcagatcaacaccttggccaggagcatactgctcaacgccggtggcctcctggagaagaccatgtacccggggaagtactccatggagatgtcctccgatatctatgcccattggaggttcaccgagcagtccctgcctaatgatctcatcaagagggggatggcgtccagggaccccaaggcgcgcggcggcgtgtccctccacatcgaggactacccgtacgccgtcgacggcatcgacgtgtggctcgccatcgagggctgggtgcgcagctactgcgaccacttctaccacgccgacgcggcggtggccggcgacgccgagctgcaggcgtggtgggacgacgtccgccgcgtgggccacggcgaccggcagggcgacgccgcgtgctggctggacctcgacaccgtcgcgggcctcgtcgagacgctgtcgacgctcatctggaccgcgtcggcgctgcacgccgccgtcaacttcggccagtacggctacgccgggtacccgccgaaccggccgacgcggtgccggcggttcgtgccgctcccggggtcgccggagatggcgcagctggaggccgacccgggccggttcttcctggagacggtgcccgaccggttcacggcgacgctggggatcgcgctgatcgaggtgctgtccaaccacacctccgacgaggtgtacctcgggcagcgcgcgacgtcgacgtggacggacgacggcgaggtgctgctgctgctggacaggttccgcgacgagctccggcgggtggagaagagggtggaggagaggaacaaggaccccaggctcgtcaaccggaggggccccgtgagggtgccgtacacgctgctctacccggacgccggcgacgtcgccggcaaggagaaggggatcaccgggagagggatacccaacagcgtctccatctgacacgattcatcatccttcttctcttatacttcatctatccgactcgactcgacgcgtgtggaatgtaaagttctctgcttttctttttctttcttttcgtttgagagttttggtgttggggatgtgaaattgagattgattggttggtttggattggagaattgatgagcaaactgtgatgcagaattcaatacatgtaattattgttc

SEQ ID NO: 14175 - DNA, 2688 bp, Oryza sativa
  ref <308>: DATABASE ACCESSION NUMBER: AK064796
  ref <309>: DATABASE ENTRY DATE: 2001-12-06
ggttggctgtgctgtccagtcccccacttcgcagagggattgcctgcggcgctcacctctcgccgtctccgcctctccggagacggcggccaccgcgcgcccgcctctcgtcggcgccgtgcctccctcaacggccaccacctttgcgggcgctcccatcgtactgcgtggctgctgccagatccaggccgtcaggatctaccccccgcccttctcgtcggagggttagggtttgtgcgacccggcgacggcgagcgaggtctctcacccgcgaaaggggggggggggggtggcgcgtacctacagagccctccgagtttcgcgagcacagttccccgcagggagagcgcaagcccgaggtgagtccgctgaatctgccatccatacattccttcgagagatttctgttggatgaaatgcctgctccattttgtctagtaaacgaaacacgttgtgcatccgttggatcataatctgcggtggtatactgcgagagctttctgttcgatgaaatgccgcctccactttgtctagtaaacgaagcgcgttgtgcatccgtttggatctgttgggtatctgatgaaccggtggcctaggccctctgctcagatggttttatatgttaaattgataattctgttgcaaacttgtgctgaattgacttaaacgatgtagggtgcactatatcctcactggggcgagagagagcggttttgtgcggtatagcagaaaccaaaggtcaacccaaaggcctaaaaaatggtggttcggttggttgtgggatttttatgcccacccattcattgtacctatgaattagatctaatactctgtttacatgtttacatggtaacatgatctacgattaggatgtcaaagtttagcctgtgcctgtgcatcacatggcatgtacgtggattcgcccctgtagcctcgtacccttaacaaattttatgatttggccttgtttagagccctagcatagacaacatgttcatatatcagaaatgatgcattggatttaaagtgctgcctttctattatgggataacacgggttcctcaccttctttatgatggtagctaattacaaccgaaaacagagaagagaatgtcgttttaggatgttctcaaaagcatgtgggaacgctgcctgcctcaacttgaaaaaaaaaaggtttttacaatgctaacacaaatgacaccttttttttttgtaacatctgaattagcttctaggtccaatgtgctgtgtccacaactggcatacttttgcatgcaaaatgaagaaattgatcttaggcttttttgtcgttggaagatttatttcatatgtggcaagcctgattggggaagggcataaaatcttggtgttttgcttgatttactttttttatcatatttttttttgcatcaaactgcttatttattttattgtaaaatgcagaaagaagaggcatcatccttgtttgttcaactctgagtctttgtgaatcagcctagttctctcaccaaattgtgtatgatgttattttgtgatcaaaactttcagatagctggttctggaacagatttgggaagctgagttctaattaattgaacttttatgagctagttttaaggaatatatttaggctgttatagctacatagaaggacaactgatacggtgttaggtcatggaggagattcatggcatgcaagaatcaaagactgcatctgtcatcaaagttgccagagagcctgccgtcattatcaatggagttccagacttgcctcctgatgtagcatccgaatcacaacctgagccacgtaatgctgcagaacctcctgttgatcatcgttttggtgaatttctagaagggcggaaagtaaggaaaccttttggggacaagcattttgtagggaaagtggacaagtatgatagtgaaagtaactggtacagtgttgtctatcaagatggagaccaggaggatctcgagtggaaggaagtggaggagatcatgctgccattggacataactatcccgctgaaaacacttatttcggataaattcgcacttcaaaatacagctcctgtcttcaaacctaaggtgggtagaccaagaaaagtctatgctataacggatggcaacacaaacaatgctatggaagatcagatgatgactggagcggcaaatgaacatcaatccaataacttactagcgttggttccagcatctacatccaacgatgcatatgttaacgctagtagtcaacctagaaaaaggggcaggcctcgaaaggatgcaactatgtatcctcgaaaggatgcaactattcctgccaatactcagcctaaaagaagaggcaggcctccaaaaaacaggaacttgtctggaaatgctcagagtgctgaatgcacaccacaaaatagtgttcttatacgcaatgcacagacagtcagggcagaaaaactggcgaaggcagaaagactgaagagagaaaatatgcatgctcaaggcgcaccacctggaactcaatttttctaacatgcattcccactgttccaatacatatatctgtaaacattccagaatctatgcacgatggtgacactagctttcaacatatattttgtacaatccatcgtagagcaaaacttgtaagactatatttgctatcccaatgctatcgtatttctttcctat

SEQ ID NO: 14176 - DNA, 671 bp, Oryza sativa
  ref <308>: DATABASE ACCESSION NUMBER: AK098847
  ref <309>: DATABASE ENTRY DATE: 2002-08-28
ggggagatcaagagagcaccaccactcgatcgcagcgagacccaccctcaagctccaagctccaagaaccatggccgccacctcgctgtcgccgccgaccgtggccgggctgcggctggcgccgtcgccgcgcgtgcggtcgccgtctgtggcgttcagggcggcgccggcgaggaggaggtcggtggcggcgagggcggagctgagcccgtcgctggtgatcagcctgagcaccggcgtctccctgttcctggggcggttcgtgttcttcaacttccagcgggagaacgtggcgaagcaggtgccggagcagaacggcaagacgcacttcgacgccggcgacgagcgcgccaaggagttcgccggcctgctccggtccaacgaccccgtcggcttcaacctcgtcgacgtcctcgcctggggctccctcggccacatcgtcgcctactacatcctcgccacctacagcaacggatacaacccaaacttcttctgatcattctcatcttggatggatgcaatgtaatctgaatggatctctggtgtttctacgtgattatgtatgagatgggtaaaaaagaaaagaaaaaaggttgattaatttggaacagtagtgcaatcgcgtgtgtatattggccgcatgaaatttgtcagtttgatgatctttctct

SEQ ID NO: 14177 - DNA, 2136 bp, Oryza sativa
  misc_feature (614)..(614): "n"=any one base of a, t, c, or g
  misc_feature (618)..(618): "n"=any one base of a, t, c, or g
  ref <308>: DATABASE ACCESSION NUMBER: AK064797
  ref <309>: DATABASE ENTRY DATE: 2001-12-06
gatgaagagagtaggctatttatcgctttgactgttctacatcttgcctcgccgtgcaccgcagtccgccgcactaccagcgccggcgcttaccgtcgttaccgacgcagcctcgcctacactacaccctcgatccttccccaaccaccaccgcagcaaatacaccgccgcggcgccgcgcctcttggaggcttcgacgcgcgcccaaaaagcgaccgcggcttcccgttcccgaacaccaccacccctcccccgaatcgaatccaatcaaatccaatcgaatcgcctctccgtcctccgcggcggcgggccgccatgccgctgccgacgatgacccactcctcctccttcctccgcctccccgccacctcctcgccgcacccgccgcccgcggatgatgcttccgcggcctacgccgtcgtcgtcctcaaccagcgcctgccccgcttcgcccccctcctctgggaccgcgcgcggctgcgggtgtgcgccgacgggggtgccaaccgggtgttcgatggaatgccggagctgctgcccgccgaggacccggaccaggtccgcatgaggtgaccgatagtttccagccttatttatccccccccccccaaagnaagnttagtgttctttgtttgcatgtgtcctctcctcgcgcgttttgagtcaggcttggcggtcatgatggaatgcgtgggaggcgagtgaatcttgttttcgttagtatttcattatgcagaggagtgaaactgtaaatgttgtcatggaagcgagtactgtctagctgaaccagataccactagttaagtgttatttctcgatatgtttatctcccatgctttacatgtttccgttattatatgtttaagcaaatgctgaagttcccctgatatgttcaagttgagtaatttagtatgcaacaccttatagatgttaatttcctgttgggttatggtttagtgctttagctaacgaagtgctctttcatttgatgaactctgttaaaagttttgttcttatctgcatgattgctagttttgttttcggtgagcttagaataacattcttaaattagccgaagttgccctcacagacctgaatgtacgcgatattgcgccaaaggctatctgaagccacacaaaattactcaaaatctgggatgaactacaggtctaaagcagcttcaacttgtgtcttcttcactatgaacctttttttcctatctttggttgccaaaggtttgggagacatttatgcatccaacagaggagcatggctagttgatttgccatacctggtagttggcaagagactgttttctttaaattgttggttgggtttaaagacagcttctttgttgggtgttcatatatttattaatttgtgctcatcttcctgcaggtacaagccagatgtgatcaaaggggatatggactcaataaggccagaagtgaaggaatattattccaatctgggtgccgaaatagttgatgaatcacatgatcaggacaccactgacctgcataaatgtgtatcatttatcaccagaaatccacctggctctgaagagtctaatctgtatattcttgttcttggtgcacttggaggaaggttcgatcatgagatggggaacatcaacgtgttatatcgcttctcaaacatcaggattgtcctcctgtctgatgactgctcaatctttctgctcccaaagacgcacagccacgagatccatatcgagcgatcaatcgagggtcctcattgtggattgattccaatgggttcaccatcggctagcactaccaccacagggctccggtggaatttagataatactagcatgagctacggtggactgataagcacatctaacatcgtggaagaggaaacagttaggatcacttcagattctgatctgatttggacaatatcactccggaactgagctttaaattacccataaatgtatcttgatccaaattttggctccttagtatagcatggatgggctacatttttgtaacttagatttttttttcactgatctactgttagtaaacaggaaaggtatccatatgtgtaagcctcttggacatgcatccattatagaaaaaaatattattaactgtgttgttcaattct

SEQ ID NO: 14178 - DNA, 1909 bp, Oryza sativa
  ref <308>: DATABASE ACCESSION NUMBER: AK064798
  ref <309>: DATABASE ENTRY DATE: 2001-12-06
ctcagggtcgtcgccgtcgcctcaccttcgtcggcgccggggccgggcgccgccggccgcccccacccgacctacaaggagatgatcctgcgggcgctcaaggagcttccagatccgatcatctccagccgccgtgccatcgccaagtacatctccgacaacttctccggcctcccttctcaccacgacgcgctcctcaccgttcacctccgccgcctcaggtcacagggccttctcctcatgtctggacactcgtaccttctctccacctccgccaccgccgctcgaggacggggacgaggacgaccgcccaagaaagcttcctcctccgcgccgcctcaaaagcgcggacccggccgaccccgcaagaatacagccctgtttccggttcctgtgcttgaggcgaagcctgggcgcgggcgaccccggaagaaccctctccctgtggcttcctccacctcctctgctgctgctgctgctacggcgttgagcctgagagtgaagcggggacctgggaggccgcgcaagaatgctgctgctaccccgttgagactgggagcgaagcggggacctgggagaccgcgcaagaatgccactgctacgccgttgagcctgggagttaagcggggacctgggaggccgcgcaagaatgctgctgctgctgcctctcccgttgctccgccgcctgcatctccactgaagcggggtgttggacgcccaaggaagaacgccactcctctagtcaagcctggacctgggaggccgtctggattcaaacgtggaccaggccgccctcgcaagaatgccactcctcctgtgctgtcagtgccacccactgctgctgctgtgttgggagtgaagcgtggccgtgggcgccctagaaaggataaaccattgcaatcttggtctgtgctctctggcggtgctgcaatgactaagagagggcctgggaggccaagaaagaagaggccactggaagctggaggtgttgtggcagcacaggtagacactgcagatggaggtgaggctggagccgttcaaaatggaggtgaagttaggtgtctgctctctgatggtgcttcttcaatggggaacagagggcctgggagtcctaggaaggaggtgctattggaaaatgaacctacagtttctacattggtgggaaagagaggccgtggccgtccaaaaaaggagaaaccatcagcagcaaggcctgctgaaactggagatgctaaatcaatggggatcaagagaggtcgcggaagaccaagaaaggacagttcctttcaagctgtgtttgcagaagctgcaggtcaggtgtcaagagatgtcacagcagctcagcccgaaggagatgcagatttactggcaaggaaggaaccagagactgcagctgtagtttcggtggagaacaaagaaactaggcctgcggatgctgggggtgttgtggtttctgaagagaagacatcgattgatccggtggaggctggaagtgtaatgccatgtgttaatgcagaagttgatcgcatgaactctgacctgcgcactgctaatccatagtgtggctggcgtcagcactcagcacagaagggaggacctggatggctggcactacctgcaggtgtgaatgtgtattcactgatttagctggagacatactgtgaaaactgttaaatgttgcaaccaaaattattactgtcatgctgttaagtagtttctcaagatcaacattggagtatgcttttaatgatatccacttctcggataaatttttataatagtccttaggtagcacatatagttcctttaggaatgactggatatatcatatatgttgcttttagtgcacccagtggtgatgagatgcatcaatgtttacttccaatttgaacataacagtccggatccg

SEQ ID NO: 14179 - DNA, 1548 bp, Oryza sativa
  ref <308>: DATABASE ACCESSION NUMBER: AK064799
  ref <309>: DATABASE ENTRY DATE: 2001-12-06
ggccgttcgccgcctcgctgctccccgaatcctcctcctccctcctccgccgaaacggcgccgctcgcctgaagcgaacgcgcggcgcgcgcgcgcgcgtggcggcgtgcggagcgcacaactcgtgcttggcgggcggcgagaaaccctaggggcgataggaaggatggtactggctgtggcggcggcggcggcggcggcgccatgatgaggggtttagggccggctgcggcggcggcgctcggaggccgctcggcggcgaggtggtgcacgtaccggcgcgtcacagtcgccgtatgcctggggaacctcgtcgccgtgctgctcgtggtccgctcgctctactccgcccccggctacttcgcctccgcgcccagacgcgtggcggtgaagtattcggaggagcagattaggctggtcgaggagtccatccggattcgccgcgcagccgtgtccgtcgagctcgtggaagctgtgaaaaagctggagaaggtgttcgctagggaggagaagagacggaaggagttgccgctcgagctgaagcagaaggtttcctatgagattttagagaggatgcgtgatttgggggagaacagcaacacgaccgaacaacgagaagctttagagtcctggcgtttagagaagctgaaagacatcagaagtgcatctgctcagaatttgtcgatgtcagacctctctaatgaggaatcaaggatgttaaaacgagcattggagttaaattggtgaatgctaatggacgacattggcctttggatacctgttagtgtatggcatactgaacatgatgacaagcctgagaatgaaccagaagaagaagagataatagcaggtccacctttacccccagaatgcaatgctcaagtacataccgattacggtggtgctgctgttcgatggggcttaacacatcataaagaaagtgcagctgattgctgtcaagcttgtcttgatcaggctaaaagggccagaccaggggcattaaagtgcaatatatgggtttactgtccatcagagtatggatgctactcgccagataaatatgaacacaaacatcaagagtgctggttgaaacaggctgatcaccctaaattgaacttcaaagacaggtattctgagtcgtacagggatgctcatccatctgctcccgttgttgtgccatggatgtcaggtgtcatcactgtatgagctgcctacaggctatctagtatctactgcctgcaggagacaggaactccgttcggatgtgcaacgccacatcaaatttggtacagttccacgaactcatataccaattttcaaaattcttcttggcttttgtagtctttagattagtctagacggttagctagagttcatgtgagatagctggtgtattttttggatggacggttggtggcgaactctttttcgaagaagaaaaagtagaaaaagtagaaaaagagtacaaatgattaaagttgaaatcattgtgtttgcctgcccggtacttatgttacagctgtgttgatgcgctgggtgatggtggtg

SEQ ID NO: 14180 - DNA, 2981 bp, Oryza sativa
  ref <308>: DATABASE ACCESSION NUMBER: AK064800
  ref <309>: DATABASE ENTRY DATE: 2001-12-06
ttctgttcgttccgttcccccctccactttccccatctccgacacctctctcctctccgatttactcctctcctttttgccctatcgccttggcgatagggttccgcttcgctgctgcagcagcggcgtttcgcctgtaaatgcttcttgttgttgttggggggaggggtctcttttaggtgattgttcttgttcttcttcttcgacatggtggctttctatggactcggagatggagggtgtctcgtgtcggcgccggcggagctggccgggatgttctgccgcggcggcgtggtggtgcagcagcagcagaggaagcggtcgctggtggccgcgtcggcggtcgcggcggcggactgcgtcgtgagggcggcgaagaggcagaggcagcagcggcagccgccgtcgctcgacgcgctccccgacgagtgcctcttcgaggtcctccgtcgcctccccggcggccgcgagcgcggcgcctccgcctgcgtctcccgccgctggctcgccctcctctgcagcatccgggcttccgagctcaaccaggccaccgctgctgccgccgcggcggcgccgccctcccttcccgacctcaacgaggagttcgtcatggaggaggacgacgaggaggaggagtcgtctcccgtggtggatccgtgcgtcgagagggtcctcgagggcaaggaggccaccgacgtccgcctcgccgccatggccgtcgtcgccggctcccgccgcgggctggagaagctcgccgtccgcgggagccacccgacgcgcggcgtcaccgaccggggcctcctcgccgtcgcccgcggcagccccaacctctgctcgctcgcgctgtgggatgtcccgctcgtcaccgacgccggcctcgccgagatcgccgccggttgcccctcgctggagcgcctggacatcacccgttgcccgctcatcacagacaagggcctcgccgccgtcgcgcacggctgccccaacctgctgtctctcactgtcgagtcgtgctccggtgtcggcaacgatggcctcagggcaattggccgatcttgctccaagattcaggcattgaacatcaagaattgcgcgcggatcggcgaccagggcatctccagcctcgtgtgctccgcgaccgcctcgctgaccaagatcaggctgcagggtttgaacatcactgatgcttcgctcgccttgatcgggtactacgggaaggctgtcacggatctcacccttgtccgcctcccggtggtcgcggagagagggttttgggtgatggccaatgctgccggcctgcagaatctgaggtgcatgagtgtcacctcttgccctggggtcaccaatctcgcgcttgctgctatcgccaagttctgcccgagcttgaggcagctttccttcaggaagtgtggacacatgacggatgccggtctcaaggctttcacggaatcggcgaggttgttggagagcttgcagcttgaagagtgcaatggggttactcttgttggtattcttgatttcctcgtcaactgcggtccgaagttcaggtccctctctttggtgaagtgcatgggtatcaaggacatctgctctacgcctgcgcagcttcctctgtgcaaatcgcttcaattcctgaccatcaaggactgcccggatttcactgatgcaagcttggctgtggtggggatggtttgcccttacttggagcaggttgatttgagtggtctccgtgaggtcactgaccgtgggcttcttccactgatcaactcttccgagggtggtctagtcaaggtcgatttgagtggttgcaagaacatcacagatgcagctgtttctaccctggtgaaggggcatggaaaatctctgaagcaagttagtcttgagggctgcagcaagataaccgatgctagcctctttgccatctccgagaattgcactgagcttgctgagctcgatctgtccaagtgcatggtcagtgacaatggtgttgctaccctggcatcagcaaagcacctcaagcttcgtgtcctgtcactgtctggttgctcgaaggttactccgaagagcgtgtcattcttgggcaacatggggcagtctttggagggtctcaatcttcagttctgcaacatgattggtaaccacaacattgcatcgctggagaagcagctctggtggtacgacattctcgcataggcagacaagatggttcattgctggagggtgttacctgtgcttgggtgaggcacctccagatgcagatatacatccttagaggtagcgcaaccagtcaattgctgtgctagtcatgtttttggctagtgcatgagtcatggtgggttctggatttgttcgaggaccggttgtttccgaggggtgctttccgccaagtgctcgttttttcacagactgcctcaagaggcaatctgttttttgagccttcggctgccattgctggcattctgccccctctacccagacattggtccttgccgctatagtcacaacaccatgattgttttttaggttgccgtagtgtcccttgtccttttttctttactgcttgcttcctagtcatgaagttgcaggcaccggcatcggcacaggggggctgtcatggagttccgcagctcaactgccggtgtcaccagtagtcggcagcgccggtgttccaggctgccgacgacgctggagtgcctgcagacttaccctgtgtgtatggttactgagtctgttggtgtcttgaggtcatgtgtgatgatgttttcggtagtgtgtaagggtcatagagggttgattttttgttacaggtactcttgggaatgcctggtgttgggggatctggccattgcaaggcgcatactagagccttgtcatgacagccttgtatggttgttttttcaccagatccctgtttttaccggcatattgttgaggactgtaatctttgcaaccttctcagaataaattaagtatgtgtttatgtg

SEQ ID NO: 14181 - DNA, 1032 bp, Oryza sativa
  ref <308>: DATABASE ACCESSION NUMBER: AK064801
  ref <309>: DATABASE ENTRY DATE: 2001-12-06
gaggaaaagtccaccacctcaatccctaaccaagatcgccagatcggccaccgccgcccgcgactcccccgcccatcgccatgtccgactccaaccccggcgcggcgaaccctgccctggggccggacgccgacgcggcggccggcgagggccttgagctggcgcagttcgcggcggggtgcttctggagcgtggagctgacgtaccagcgtctcccgggcgtggcgcgcacggaggtgggctactcgcagggccaccgccacgagccgacctaccgcgacgtctgcggcggcggcacggggcacgccgaggtggtgcgcgtgcactacgaccccaaggcctgcccctacgaggtcctcctcgacgtcttctgggccaagcacaaccccaccacgctcaacagacagggcaacgacgtcgggacgcagtaccggtcgggcatctactactacacggcggagcaggagaaggcggcgcgggattcgctggcggagaagcagaaggagtggaaggagaggatcgtgacggagatcctcccggcgacgaggttctaccccgccgaggagtaccaccagcgctacctcgagaagggcggccagtccgccaagaagagctgcaacgaccccatccgttgctacggctgacgccgccgccgccgacgccgccccgagcggcactcgccggaccgtgcgctcgatttgccggcgttccattgcacatttgcaggtgtgcatgtttactgtagtaataactaccggtatcgtaaactcgtcaaaggaacctgcaaattctaagtcgcggtgtacgcgattgtgccattgaaagtttgaaactgtgggagtatatatatctgtgttacaataaacgcactgcttgtcaaggtgcagtatagttatgctgtatttgcttcattacctgatcatcgacgcacgcgttatttccttttgtgggattaactaatgatgtacattttcagctggttgttgagtcagttagcagccataaaatagggccatttgaatcacaggattt

SEQ ID NO: 14182 - DNA, 1933 bp, Oryza sativa
  ref <308>: DATABASE ACCESSION NUMBER: AK064802
  ref <309>: DATABASE ENTRY DATE: 2001-12-06
gtcctcttcctccccccacccgcctcgtcgccgatccgatccgcctccgcctccgcctcgcggcccggcctgcctgcctcgccgccggtggtcccgatccgaggttgctcttgctgggcatcaaacatgggtctggtgaaggatggcgccgccgatttggaggaggggaccctggagatcggcatggagtacaggactgtttctggtgtggcaggacctctggttatcttggataaagtaaagggcccaaagtaccaggaaattgtaaacatccgattgggagatggcaccactcgccgtggccaagttctggaagttgacggtgaaaaggctgttgtgcaggtctttgaaggcacttcaggaatagacaacaaatataccactgtgcagttcacaggagaggtcctgaaaactcctgtctcacttgatatgcttgggcgcatttttaatggatctggaaaacccattgataatggcccacctattttgccagaggcctacttggatatctctggaagttcaattaatcccagtgaaagaacctatccagaagagatgatccaaacagggatatcaaccattgatgtcatgaactccattgctcgaggccaaaagattcccctcttttctgctgctggtcttcctcataatgaaattgctgcccaaatttgtcgtcaggctggccttgtgaaaagcttggagaaaggcaagcatgcagagggtggtgaagatgacaactttgctatcgtgtttgctgctatgggagtgaatatggaaacagcccaattcttcaaacgtgattttgaagagaacgggtcaatggagcgggtcaccctttttctgaatctggcaaatgatcccaccattgaacgtatcatcacccctcgaattgcactgacaactgcagaatatttggcatatgaatgtgggaagcacgtgcttgtcatcttgacagatatgagttcatatgcagatgcgctccgtgaggtatcagcagcccgagaagaggtgccaggtaggcgtgggtatcctggatatatgtatactgatctggcaaccatatatgagcgagctgggcgtattgaaggaagatcaggctccattacccaaattcccattctaacaatgcctaatgatgatattacacatccaactcctgatcttacggggtacattaccgaaggacagatatacattgacaggcagctgcataacagacagatatacccacccatcaatgtcttgccatctctctctcgattgatgaagagtgctattggtgagggtatgacccgtcgagaccattcagatgtgtctaaccagctttatgccaactatgcaattgggaaggatgtccaggccatgaaagccgttgtgggagaggaggcgctctcttctgaggatctgctttatttggaattccttgacaaatttgagaggaaatttgttacacaaggagcatatgatacaagaaacatctttcagtcacttgacctagcatggacattgcttcgcatattccctcgtgagcttctccatcgtatccctgcgaagacattggatcagtactacagcagagatgctacccactgatctatgttcagaaaaatcaaatgttttctctcaagtgcagcttgaataaattgaaatgtttgaacttgtggcctttttgctgtagttatatatagtccggtcctattctttctgtcgggtgagcataattcgttcgtagatcactttgtcacggcaacttctgtaatattgtgccatgtatctttaaactttcacacttgagctctttttggttttcattcgccagaattgttagcaagagcattgtaggccaagatgctcgaacctccaactctccaaggcactggctgtatctacttttgtgaatgaataaagatggaacaataaactgcgatgaaat

SEQ ID NO: 14183 - DNA, 1395 bp, Oryza sativa
  ref <308>: DATABASE ACCESSION NUMBER: AK064803
  ref <309>: DATABASE ENTRY DATE: 2001-12-06
gacttccccttccccttccttttccctactcttctcccttgcatctcgagctggtggctggctactccgctcctctccccgctcctccccttcgtgatctcctcactgccggagttttctctcttctccgcctcgctgcaagggagagctgaaattatctcgcggggaagaccagggcaggggaaaggttcaggaggggattagggcaggaggagtggagaaagcgccggcgacatgtcaggagcggacgtcgacaaggtccagaatcttatccattgctgccttcagctatacatggacaagaaagaagttgttgatgccctttcccgtgaggcaaaaatagaacctagtgttacacagcatgtttggcagaaactcgaggagaataatcgtgagtttttcaaagcatactatttgaggttgatgcttaagaaccaaataacagccttcaacaaacttcttgaggaccagttaaggattataaataaagaatatcatccagggccttcttctatgcctcttcccaatggttccaactcaaacctattgaagcaaaatccatgctttttatcagagtctactccgatgcctgcaatgccagatgatgtaatgtgcaatggaaattccagtggcatagtagatcgcacacaatccagcgatcaattaatttatgctggtaaagacattcagggccttcatagtagcatggatgcttccaatttgcttccagtgcagaatgctaattctgtgctgtttggtgtggaaaatgggacgactattaagacggaatcaggctattcgagcaatggtaattttggtttctgcgggaatgctttcctggaatcatgccagtcaataggtgatgcatctggtggatcctttagcagttcagagttgaatgggcaacctctggatgattcaattttggatattgaatcatcatcgtttggcttcttgagtcagcttccccgaaattttttttcagacctaccagaggatttcagtcaaagcacagaaatattagacaattatggcaagtcaccgttcctcccttctgagcaaaataacttttcagattctacaggtggtgaacacacaggttgagcagccatcggtcatctgtacatacatgtttgggcagggaaatttattagccttttcttcgttagttccagtattctaattcgacaagtttggatgagttgtatctccagagcatgtaaggggatctgtcttcccatatgcttgctgatggtattgtaggtgtgccttacaatgatgcggttttgtaagataaccattagtagcggtggtgctgaatccgcagtctatgggttacatattcttctctggcatgtactaaaattgatatttttattaagtcaagtgaatgcc

SEQ ID NO: 14184 - DNA, 1176 bp, Oryza sativa
  ref <308>: DATABASE ACCESSION NUMBER: AK064804
  ref <309>: DATABASE ENTRY DATE: 2001-12-06
gtctcccctccccttccccttccccttcacttcccctctcctcaactccaccgccttccgcctcgctgcggagcccccgcggccatgctgaccccgcgcgtcctcaagctctcgctgctccgccgcctcggcgccgcctccgccgcccgcgcggccgagcggcctccgccgtgccgtcccagagtgtttcctgcgaggagtaatcattctcgaggttattccagtgaaggaggctccaagtataataggccaatgagacaatttgctgaagagaatgaggcgaatcctcagccgctgatatattatgttgttccatctgctctactagtttttgctggactagtcacttttgttcactataatgatgagaagcgtgcagttacccaagaagcacagcagaccagtgttcccaaaaggtgtactaccaatagacctgcaattggagggccatttaagctatatgatacagaaaacaaagaggtgactgaatcaaagcttcgaggaaattggacactgatgtactttggctatacatcatgcccagatattggcccagcagaagttcagaagatggctgatgttgtcaagttgttagagtcaaaatatggcaccaagattacaccactctttatcacaattgatcctcaacgtgattcacctgctcagcttaaggcatatcttagtgagtttgacccaagaataataggactaacgggatccatcaatgcagtaagacagattgcacaggaataccgtgttttcttcaaaaaggttgatgacattggtcaggactatcttgtagaaagctctcataacatgtacttgctagatccatgcttggagacagcacgatgctttggagcagagtatgaggcatctgatcttgctgaggcgataactttggagatccagaaagcttctaaatcatcaacaaactagtgtagctgcccattgtcttgggggacctagttcggcacaatccaatgtttgctgtgaagcactttctccctctcccctgtatagccttgatcacaaaagggtgacatggtgaacctctcatttagctctgccaccaactgattccagctcctgttccccgctcctttgtgtgtaagaattgagcaaaactgtacagcgcctcctccgatgaaaattttccagctacgattcacttgc

SEQ ID NO: 14185 - DNA, 985 bp, Oryza sativa
  ref <308>: DATABASE ACCESSION NUMBER: AK064805
  ref <309>: DATABASE ENTRY DATE: 2001-12-06
gtgggcctcactgccatcgagaggtcgtcgtcgtcgtcgtcgatcacctcgtcgtcgacgcaccaccaaagcaaaggcaaaccaaaactcctctcctcctcctcgtcttcgccgcctgcgcgcgtcgccgtcgcgtccagccggggcggagggagggggggttcttgaggatggtggaggtgggaggaggagcggcggaggcggcggcggggaggaggtggcggctggcggacgagaggtgcgacctgcgcgcggcggagacggagtacgtgaggcggttccaccgccacgagccccgcgaccaccagtgctcctccgccgtcgccaagcacatcaaggcccccgtccacctggtttggtctctggtgaggcgttttgatcagccacagcttttcaagccatttgtgagccggtgtgagatgaaagggaacattgagattggcagtgtaagggaggttaatgttaagtctggcctgactgccacaagaagcactgagaggctggagctgttagatgacaatgagcacatactcagtgtcaggttcgtgggaggtgatcataggctcaagaattactcctccatcctgaccgtccacccggaggtgatcgacggccggcccgggacgctggtgatcgagtcgttcgtcgtcgacgtcccggaggggaacaccaaggatgagacatgctacttcgtggaggccctgctgaaatgcaacctgaaatctcttgcagaggtttctgaacgcctggttgtcaaggaccaaaccgagcccctcgaccggtgattgttgccaagattccaagagctattttgtgttgcaaatgcttaattagattgtgcagagttgctattctccaatggagcccttaggttctttttcttcttgttgttgttgaatggttcatgagagacttgtgagagagtgctgctgctactgctgtgctatgttcaaaccaaaagagaagaaaaaaaaatattgtgcct

SEQ ID NO: 14186 - DNA, 960 bp, Oryza sativa
  ref <308>: DATABASE ACCESSION NUMBER: AK098848
  ref <309>: DATABASE ENTRY DATE: 2002-08-28
gggtggcgaagcagcggcggagcgagagaaaatcgctgtaggaatcgggggagaaggaggagtagatagagggaggtggattgagctgtgggaggttaggttggtgattggtagaggaggaggaggaggagatggagaggaaggtggtggtggtgtgcgcggtggtcggcttcctcggcgtcctctcggcggcgctcggcttcgcggcggagggcacacgcgtcaaggtttcagatgtgcaaacttcttctccaggtcaatgcatatacccaagaagcccagccttagccctagggttaatatctgcggttgctcttatggtcgcccagtctattataaatacagtggctggttgcatctgttgtaagaggcatccagttccctcagacactaactggagcgtagctctgatctcattcatcgtgtcttgggccactttcataatcgcgttccttctcctactgaccggagctgcacttaacgatcaacggggtgaggagagcatgtactttggcagcttctgctacgttgtcaagccaggggtcttttctggaggggcagtgctctcacttgccagcgtggcactggcaatagtttactacgttgccctatcatcggcgaaaagtccaccaaattggggtccccagcagaaccaaggcatcgccatgggccaacctgtgatccctccacagagcagcgaaccggtgtttgtccacgaggacacctacaatcggcagcaattcccataaatcatgatctgtgcaagctgtttcgagggccattctgatacattatgtttggtttgtataggcctccaggttagaacagtagcagtaacaattgttgttaggtagagtcatgttttttgctttcttcttccccctctttcttgagcgctactgtcgcacgttctgcttcatcacagcggatattcgattttacatgaaccgggcaatgttg

SEQ ID NO: 14187 - DNA, 2542 bp, Oryza sativa
  ref <308>: DATABASE ACCESSION NUMBER: AK064806
  ref <309>: DATABASE ENTRY DATE: 2001-12-06
gatccaaccaatagctaaccacgaaagtgcaagtgagactaaccttgtacctgtagtgagtactggtgatgatggctgcgagtaacggagaggaacctcctagcacatccatggcaacaagttcttctccattgcccatggtcgctcaactgatggtcaccacagaccgtgctgtaagccagcagctgaaggatctagtgaataaggaaaactccactaccatggtggcggcgttgtccttaagtagagaggcttatgaggtggcgatggcgttgaagaacggggaggagcatcggcaagggagatgcagcggcaagggagatgcagcggcaatgttgatgatgatggcgtccaaaaaagaagacgccgcaaagccttccactgcgtccatgaaccccctgttgctatcactagcatcgcagggtcgtctaaatgattatgatgcagagtcgggcatggatctggacggggtcaccactgaagggaacactgcactccatgttgtggccacctgcggtgatggcccgggctacttgaggagtgcaggcgtcatctacagcaggtcccaacatctcatgttagtgcagaacaacaacggtgacacacctctgcactgcgctgtccgggctggccattccaaaatggttgatcatctaattgatctggttgaaactaaggacaactcccctagcagcgcgagactggaggaactcctgagaaaggaaaactgccgtaaggagacggcctttcatgatgccgtctgcattggaaataaggatataatcaccaaccttcttaaatattattcagaattggccggcttccttatggatgcaacaggtacttcaccgttgtacctagctgtcttgcatcaacaggtcgacattgcaaagttattgcatcaaatgacagacgggaatctttcgtactctggcccaaatagacaaaatgcattgcacgcagccgttctacaagaccaagtgatgaccaaaatgttgttgaactggaacaatggcctcacagagcaatcggacgaaaatgggagcacgccactccatttcgctgcatcacttctacggagaggaatatacaatacggtcatccctgtgctgagagccaacccagttcagttgtataagcaagactctgaaggattgtaccccatacacgtcgctgcctcctccggtgccaatctgacagtcaagtcctttattagagagcgacctgagatcgctggtttacgcgattctaaggggaggactttccttcatgttgccgttgaaagggaaagatggaatgtagttgtgtatgcttgccatactcaatcgttggctaggattttgaatatgcaagacaacgatggaaacactgcattgcacatagcagtgaagcatgggaataaggctatcttctgttctctactgatgaataaggaggtaaacttaaatatatcaaataataaggggcaaactgctttagatatatcgcagagtaagattcttgcaggatatttctatggatggaaccctaacaaactgatattgcgggcactaacgttttgcaatgcaagaggtggttgtcgtcgggtagatcacctgcaggaacaatatattattcatcaaaaacaagtagatgaagtgagggaatcggacaaaatgacaaattcaacacaaactttgggtattgcctcagtgctgattgttactgtcacgtttggcgtaatgtttgccataccaggaggttacaaagcagacgatcacaataatggtggcacaccaacacttgctggaagttatatatttgatgcattcatcatggctaacacaatagcattcatttgctcgagcttggctatcatcaacctcatgtactctggaatgcctatggctagtctaccacttcgccgtcggcactttaacatatctctactcctggccttcagttcagtgacaagtttgggtactgcctttgcactaggtatgtatttagtgctggccccagtgactcgatgcactgcaattgcaatctgtgcaatgatgatgattgcatcactgtgcttatatacggagcctttaaatggcgttcgttttgcaatagcactatatgttaggaggggcaatcgggtattgctagttattgcacagattctacttattcgaacgctaattacatattggccctgtgtgataatctttggctgggcagcgatttcaacaaaagatgggcacacaagacatggataagtcgtcattagatgcacccgaccagagagacagagagatgaccaaaagtatgtagtaagtttgaaatttaatctatatttgtagttgccaatcattattcacgtgatatctctccagaattaatatttgattcgaaaaaatatgtagctacatgctgtgctcagctcagatattgtaatttctttttgttatttctatttttaacattcagaccctgttaatttccttttattaaaccatcatggtacgtactgtcaatgaatacttgaggcctgttcgtcacttttatgtgacacttc

SEQ ID NO: 14188 - DNA, 1896 bp, Oryza sativa
  ref <308>: DATABASE ACCESSION NUMBER: AK064807
  ref <309>: DATABASE ENTRY DATE: 2001-12-06
ggcatttcctcccatagctcgcattcgcattcgcatcgcactcaccctctcctgcaagcaaagctaaagcttcggtttggttatttcctttcctcgccgcttttttctttgcttcttgcggtggccatggcggtaaggaggaggaggaggaggagtagagccgcggcggttctggtggccgcgctgcttctcgccgcctccgccgccaccgcctccgcggcgtcgtcttaccccgcgaaggtggtgaccgggttgctgtccagcacggcgtcggcggtggtgaagcagctctggtcgctcaaatcgaccgccacaaggacggggtcggcggcggcggggaggtcgatggtgaagtacgagggcgggtacgcggtggagacggtgttcgacggcagcaagctggggatcgagccgcacgacgtcgaggtcaccccctccggcgagctcctcgtgctcgactccatgaacagcaacgtctacagggtccagctgcctctgtcgcgatatagcagaccgaagcttgttgctggttcgccggaaggattatccggccatgtcgacgggaggctgcgggaggcgaagatgaaccatccgaagggatttacagtggacgataggggaaacatttatgttgcagatgctatgaatatggcaataagaaagatcagtgatacaggggttacaaccattgctggggggaaatcaatgagaggtgggcacctagatgggccaagtgatgatgcaaaattttctactgattttgaaatccgctacatcagcagtagctgctccctcttggttattgatagaggaaaccaagcaattcgcgagattgcactccacaatgatgactgtgaatatcagtatgaagctggttttccactaggcattgcattgctttttgctgctggtttctttgggtacatgcttgcattgcttcagcgacaggttttagggatggtatcaacagcagatgaacctcagactcctccaagacccagcattgcaagcatccctccatatcagaagccactaaagccttcgcttcggcctccactgatcccaaccgaagatcaagctgggaaacatgaggctgaagaggggttcttcacctcaatcggcaagctcatcggaggagcaaaatcatctgcggtagagatattctcacgaaagaaacgcccaacccatcagtaccatcatcaccttcagcagcaaagagccaacccttggccggtgcaagaaagttacgccatcccacatgatgagacaccgccaccattggacatgagagcagctactcctcggaaggactacgccttcatgacgaaggagcctgaaaaagttcaccatgtccgccatggccggccttacttcaacggctgggacatgcagcatgcccctcagcaacagccagagcagcagatgtaccaccagcagcacctgcagcagcacaggcagtactccgcaggcccgcaaactttctacgagcagagctgcgagacgacaaacgagatcgtctttggtgctgtccaggaggtggacaccaagcggcgaatggtggagatcaaggccgtgaactatggggacacattctatgagcagtacgggatgcggtatcgcaacaattacatcggctacaacaacagcagcaacggcaacaacaacagctactactattaaacaaccaacccttctgccctcaattttccccctctctctttatccctgtttctttcctatatgattagatttaccgctcgcgttttcgcttctcctgacctccgcgacgcctgtaacaaaagaaagaaaaagcgggggggaagtagaggcactaatcttcttcagtcctgacctgtgcaatgcaatggcaaacacctggggaggggtttttgtact

SEQ ID NO: 14189 - DNA, 1825 bp, Oryza sativa
  ref <308>: DATABASE ACCESSION NUMBER: AK064808
  ref <309>: DATABASE ENTRY DATE: 2001-12-06
gacccctatcctttccgcagctggtttccccctcccgcctccgaccacccacgtcatcaccacagcgacctctactccactctgccccgccgcccatggccgccgccgccgcggcgctcgcgagctcccccatggtccacctcacggcctcccggctccgcctccccaggcccgccaggtcccccgcggcggcgacgccctcaccctctcccgcgtccgccgcgtgctgctcgaggggcgcggcatgcgaaggtaggtggcgcggtggaggagatgagatccgagcggacccgctccggtagcttctcttcgtcctcgtcgtcgtcgtcagggacacccggtatatccaatgagccaccatttttgagcttcagtgttgataacatcgacacagtaaagttattggaactcctagggcccgaaaaagttgattcagctgatgtcaaggctattaaggaaaaacttttcggctacacaacattctggttgacaagagaagaaccttttggtgatcttggggaaggggtcctttttattgggaacctccgagggaagagagaagaaatatttgcaaaacttcaacagcagttacgtgaactcacaggtgacaaatacaatctttttatggtggaggagcccaattcagaaggggaagacccacgtggaggaccacgtgttagttttggtttgctcagaagagaagtttcagaacctggacctactacattgtggcaatatgtcatttcactgttacttttccttctaactgtgttctcttgtgttgagctaggaattgcatcaaagattagcagtcttccaccagagattgttacatatttcactgatccaaatgctactggacccccacctgatatgcaactcttacttccatttgtggaatcagctttgccggtggcttatggtgtcttggctatccaactatttcatgaagttggtcactttttggcagcatttccaaagaaggttaaactaagcattcctttcttcattccgaacttcactctaggaacttttggcgcaattactcagttcaaatccattctgccggataagaagacaatgtttgacatatcaatggctggtcctcttgctggagctgcactttctttctcaatgttctctgtaggcttgttgctctcctcaaatcctgctggggcaagtgatttagttgaagtacctagcaagctattccagggttccttgttgctcggacttgttagcagagcaacacttggctacagagctatgcatgctgctacagttgctatccaccctcttgtgattgcaggctggtgtggtttaacgactactgcctttaatatgcttcctgttggatgtcttgatggtggaagagctttacagggtgctttcggcaaggatgcgttgtttggatttggcttgacaacatactcattgcttggactcggggtgcttggggggccactatctcttccttggggcttatacgtgctaatatgtcagagaacacctgaaaagccctgcttgaatgatgtgagcgatgtcggaacgtggaggagagcagcattgatagtttcagtgtttcttgttgtattgactctcattccactctgggatgaacttgcagaggacctaggtgtaggacttgtgacttctttctgagatgaacttaccggtagagttaggccatgatgcaagtcaattttgtatgcgcttgtagtatccatagtgaaattgttgtaaaggcgtgcgaaattccgcttctaagtgaaatgttgacctactgagatgagccatttccttcctatggccagagcagttgtgc

SEQ ID NO: 14190 - DNA, 3194 bp, Oryza sativa
  ref <308>: DATABASE ACCESSION NUMBER: AK064809
  ref <309>: DATABASE ENTRY DATE: 2001-12-06
gtcagtgaaggaggaaagcgagcaaaagctgcaagatgttgtctttgcaaaaaccaagcagtgggagatgatgaaggccgaactagaagcaaaattagcttcttttgaacatgagcttattagagcaggtgctgagaatgacgcactctcaagatctcttgaagagcgggaacacttaatgatgaaggttggtggggaaaaagagcaagcagaatctcagatcgaagtgttgaaaggcactattcaatctggtgaaaaagagataagttcattgaagtatgaactacatgttctttccaaagaatttgaaattcgcaatgaagaaaagaacatgagtgtgcgttcagctgatgtagcaaccaagcaacatgtagaggatgtcaagaaaatatcaaaactggaagcggagtgccaaaggttacgtggtcttgttcggaaaaagttacccgggccagctgcattagctcaaatgaagctggaagtggatagctggggcagagaccatgctgataacagattgcgacgctccccttcaaggagttctaatttccatcatcctttgtcaccatcccctgataattctcttgaaaacttgcagcacatgcagaaagagaatgaatttctgactgcacgcttgttatcgatggaggatgaaacaaagatgttaaaagaggcgctgtcaaagcgtaataatgagttgcaggtgtcaagaaacacatgtgctaagacagcaggcaagctccgcagcatggatgttcatatggtgagtgctaggcagtataagaatccaacaaattcaaaccttgatgttcaccatgatggtgcactgagcctgaatggaagtaacccaccaagtctgacttccatgtccgaagacggagttgatgatgcaacaagttgtgccgaatcttgggccaatgctttgatatctgagctctcacacatcaagaaagataatggaggtaagggcagtttgacagaaaattccaatcagatggtactcatggatgactttctagagatggagaggttggcgtgtttatctcctgaaggaaaagaatgtggaagctttattgacaagaagaaggccactaaagttcacacaactctcactaccatcactaaacgggaaagtgatagagattcatggccatcctcgcagttcccagatacaccatccagcagtgagcatctgcctgagaactccccactttcaaaattgcactcaagaatttcttctctcttaggttctcattcaccacagaacaatgttggcaaggtcctagagggtatcagaaatatcctaagagatatcaaggaagaagcagaatcagtgagtgcaaaaaaaagaatcagcctgataacatgaatggacttgctgataatggatctttgacaaagcaatccaagaacctgagggatgtggatcatggtctaagacatgctattttggaaattcttgattttttccagccatttaaaagacaactatctgaggtccaaggtaaaagttcccaccaaaacacaatccttgagaaaatagaaaagttctccactatagctgacaaagttgtgctaaacgaaaatgctcttgccgaaatggtgattgcattagcggaaattttggcaggaaattctgctattaaactcacattgccgagagacagcatcactgaaaccgagagcaataatctggactatgttgataaagtgaccttattggaaaacaaagtgcatcatgagccaattaaagatagccttgctgatatttgttcacttgcgcctcattcgtcttctgatcctgactttgagggttctagggatgcatttgttgtcaaaaccacagtgcagatgtgctcaatggaggaatatgaacaactgaaatcggagaagaggaaattggagatggaattagcaaagtgcaatgaaactatcgaatgtagaaagcttgagtttagtctgatggagaaaaacatggaagagcttacgtcaaagttatctgcatgcgagaaatcgaatagcttgactgagacacagctgaagtgtatggctgaatcatacaaatcacttgagttacacaagttgaaattagaaagtgaaatagaagttatgcatagacaaataaatactttgagaactgaacttgctgatgaaagacaaaaccatcaggacgatttggcgaagtacagagatcttaaggagaagattgaaaggtatgagaatgagaagaatacttcatctgtagatgaggatgcaggtgttaaaataaagcaggacaaagagatcgcagcagcagcagagaagcttgcagaatgccaggagacaatattgcttcttggccgtcagctgcagactcttcgcccccctccagcagaaccactgggttctgtgttaaaccaacaacctgtgggggtgttttctgaagatcaagctagaacaacccaaggcttgcattttaagaagctgtcaggtcaatttgatacagatcacacattctcaagtgcaccgggaacaggaaacgtatctccgctaaatggatatagaacacacaaaagcccctccaatcttgatggaaacacttacttcgcttctccaaacaactccaagcgtccaaagcacagatcaaggtcttcttcctcttcctcatttactaaccagttcacagagaaacagagccgaggtttcagtcggttattttcgaagagcaagagcgaatactaaccgacttttgagcttgttttgcttgtcgtggcaagcactgcaggtgtatatttttgccaacaaaacctaccacctatttgtgtattatgtagatgatgcctgcacttaccagattctagtagtttttgcttgagattttagctgtatccatattcagtgtggttgtcagccgtcagtactaagaaccatcctttgccctggatttttttgggttgctgttactgcttatacctcatggaacctcactgtaaatttgcctagctacctcgatgaagattgagaaggtaatgttgttagcgtgaagagatttctcttgccaaggttcagttaaccgctagcttgtgttgtggttggttagttctctgtacagataacctgaaaaaagtttggagtttgctgtcaagtttttgattgtaaagtatttggatactctgtgtgctaacagtttggaatgtaatgtgttgccccagttc

SEQ ID NO: 14191 - DNA, 2109 bp, Oryza sativa
  ref <308>: DATABASE ACCESSION NUMBER: AK064810
  ref <309>: DATABASE ENTRY DATE: 2001-12-06
gaagcgattccccttcgtagttgtccgcactcgcgcgtcgctcgccggccatcgccgccgccgccgccgccgtcgccggtcgcaggcccgcctcggcctcccctgtctctgtctccatcctcgtctgccctccgcctggcgcccatcgccttccgccgtccatccgcggtgcttccgtactctgttcccatggcggcggcggcggtggaggagggaggcggcggtggtgccgtggcgcggatcttcgtgggtggtatttcggagggcgtggcggccgccgacctggaggccatgttcgcctccgtcggccgcgtcgccggcgtcgagttcgtgcgcaccaacggccgcagcttcgcctacgtcgacttccactgcccctccgacaaggctctcgccaagctcttctccacctacaatgggtgtaagtggaaagggggaaaacttaggctggagaaggctaaggagcactaccttactcgcctgaagcgtgaatgggagcaggaagcggcagcggcgcaggaaatgccagctagtgctgatgtggagagcaagaaggagaagctcgagctgaataaggctgttttggatagtacgaagattaacatctacttcccaaaactgaggaaggtgaaagccttgccttttaaaggcactggaaagcacaaatacagtttccggcatatcgaagtcccttcttacccaattcatttttgtgactgtgaggagcactgtggacctccagaggcagctaatgatgaatatgcttctgttcttgatgctgctgcatatgaaaaggagcgcagtattatgaattctgtgatgagcaagctctttgagaaggagaatgaccatttagattcaatggaaattcagaatcatggtgtcgattttgatgccgcggaaccctctaacgccaggaatgagttgcaaatggataaaagagaagaaacttctgaggaagatttggatgaccaaatggaagaaacagaagatccttctgaggaagaattggatgatctcgtgcttaacatcgtgacttgcaagccaaaaagctctgtagcacaattgaatagcgaaaagcaagcagcggataaggactcgcgcttcagaaaacgtcaacaatttgaagaatcttctctgcagaagaggcataaatcctctgatttctctgaaactagaaataggaaacagtctttccctgctatatcaggagccatccaaaatgaacaaaaatcttcagatttgtcaggaaaaggtacacatgagttctcatcagaactcgatggagataaaagttctgctagtgtccaagatgttgaagcactagcagattcttctaccagaaatgggagtgaacaaaattcgcttgctagtgaacctaaaagagtttccttgtggactcagaaatctgcctggagggatcttgttggtggcatggggagtgcatctttcagtctatcacaaatattgccaaacaccaatccagcaccaccaaaagtttcaaatgctaccgaggcctctgcttcacatgctgagtccaggacgaaagtgaaaccaagcgggaaatctttgaaaccctcggaagctgcaactcagctcttgcctgagcagaagatgcctacaagttccatggcaatgctgtctagtgagcgtaaggagaataataagctggaaaaggagagggtggttccaaagatcactattggtgaagtgtgtccgttcatgagaaattcagagtcagaaaagcaatggtcaaaggcaaagaaggttctgactggtttcatcaagaagggcaatgagagcactggatcgaatgtcgggaaagggaagccatcaacaaggagataacaacgtagcatgtcattccagcttcatcttgttgaactacaagctcggtagcatgtcattccagcttcatcttgttgaactacaagctcggtggtttcgtgtctcataggaacatgtgttattttgttgattggtctcatagtctgcctgttaagaatgatctgtctttgtttgtgaagcacaatgctatgtacgagttttgttcaaattgttattattctttgtacgagcaatttaaagtcaaacatgtttcaaaaagcg

SEQ ID NO: 14192 - DNA, 3354 bp, Oryza sativa
  ref <308>: DATABASE ACCESSION NUMBER: AK064811
  ref <309>: DATABASE ENTRY DATE: 2001-12-06
gatcgaaagaaggcagcggcggcgaccgtgcgagcgcgaggcgagcctgagtcggcggctcgcgaccccctcctcgctgaaactcggttggacaacgtcgtcattctctcgccattggctgctgcggcaaaacaaatccagcgcccatcccctaacgaggtctcccctcccaaccactcctctcccgttcccccggcggcggacggcggacgcggtggggttgacggccaaccacggctcagagcgcgcgggaggagcaaaccggggcgcgccgcagcttttgagagcgagagaggctactcacccctgtgctccagaggcggtgagtgaatcaaggcaacgaatccatccatcccccaccgtccaatccatagctgtggaattcggcatccgccactgccctgtcatcacctattttcaacaagaatcacatagtggtgctcctgggcctttggagggtggtctatgcatactatctcaatccccttccaacccttaagtgcgacccatacaaacaaactgacatcatggagcattgatgtcaggaattctgctagctttgtcaagttgccgagaattggactcaacattggaaacatagtcatgagtgccaagccgaattctggtttcagctcagaaacggcccaaggagagagttgcaccgttggtgagaaggatggtgtgatcattgttgaccatgggtcacggcgtgaagaatccaatctcatgctaagtaattgaatgactgtaattcttttcatggcgccttcaagcttttttgtttattgctctgtataattgcagatgattttgttgccatgttcagggcgaggaccggttacaagatcgttgagcctgctcatatggtactattcgttgctcatgcttttatgtgcgaatgtattttgtgaagattttgaatttattaagtacaacttatgtagtcttgttagagagaatctctttggagaatcaaaccgactttactcccatcagtaggagtcttgtggcgtatcacaattttttgactgaatactacaaatcaattaattaattttcgagtttgtttctgaatgacctatagtttttttgaaatcagaaattctggctgaccactgagcatgtttattaagtaacagttttctgatagcttccaatatctgccagttttgttcaatggctatgttactacctgttcgtcacagtttatgtgtatttaaccatgaaacctcaaagttgtatataccattagacgttttcattcacatgccaatatgagtagctataggattctccttttgtgtctgtattgcaaaacttctcgccagctgggtacaatcgtatagggtgttttattttctgtaactccaagattacttgtgcaatgtcccctcctgttggattgtgccatcattgatgttgccatcttgccattagactttactaaatggccttgtcttagctttggaaatagtaccagccatggccaatttattggtcaaaacctagcatgggaaaggattgaaaagacatattccctttacctataaaatgaattatttttcctcaatatgtttttttttatctgtaagtagaggaccataacagctgagcaacagtagtataggagataatcctttttttattacttcctcttcttttaatgctttttttttctgtgaaaaatattcttgtagtccaaaataagaaaccatgaagcttgattgtgacttagtattaaatgtagcatattcggttttctatgcaaagtgaaacaaatttcaaagcagtgcaagccctctgctgtctttgtgattattaatctgtagtctccatgttcgattggctgatttgtagattaggtttagttcagtttaattgtttaaatgcatgtgtttgttttgatccccttcgatatcaatttattgcagacacttagctagcattctgggtagagtaacataaaaaccatatacttcaatcttattctgatctttggattgtacacctggtgatagagggagggaagccacatcataaaattatagtatactcaaaccatagatgcaagcctccacatttatccatttggtggatccatgctgccaagaaggaatcgcataaataaatcgtgaagtgatttgattgtcaagggcgacttaagggacatgtgagtcatgacacatgttagtgcgatagtattatcatgcttctgttgtgttaggtcccctgcgccagggagccttaaccagaggaaggaaataaatgggtacagcaggagatgggaaaatagagaccttgtttctgcttaaaggaaaccaatctgacaccctgactttatatagctcgactgaacagagccgacaaccaaaatttgtttctaaacttatctctaacctctaaaagcaatctgtatggatacttgcacgacactggtcctgtctcccccgccatagcatgttaatattataaaatggaatgcacattatctttcagtgttgcatggacaagggtgctatagtcactacacataattaggtgtaagtgtaacttgagcgcttttttaatttgtttcatgaaaggtatatattgtcaaatgtgtctctatctactcctcaacttccaattgccttcttttttgtaatgttaatctgtatggctagttcttctggggcaatgaattattattaaatatattttcttatctctatggtctgtgtattttgtcactttaccttccattacactcttatagtagatgaatgtgtgcaggagctagctgagcctactattaaagatgcatttggaaaatgtgtgcaacaaggagcgtcccgtgttattgtcagtccatattttctttcacctggacgacactggaaacaagatatccctgctttagctgcggaagcatctaaggagcactcaaacataacttatgttgtcactgcccctcttggattgcatgagcttatggtggatgttatgaatgatcgcatcaagtactgcctgagacacgttgcaggtaatgttgaggaatgtacagtatgtgctggaactggaaaatgccaactgtacccttgaacacgagtacctgggaggttacctcattctatgtaaacgattctaggtactcaagtttaaatccaagtaattaaggccatggtatctcaacgccaattttttcatgcaatcaactaggccggagctatatatttttttggatgatttgttaatccatctacctgccatctaccatgtaacaatttactgaaagaaaaatgtacagtacttgtgggccgtgctctgtatggcctggaatgaagaaactgttaccttttgatggttttggagccg

SEQ ID NO: 14193 - DNA, 1125 bp, Oryza sativa
  ref <308>: DATABASE ACCESSION NUMBER: AK064812
  ref <309>: DATABASE ENTRY DATE: 2001-12-06
gagcggtgcggtcgtgcggataacgaacgaacgaagagaaagcatggcaatggcaatggcggcgatgagaggggcggcggcgagcttgggtccgggcgctgtgtcttggaactcgaagcgcttcttcctctcctcctcctccaccaccagccgcccccatcgtcgtcgtctacgcgccttcccgagctcggagcaaactctggaggagcttaacccttccgttgagctgctcaggaaaactgcggaggccgttggcgatttcaggaaaacacccatctacatcgtcggaaccgactgtactgccaagcgcaacattgcaaagctccttgccaattccatcatataccgctacctctgcagtgaagagctgctggaggatgttcttggaggcaaagatgccctcaatgctttccgggaatccgacctcaacggctacctcgaagtcgagactgaaggcctgaaacagctcacctccatgggcagcctcgtgctttgctgtggggatggtgctgtcatgaactcaaccaatctagggctactgaggcatggagtctccatttggattgatattcctctggaattggtggtgaatgatatgttgaagacacaagctacttcagaccctgattccttttctgaggcaatgagcagagtccgacagcgacacgatgaactaaaagagcgctatggagtttctgatataactgtttcagtacaaaatgtggcatctcaactgggctacagtagcatcgactcagtgaccctagaggacatggtccttgagattgtgaggcaaatagagaggctgatccgagcgaagtcgatgatggaagctgctgggaagcccttctaaaagaaggaaggatccattgatgtatagactgttggtcatgtatgtacctcctgatccctgaggaattgccttagatgttccaggaccaggaagcaaaaagtgccgccacagctactgattgattaattttgtaccgaatgatcaatcattcgattgatatttttacattcccttgtgacttgtgagggagacatatgtagcagaatgaaaaagaagtcgaatttattttcaaaaaaagaagctgtgagtgtggctagaatctacacttgttc

SEQ ID NO: 14194 - DNA, 3047 bp, Oryza sativa
  ref <308>: DATABASE ACCESSION NUMBER: AK064813
  ref <309>: DATABASE ENTRY DATE: 2001-12-06
ggtgtggagaggcgaggcgttcgagtttcgagaggagggaggggggacaaggaggaggagcgcaccaccctctcggagaggtcgcctccgttcttgcatcgttttctttggatagggcagcgctttgacagctttggggagttagtcgagaagtgtgcacatggagtccaacagtggtgaaatcgaggagttgccacctcccccacctttgccaccaaatgctgagccaattaaaactgatgatacaaaaaagttatcaaaacctaagagggccttgatggctcgctctggttgtggcaaaaaagggcagccgatacagctgctgacgaaccacttcaaggtttcactgaaggcagcagacgaatttttccatcactactatgttaatctgaagtatgaggatgatagaccagtggatggaaagggcataggtagaaaggtgctggacaaactccagcagacctatgcgtctgagctggcaaataaagattttgcatacgatggtgagaagagcctgttcaccattggtgctcttcctcaagtgaacaatgagttcacggtagttctggaagacttcaacactggaaagtcatctgcaaatggtggcagccctggcaatgacagtccaggaaatgacaggaaaagggttagaaggccatatcagacaaaaacttttaaagttgagctgaactttgcagcaaaaattcctatgagcgccattgctcaggccttgagaggccaggaatctgaaaacacccaagaagcaattcgtgttattgatatcatattaagacagcattccgcaaaacagggttgccttttggttcgccaatcctttttccataacaatccttcaaattttgttgacttgggtggtggtgtgatgggctgtaggggattccattcaagcttccgagctacacagagtggactttcactcaatatcgatgtgtccacaacgatgattgtgaaacctggtcctgtggtagattttctacttgccaaccagaaggttgatcacccaaacaaaattgactgggcaaaggccaagcgtgctccgaagaatttaaggataaaaacaagtccagcaaatactgaatacaagattgttggtttgagtgagagaaactgctatgaacaaatgttcactttgaagcaaagaaatggtgatggtgaacctgaaggtgtggaagtatctgtttacgagtactttgtgaagaatcggggcatagagttgagatactctggtgattttccctgtatcaatgtggggaaaccaaaacggccaacttattttccaattgagctctgctctcttgtgcctttgcaaaggtataccaaggctttgagtacactacagaggtcttcgcttgttgagaagtccaggcagaaacctgaagaaaggatgtcagttttgtctgatgtgctgaaacgcagcaactatgattcagagcctatgttgaattcttgtggtatttcaattgctcgaggttttacacaagttgctggcagggtgctgcaggcccccaagctaaaagctggaaatggtgaagatctttttgcacgtaatgggcggtggaactttaataataagaggctcattaaggctagcagtatcgagaaatgggcagttgttaacttctctgcacggtgtaatattagggatcttgtccgagacatcatcaagtgtggtggcatgaaaggaattaaagtagaagatccatttgatgtcattgaggaggacccttcaatgcgacgagctcctgctgcaagaagggtagatggcatgattgacaagaaaaaaaaagcttcctggacaaccaaagtttctgctctgtgttcttgctgagaggaagaattcagatatttatgggccctggaagcggaaatgtcttgctgaatttgggattattacacaatgtgtggcccctactagggtcaatgatcagtatattacaaatgtactgttaaagataaatgcaaagcttggtggcttgaactccctgcttcaaattgaaacatccccttccattcctcttgtatccaaggtcccgacaataatattgggaatggatgtttcccatggatcacctggacagtctgatataccttcaattgctgcggtcgttagttctcgtgaatggcctcttgtatcaaaatacagggcttcagtccgttctcagtcacctaagttagaaatgattgatggactatttaagccacaaggagctcaggaagatgatggcctcattcgggagttattagttgacttctataccagtactggtaaacgtaagcctgatcaagtcattatcttcagggatggggtcagtgagagccagtttacccaggtgctgaacattgagctggatcaaataattgaggcatgcaagtttcttgacgaaaactggtctccaaagtttacactgattgttgcacagaagaatcatcataccaaattttttgtgcctggatctcaaaataacgttcctcctggtactgttgtggacaacgcagtctgtcatccaaggaacaatgacttctacatgtgtgcgcacgctggaatgattggaactacaaggcctacacattatcatatccttcatgatgagataggcttctctgctgacgatcttcaggagttggtccactccctttcctatgtctaccagaggagcactacagccatatcagtcgttgcacccatttgctacgcgcatctcgctgctgctcaggtcagccagttcatcaagttcgacgagatgtcggagacgtcgtcgagccatggtggccatacctcggcgggcagcgctccggtgcccgagctgcctcgcctgcataacaaagtcaggagctccatgttcttctgctgagcagccgcttggctgctatgttatggcctgaacttgtggatgttttggtagtcttgtttatgtcgtgtttgtttaagtaccagctggggggtggatgttattaggctggatgccgcacttctgaacctgttaggataactactgaacctgtccatcttaatcgcagcttgttcc

SEQ ID NO: 14195 - DNA, 1673 bp, Oryza sativa
  ref <308>: DATABASE ACCESSION NUMBER: AK064814
  ref <309>: DATABASE ENTRY DATE: 2001-12-06
gattttagaacagactgaatcatcaacggaccagggaagcatggccttgaagcttctctggctgcatgccgacggacactgccagtgccacctctctctgctgctgcgcctcgtcgcttgcctcgcccttgtgctgctgctgccgccgccgccgcctgcccaagcggcgacggtggtcacccacctgccgggattcgatggtcctctacccttctacctggagaccgggtacgtgggcgtggaggaggagaccgggacggagctcttctactacttcgtggagtcggagcggagccctcgcagcgacgtcgtgctgctgtggctgtcgggagggccgcggtgctcggtcttcagcggcttcgtgtacgaaataggccctgtaatgtttgtcgcggaacgttacagcggcggcacggttccgcggttggagtataatccgtattcctggacgaagttggcaagcattctcttcgtggactcgcccgttggttccggtttttcatatgcgcacgatcccaaaggttatgatgttggagacatatcatcttctatgcaaattgtgaaatttctacgaaagtggctggatgatcatccaaagtacctttccaatccgttctatattggaggggattcatacgccggaaaggtggttcctcttatcacacagtatctctctgaaggaattgaagaaatgcgtcatccaatcattaatttaaagggttatctagtcggcaatcctagtgcaggagataagattgatgtgaactctagggttccatactctcattcatttggagtgatatctgaccaattgtatgaggctgccctggcaaattgtaaaggggattatgaaaacccaacgaacaaaccatgcactgacgtaatgcagaccattaacaatctcatgtcagaagtattggaaccagcatgtccctttgactggccatggccaatgccaggaagagatgcttccaataggaagtctctaaccgaggagcactattggttaggtgacccacctgttgaacctcctttcagttgttttgctgcataccgatactacctgtcttacttctgggcaaacgacaatgccaccagagctgctctcgggataaaggagggaacggtgacggaatggataaggtgccctacgggtcttccttacacacgtgatcttccaagcagcatagaatgccatttcaacgtcaccaccaggggttaccgtgctcttgtgtacagcggagaccacgaccctattgtgccattctcaggcacgcaggcatggataagatcattaaacttttccattgttgatgattggagagcatggcaccttgatggccaggctgcagggttaaattcacaatcaagtatgctaacaacctgacctttgcgacaataaagggtggttgccatattcctcccgaaaatcggcccaaggaatccttcattatggcaaaacggtggctggctggtggacccctctaatgtgccgtcgcgcacaatacggcatctctgaattcagattccgatcatcatcaacatatgtaatgtgctcattatattgagtaaatcaatataactagctggatggcccgtgcaattgcgcggctagcacccaaacaaaattatatattttttatatgattttacttaaaatttattagatagcc

SEQ ID NO: 14196 - DNA, 1056 bp, Oryza sativa
  ref <308>: DATABASE ACCESSION NUMBER: AK064815
  ref <309>: DATABASE ENTRY DATE: 2001-12-06
tccccagatccgaagcgagaagcctcttttggatctatccattcgggtcaccgtggcagttcggtaattttggcggagaggaggaggaggacgacgacgacgacgacgtgatgggtctcctcgacaagctgtgggacgacaccgtcgcggggccccgccccgacaccggcctcggccgcctccgcaagcacgccgccgcccgccccgccgccgtcaagatcaacgacccgacgacgctggccggggcggaggaggcgccggtgaaggtgacgcgcagcatcatgatcaagcgccccgcggggtacccggcgtcgccgaggagcgcggccagcacgccgccggcctcccccgccggatccacccctcccatctcgccgttcgccggcgccggtggtcgcttcagaaggaaatcatcgtccgacgcatatgagagggcaacacctgggacaaccagtcaccctcctccctttgaagtgtgagcccccagcgtgctcacgctcgtttttgctcctaggccagcgtctactgcacacacaaggcagaggaggaggagagacatatcagagaccgaagcggatggaagtcgagtgttgtctacctatcttacctctactactgtgatataacgtagatgctactagtaattaagtacgcctgctgctgctcgccgtctactatgttgagtcgtgtatggtttgtgtagtaaggttgtcgtctgctgtgtcatatatgtacatatgtttgctctgggctgcgatggagcttgctgcagtctgcagccaagcccgcagttcatcgctgcgtcgtgttttcgcgtccttttaagccctctgcaactatgtcaaatggatgggcatgtggaggatggtggaatgagctttcaggctgtgatgctaaagatggaagcactgatggctggtgtgtgattttgcttgatgtattatctgaattctcaagtagtagatgctttgcttgaaccttgtatatttgcaatgctcgaggcttcttggctagaagatgttttgcttgaaccctgtatatttggaatgttccaat

SEQ ID NO: 14197 - DNA, 3224 bp, Oryza sativa
  ref <308>: DATABASE ACCESSION NUMBER: AK064816
  ref <309>: DATABASE ENTRY DATE: 2001-12-06
ggtgctttgctcttctcgtctccccactggccgccgccacgtctcgtctcctcctcctcctcgccgccgccgccgccgccgcgggagaagggttgggttggtgaaagagagatgagggagatgatgggtcctccccgccgcggcccggcgtacaagacgaagctgtgcgcgctgtggaggcaaggcgagtgcaaccgcgcctcctgcagcttcgcccacggcgacgccgagctccgtggcccgccgcctcgttccccgttcccgcctcgcggtggacctggtatgcgcgcaccccctctccctcctccccttccccgtctcgctctccccttcccatctgcttttctgcttctcggcggttgccgtgtgctctcgatccgcagctaggtggctctaaatctgttcttctgcaatggaattactgtctccgccgatgttctattgtggacagattgtgccgattgttttctaggaaattattcagacggagtgaaactgggttgagtgtgatctgctatcagtttgaaaagtttgggggatattcatattttgagaagattcatggtgtcctaccatggccccaagaaagagcattctttttaaaataggagtatacatcgtttcatctgtttatgttggatttcgtttataaatcctgagaggatgggctgcatatgtggggaatatgacagacagtgcgggatgctggttgtacagcgaagtgaaagagatatcaattccatctgcgctgtgtgctttctgcagaaacttttggaaatgttgtggaactgagctagtagtaagagaaaatgattagaagaataccaaccatggtaacatctgacaagagctgccctgtaagataaacactgatgacctggtttctatctctggctacttgttggaagaaatatactctacagcctgcacctggtcatgtgatatcagcactagagtcatttatatacaaaactagagcgtaataattccatcagtttgtgtgatatcattttgttgtactgttttatcgcccatatattatccttttcttatagtactttggctgccaaagtttcatgaacaatgtgacatctttgctaatcatatttttgctactgtacaaattagctgttcccagagagattttctccaaccgactacttgcagaggatgacgcatcctattttcattgcacaccttttcagttggtaatcagacattttatggtcgctggaatgcttatcttgctacaggagatttcttgagggatatcatgtggtttcagtcagatgcatgttatcttaatgtgctaaagcacctagcagcttttgcaactaattgtaacaaatttgctgaatacacagcggcaaggtctcctcttgggctttattcttgcctgccattccaagtatgatcacagaaatataaaatttgaagtcaataccaataatatctggacaagtggaattaggtttgttcgacaatattggaatttggaagatctttcttcgtgataatctcagtatgatgtcaaaaattggatattccatccattattcacttctcatgactgacacgttacaaggtgctggatttattttttaagtggtgcatcatacacgtgatatgtgatcatatattggtctccctcatgcattagtctcattggatctgctcttttatgcccccctggggttatgttggtgcctctgctacttactgataattgaataatcatatggctcaaggttgtggtaagcttaatgggtttgtgtgctgcctcatatgtgtatagctcctctatcttttgtggcatattgcttctttgtacatatatgtatgtaaaaactaccatactgaattgtagggagacgagaccatagacctgatgactttagaggtaggcatctgagaccccataggaggaattcccctgaaagagatgccagggatcatttgttccgtgatcacagaccgcgctctcgagatagaggctctagtcattcaagatctcccatcaggaagaggcatagaaagaagcttgagggtggaaaaactaattcatcagaaagtttgaactcctctgataacgaagatagaaaaaaggatgatagattcaacaaagctgatgataaacatgataatgaagcacagctgcaacgcattcaactggatatggaagcattacatgaggagaaatcttcactggaggtgatactgaatggcaagatcaatgaagcatccaaactttctagcagaatagctgatcttgaatcacaattgaacgatgaaaaagaagcttgcgaaaggatggcctcaaaaacaaagaaactcatcaaagcacatgcacgctatgtgaaagctcaggatgatttaaagaggtcgcaagctcgttttgagaggttcgctgatttgcttgcttcagataccttgaagccgtgtagcaaggatcagggttctagtgctgctaaggaagatccatataatgcttatgaaatgagtccaagtgatcaacggcagaatcatgaaacaactagaaaaagatccgttgccctctcaactagcgaagaaggaaggaatgggaagaaaaggagagagagttatgacaacagggatcctatgtcagagaaatatagaccagaagatgctctagaaccttttcagagcagcaagggaactgaggcaaaagaactattatctgtgaagaagaatttgggggatggtgacaacaatgagaaaggaaatgttgtttcttctgcaaatgtttttacagataggtatgagggcggtgatgatgatgatgttcttgttgactagtaaattcatgcagatggagattgacaaagatttcagcagtaaggagtagggtgaagtatggaacatgcgttcattgccatgccagttgcgttttcacagactaacctgaaactaaggctgccagcctgttatttatcttaatgtatcatttaatacaccgggcattaggaattaagcatctcgataacttctgtggcgaagacgagttgcattgttctcaaacaggttattctcacatttgggcaaactgtgcgtcgttattaccatggattccaagtagcctgtatggataatgtatctggcagcctattcgagttaggtttggtattcatggattcatcattgtgttgtaaatttgtaatgctgcgatctttagcgtctgtgttactacagcatcccatggtttc

SEQ ID NO: 14198 - DNA, 2618 bp, Oryza sativa
  ref <308>: DATABASE ACCESSION NUMBER: AK064817
  ref <309>: DATABASE ENTRY DATE: 2001-12-06
tcccacccgctgctgcttcctcgcctttccgataagaagcttcgccgtctcctcctcctctttcccttcctccgccgctccatcaaaaaatctccacaaggcttaagcagagggagggtgagggattagaaacaaacaacccttcggagaaaatcacgagaggcttcccgagggcaaagtctccgattcattcaggtccgactcgatcggcgatccgacgaagctcgagcaggtgagggagacggactcggactcggagcacggaaccggtatattagggaggctgaagagggagcttgagagggggtctagccttaagctcgaacgcggggtggtggttgtaccagcagcagcagggaatcatggactcggagcactggatctcgagcctcgccgccgccaagcggttctacgcggcgcagctcggtcacgtcgacgatatggcggggattggaatggaggaggtggagatggagatggaggatgatggcgagggcatggagctggagctggagatgcagctggaggaggcgacgtggccggacgtggcctgcccctactgctacgaggaccacgacatcgcgtccctctgcgcccacctcgaggaggaccacccctacgagccccacacctcggtgagctcctcgccgccatgccctgcgccgcagggctccttgctctgacgctctgatgacatgacgcacaaagtctggcaaagctgctccttttgttcgattagtaggaacgctgtagctttaggggttgacttggcgaatgaactcaatatttgggctacttgtggagttgcggtagtagcaaacttgcggggtatcttcttgaaatagccaaaattcttgagatgatagtattatgcaaagctcctctagccttgagttcttgcctctctatggcttggcttgcaatagtttgtgagcaaagaggtagaatctttggtatctgtatagtatcagtcaactacggagcataagcttatggattcagaacttggctgaaaacactagcgatttggaccgggaaattgtgattttgtgattcgtaggtagggaagttgtgttgtagttttaagggcaaggataattatatatttcttataagaactgtagattatgcttgactgaaggttttaaatcagtagccagcattgttcacttctgtagttgactgctctagcttgtagttgtgtgttctatttcaaggcctacttctgtaaacaaggtagctaatttcctttttatttgattgccactatagtacttatgtcactgcgccgactgtgcaccctactcttggtggacagctgctcagttgtcataaactaaatgttcatgaataccatgacttaaaaacgtaatcctctgttattcatctaacttcagcaacaggagttgattttgcaatggcacaaaataacctagaaaagttaatgatggtaatgtgatttagatttaaaagactcgaactgttgtgtggggtccatttttaagatttggattcattttattctagtgaaacagaggtgtttgagaatgccatatatatacttttaatgttataatctcgtctgaagttcgagatgttaactgcagaaatcctagaatctgaaataaccattgtgcttatttgaatctttcgctaagtttagtatcaaataagcacattgggttcaaagtatattaaatcagcaccttatgttcatatattgtgcacataaaatgtgcattgtgttcttctcctgatttatttgctttgctttgctttcagccctgtcccatctgcttcgaaaagattacaagagatatgttaaatcatatcaccatgcaacatggttacttgttcaagagtggtcgcaggatgcgcagattcgatattcccgagagccaggcactttctttactgagccgagatctgcgggatgctcagttacaggcacttctaggaggtggtcatcgtcagcgaagaagcaacactactgccacaaacatttctgctgatcctctgctttcttcgtttggcctgggcttctcaacattggattcagaggaacgatcaaaagcaccagttcctattcctgatgatacatcaattcataaggatactcctgctcagccatgggaatcaaggatcgactcatcgctcacgagtgaggaaagggaacaaaagcggaaacaagccactgacagagcaacctttgtgcaaggcctggtgctctccactttatttgaagactgactgttcaagtagccctagtttttcttgctagatgcatgtttcctctcgctggttcccataaaagcgcaatgttccacctgatttggtgaatctgatttcgtcaacagtgagatggatgtgcttctggtgccccgttgttctttcgcttcagtaaagcgcgaagttgatttgggcatgatacacaccttaatttatgtcagctgccctgtaccattgctttttatgaattaacgggtagccacaccttgactgtaactcgttgttgtacctctccatactgtctaggaacattggtttgtacaaacataaaagctgttacatgttgtacaatgcaaaggcaaatgcagaagcaccgtttatatcgaatc

SEQ ID NO: 14199 - DNA, 1164 bp, Oryza sativa
  ref <308>: DATABASE ACCESSION NUMBER: AK098849
  ref <309>: DATABASE ENTRY DATE: 2002-08-28
gtcccagccagctcgagcgagcgaagccagcagcagaagcagtagagagaaagtagagagatggaggggaaggaggaggatgtccggctgggagccaacaagttctcggagaggcagccgatcggcacggcggcgcagggctccgacgacaaggactacaaggagccgccgccggcgccgctgttcgagccaggggagctcaagtcgtggtccttctaccgcgcagggatcgccgagttcatggccaccttcctcttcctttacatcaccgtcctcaccgtcatgggggtcaacaactccacctccaagtgcgccaccgtcggcatccagggcatcgcctggtccttcggcggcatgatcttcgccctcgtctactgcaccgccggcatctccggcggccacatcaacccggccgtcaccttcggcctcttcctcgccaggaagctgtccctcaccagggccctcttctacatggtgatgcagtgcctcggcgccatctgtggcgccggcgtcgtcaagggcttccagaagggcctgtacgagaccaccggcggcggcgccaacgtcgtcgcgcccggctacaccaagggcgacggcctcggcgccgagatcgtcggcaccttcatcctcgtctacaccgtcttctccgccaccgacgccaagaggaacgccagggactcccacgttccgatccttgccccactgccaatcgggtttgcggtgttcttggttcacctggccaccatccccatcaccggcaccggcatcaacccagcgaggagccttggcgctgccatcatctacaacaggggccatgcctgggatgaccattggatcttctgggttggccccttcattggcgctgcccttgctgccatctaccaccaggtggtcatcagggcaattccattcaagagcaggtcgtaacctgcatcagctattatcactgtcaagatgccaatccagagcaagctgtttctggtgggcgcggctgtttcccgctgcctgctttgttagtaattattgtggagtcgacgttcctcttcaagtttgttgtactactgtttttatctgaacacagacttgtaatttcagtactcagttgtgtatccctcttttactatgtgcaaattaagctatcctcctcctattggagttcggttc

SEQ ID NO: 14200 - DNA, 2261 bp, Oryza sativa
  ref <308>: DATABASE ACCESSION NUMBER: AK064818
  ref <309>: DATABASE ENTRY DATE: 2001-12-06
gggtagcggaaacttgtgtccggtgctctccgcaatccggtcgacgccggtcgtttctggcgctcgcggctcgccaatggccaaaccaacgtcgtcgtcccaatagtccccttggcgttgttgccaccgcctcctcccgcaccgcgatgccactcctcgacaccccctacctcgccctccgcgttcgcctcccccgcttcccgaccccccacaatcccagacccgccgttgccatcgaagcccagcactcctttccccacggcctgctcgcccgtgccgcgtgccagccgctccgtcacgtcgcggctccagcggagggggagggggaagaggtagaggacctcggcacgccgtcggctgcggccgtggcggaggccatccggcgtgcttcgagcgcgtcgccggtgcgtttcaggagggtgcaccgggaggagaatgagaagctgcgaggagagggaggcttcacggagcccagcaccgacttccggcgactgtgcggggagcagctcgagatgttccgggtggtcatctcccgcgacgccgtcctctctgtgtatgtaagacctgctggcagttatattatggatcagcttgaattacgtcgagttgctttatatcctgaaactaatgtttctaaaggagatacagtgattctagttggtaatttcaccatatctgctggactaagagcagcggaagcttttcttgtaaaacaccagatggaaatcataactgaatttggagctgtagtccttccaatggtgaaacacccatttgttgttggtttccttgttgcggagctcccagaactagttggatgtacaaagaactccgagacttctgatattcagataccatcacactcattcttagacaagtcatcagatataactccatatactaaaggggaaacttgggattttcaaacttctggagaccaagctaatagttatgctcagttagttactgaatggaaaaatagtgcacttatgatttctcgaactttagcaatggcttatgtcatggaccagaaagcatatttgcttcagcaagcttcctggcaaaacaatattagaatgagtggcttagtagaacagattcgaggacccctcgctaatataagagctcttgcaaagatgttatcagttcatacaaagagaaatgagatctcttatgatattgttgaagacgttatgatccaaggtgatcatttgaaagatgctttgcaacagattcaagatgcagtttatctgactaaggtgaacatagttaggtacaatgaggaaaccttaaagaaaattcaggggtcaccttcttcaagaactctaccacactatcaatcagatcctaagaatagttcacagaaagttgattcgttgtcatcacatgattctgacaatggagacatggtgatacccatgccacctctctggctggcccctcttcaaccccaagacgctaggcagaccatgtgatctctctgttgtactggaagatttggttggagcagctcaaccgcttgcttttaggcagcaacgcactctagatgtaacaggaatttcacacccgcttcaagttgctgttgaggaatctgctttaagacaagcgctgagtaatctcatagagggtgctcttctacgcactcagcttggtggccgagttcagatatatgctggtgaagcacctgcaggaggcattctcgttgtcattgatgatgatggtcctgacatgcaatacatggattaacagttgcccgtgagatacttgagaactatggctgtgttttgcgtgtgatatcgcctcggagacctgatgcaattatagggactggaggtagtcgtattgagatatggttgccaacttcacagacagaactatctgagatcactgaaggagcttagctgaattttagtaatcaacgcatgtttagaagataaagcaggtcatgtttaattggcatgatggagatcataccaccttttctgttttggaaatgttcgaacgacggctgcaaagtgagcttatacttctgattagatcagtcatcagtgaagcaccatatgaacatctttacacgcattccagtaaagcatgttacctgtggaaaaagcaccatatgaacacctttggacgtttttgtagcataaggaactgtagcacggtatacagtttgtatggtagagctagataccgcacttatgaaaagaagtacttttttgttgtttcgcagagctatggcctatgggaacttcatgagtatc

SEQ ID NO: 14201 - DNA, 725 bp, Oryza sativa
  ref <308>: DATABASE ACCESSION NUMBER: AK064819
  ref <309>: DATABASE ENTRY DATE: 2001-12-06
aagtagctatacagaaagcaaattaattaagcatccaaaatggcttcctccccaagcacagtatttcttgtactgtccctaaccctagccaccgtctccgtcgtcgtcgtctccggcgccggcgaagcgccgtcgaaggaggtggacgccacggcgacggcggccgccggcaggatggcgccggcgggatgggcggcggcgtttgcaggggtcgtgaccgcggtggtcgccgtgagcctgctctcgtattgatgagcaggcatgcatgcgatgcaggcgatgcacatatcgttaatttacattgggtttttgctcgatatatgctacgcacaagcacgctccatttcgctctgttaatatgttgtgtacaaacaacattgcattttgtttatcagatgtataccttgtgaatgcatgttttacattccaagttactgcaccgatgtagttttataatttacatatacgctcaactttaattcgtacacactgtgtgtcatctgagtcaaatagtactagtacttgttttgtgcgtcagtacctcactggggaccacctatacatttgtcgataaattttctactaaaaatttgacagatgtaattatagtacaatcatagtgtaattacactgtaacttgtatgtaattacactgtaacttacatataactacagtgtaacttgtatgtaagtttcacgtaattttgaatagttagatctattac

SEQ ID NO: 14202 - DNA, 1369 bp, Oryza sativa
  ref <308>: DATABASE ACCESSION NUMBER: AK064820
  ref <309>: DATABASE ENTRY DATE: 2001-12-06
gaattgacttgttcatttttgcaagctgtaggtctggagagtggagaggaagaggaatcctcctcagtcctcaccttcagatttcagaacacaggcaatcggccctagctgcaatccaacaagatgggcatgcctctgctgctgctgctgctgatcctcgtcgctgctggcccccaggcaggcagagctgcaaagccaatcccaaatctccagctcatgaccaaggagggcggcagttcaagaatcatccaggacgacatcataaaggcaatcaacaagcatcccaatgctggctggacggctgcacggaatccatactttgcaaactatactactgcgcaattcaaacatatccttggagtgaagccaacaccgcatagtgtgctaaatgatgtccctgtcaaaacttatccaagatcgctgatgcttccaaaggagtttgatgccaggtctgcatggtcacagtgtaacacaattgggaccatacttgatcagggtcactgtggctcgtgttgggcatttggtgctgtggagtgtctccaggatcgtttctgcattcatttcaacatgaacatttcgctatctgtcaatgacctagtggcatgctgcggtttcatgtgcggcgatggttgtgatggaggctatcctatcatggcatggcgctactttgttcggaatggtgttgttaccgatgagtgcgatccatactttgatcaggtcggttgtaagcatccaggatgcgaacctgcttatcctacgccagtgtgcgagaagaaatgcaaggtgcagaaccaagtttggctggaaaagaagcatttcagtgtcaatgcatacagagtaaattctgatccacatgacataatggcagaggtctaccaaaatggccctgtagaagttgctttcaccgtttatgaggattttgcacactacaaatcaggagtatacaagcacatcacaggtggcatgatgggtggtcatgctgtcaagttgattggatggggaaccacggatgctggcgaggattactggctgcttgcaaaccagtggaacagaggatggggcgatgatgggtacttcaagatcataaggggcacaaacgaatgtggcatcgaagaagatgttgttgctggtatgccctcgacgaagaacatggtgaggaactatgatagcgccttcggagtcggaacggccatagtttgactttaatcaatgttaatggcctcaaatacggttgggatcatgtaaatttgtcctgggtgatttctggattttgcacacacgggcaggcttctcgagactgatcggagtttaggctacttgtccagaaacacattggaataatatctgaataatagatgtattctctctt

SEQ ID NO: 14203 - DNA, 743 bp, Oryza sativa
  ref <308>: DATABASE ACCESSION NUMBER: AK064821
  ref <309>: DATABASE ENTRY DATE: 2001-12-06
gtggagtctgaatccccacgagacgagaaacctagcaaaaatctcgtctttcgccgcgctctccctcctctgattcctgctgttcttgatcttggatctcaattcccaaccaagaacacacagacagagaaaggaaggagaagaagatgtcgaacgacaacaagaaggtgtataccctggaggaggtcgccaagcacaactccaaggacgactgctggctcatcatcggcggaaaggtatacaatgtgtcgaaattccttgaggaccatccaggaggtgatgatgtcttgctatcttcaactggcaaggacgcgactgacgattttgaggatgtcgggcacagcacgactgctcgtgcgatgatggatgagtattacgttggcgacatcgacacatccacaatacccgcgaggacgaagtacgttcccccaaagcaaccacactacaaccaggacaagaccccggagttcatcatcaagatcctccagttcttggttcccctcgccatattgggcctggctgttgcaattaggatctacaccaagtcggagtccgcttagtgctgttctcttagtgttataagagtggaaggtaccgaataagttagcaagagttttgtgtgattcataccagtgtaacatgtcatgaattcgtcgaatgttctgaagatgctgtgggttttgtggtcctgggatgtccacttcggtaaagatcgataagattcaaagtactcgttaatcgtt

SEQ ID NO: 14204 - DNA, 2516 bp, Oryza sativa
  ref <308>: DATABASE ACCESSION NUMBER: AK064822
  ref <309>: DATABASE ENTRY DATE: 2001-12-06
gcttcctctcctcttcctcccaagaatccccatagctcaagcaaagggagagagcagcagcagcaagaggagcacgcggggagctagctagctccgccgccgccgacgagctccggcggctcgccgttatccgctcgctgatcgagccgtgtgcgggtgagaaagaaaaagaaaaaaaaaagatcgcgcctttttggcggcttcttggggtgtgaatccacggtttccccggggtaggatcttgatggggctcgaggaaggcggcgcgatgagggcgctgatgcggcggaagcaggtggactccgaccgggtccgcgccgccggcggccaccagctcgccaaggagctctccgttacgcagctcgtcgcgattggtgttggttcaacaattggagctggagtatatgttcttgtgggaacagttgctcgggagcatgctgggccggcattgacactttcatttctgatagctggagtggcagctgcactctcagctttctgttatgcagagcttgctagtcgctgcccttctgcaggaagtgcctaccattattcgtacatctgcgttggcgaaggagttgcatggctgattggttgggcattgatactggaatacaccatcggcggatcagctgttgcccgtggcatttctcccaatctggctttattttttggaggacaggatagtctaccatggtttttagcacgccatgagcttccatggtttgatgttgttgtcgatccttgtgcggctttcctggttctcgttgtcaccgccttgctatgcaaggggataaaagagagctcatttgtacaaggagttgtgacagtcctaaattgcttcgtgatgctatttgttattatagccggcagttacattggcttccaaacaggatgggtcggctataaggtggctggcgggtttttcccttatggggcgaacggaatgcttgctgggtcagcaactgttttctttgcctacataggctttgattcagttgctagcactgccgaggaggtgaaaaatccccaacgagatctgccactgggaataggaacagcattgtcagtttgctgttccttatacatgttggtttcagttgttatcgttggtctggtaccatatttcgctatggacccagatacccctatatcatcagcctttgcaagacatgggatgcactgggccatgtaccttgttacaactggtgctgttcttgctctttgctcaaccttgatgggatcgattctgccacagccaagaatattgatggccatggcacgcgatgggcttttgccatccttcttctctgatgtcaaccagcggacacaagttcctgtcaagagcacaattgttactggcatatgtgcagcttgtctggccttcttcatggatgtgtcacaactggcaggaatggtcagtgtgggcacactccttgcattcactatagttgctgtgtccatcttgatcctcagatatgctcctccagatgaggtacccctgccatcttctctggaagcgtcattccgtttgagccaagaatatgatgaggaaaaggttaggggtcctcctgtagatgcgaatcatgaacagttgtcatctgtggtagaatcaataaatgacacccttatcgagaagaagcaagacacaagtgtggaggagtcaaagcgtcggaaagcagctgtttgcagcatatcatctgtatgtgtaggggttgtggtcctcacaacttcagcttctttcacattcttgccattccttttgcgatgcttcttctgtgtttttggtggcctactcctcctagccggtctcggtgtcctctgctatatcgaccaagatgacgggaggcactcatttggtcactctggaggattcatctgccccttcgttccgttgttgccggtgatgtgcatcctcgtgaacacatacttgttagtaaacttgggtggagggacatggatgagagttggggtatggctggtaatgggagtattcgtgtacattttctatggccggacccacagctcattgaccgacgtggtgtatgttccggtggcgcaagcggaagagatatacggttcatcatcttcatcaggatttgtggcctaggtaaggagcagagtaccaaagccttgagtgatgaaatgctccaaaatcaattttaccacactttgaacaaacctggctgaaagggactcctgctgctgcgttctgtattgcatgccaggcatatgggtttgaagaattcaattcatatattgatttttaaattgtataaattatagtgtaaggtcatatttcgtataagcacctagttgaatgaatgtgaatattaaatagatatataatgaagataaggtctgtaatatgtgtaaattcactagagtatatcccagcttctgctgggaaaattcatatttccatgtaccttttgcactcgaggtcttcttgagtgggaaatgctgaagaccttggtcagatcctgcaacatgaataaagtcaacacattcccatt

SEQ ID NO: 14205 - DNA, 2973 bp, Oryza sativa
  ref <308>: DATABASE ACCESSION NUMBER: AK064823
  ref <309>: DATABASE ENTRY DATE: 2001-12-06
gaggcgcttctcccccccgaagctcgcgcgcacgcacgcacgctgggcgcttcttcttcccccgcgcatcgtccgaaatcctccggattttctgaggaatccccccgaatttccttgcgtcccatcatggcctcctcagatgtctccgttgatgttcggccagagtttaactcttttgatcatttgagaagcatacgatatattgcaacagatagaccatggctgacgttatatggaataagagttcaacctgtaacaccattcagcagtttgagcagtagacctgatctggcactcattcatcaatgcctacctgatgagctgctttttgagatctttgcaaggatgagtccatattctttagggagggctgcttgtgtgtgtcgcaagtggaaatatactgtacgcaatccgactttgtggcggaatgcttgcctcaaaacttggcagaggactggaatggaggctaactaccagatggtgcagtcgctatatgattcttcttggaggaaaatgtggatgctgagaccaagaatccaatttgacggtataagttcaagaagaattttatcataacatatgttcaaacattaatttgatgaatgttaaattcatatgcgccaactaggctaatatcatagcacacatcacattctttagatttgtgtggaaagaaattgtctagattttaatcaaactgataaaatgtctcatcatgagctgtttttctctcacttggctgtttaaaattttaatcaggtatgtactgtacaatactggtaccttggtcaaatattgtacaaaagtatgtaagcaaagtaatgtgtcattcattctcaaattttcatgtgtcactagcctagagctcgtgcattgcaacagaaaacaaattgagtttctagcttattaagtcaattaataagcacttatttagtctaagtaatactatgaattttcttttaaacaaataggtgattttgaaatttgggggagccaatagtgaaataggggatgacttgttgaaaggtggtgtaataatatagattgtgcggcccagatgttagtggtaggggtggtgtgggaatggacaccaccactactaacattttaagtagtatagataccggcatacatgtaaaacaacaaaatactactactgtacacatgcatcatactcttgtgaattggctgtgcaaagacggtggtgggaggaggtgcatagcagcgtggaggcggacaaatcacagcatgtgctcaggcttgaacattgtgcactgagcccaggaagaatcacaggttcagagcagaagagctgcattgacatgttgatacactgtgcaccagtaaaaaaaatctaggccagaggaattttttaaaatcattgctgtctcgcatagcttcatgaggtgtagctttttcataacaccaagatctggttccgatctgtctcatctaactgtttgtgccaccatgtttacttgtggccagaggctgctcaactcacttgtcaattccaaaaatgcatgaacaacaagaaaacattttgttgcacagatcttggagcacaaccaatggctgatcggagttcgtatgtacctattttgctgcctaaaaaattccaattattactggtccaaatgaaatggacatcaattattatggtgacaagtgaatgatcagttgattgtttttgggaatgtgtatgccagtttatctgttcaatacactgaatttcacgcataattctatgtttattatcactatggtacacattgatttcgtgcattcactttgggttgcatgctgagacaccatgacatttttaaagtacagtaagaatagtatgaccccgcagtgaatgcgcttttgactcattaatgaatgtatgtcgaggcatatcaggctgttacattttgactgaatttcagctgcagactaatcctgttgcatactgcgataatagtgtatttggatcagtagtttgctactgaagactagctgaaaggcattgcattagttttggaacttttctgttgttattgctgtaattgctagagtaccctgtattgtggctatactttctttggttctttgagcgaaatttgatacttgttgcttcttcaggtctttatgttagtaggaacacatatatccatacggggactgcggagtggcagttcacaaaaactgtcaatgtggtttgctactatcgttacttgagattttttccaagtggaaaattcctctacaagatttccccacagaagattaaggatgttgtcaagtgcatgcatttccgggcatccaaaggtgattgtgtatttaaaggcgactacgtattgtcagaggatggccagatagaactggcactcctgtatccagggcgtcgctacacactagttaggatgcgcctcaggctagaggcacaactctgggcgcaaacaacaggttggatgtattgaagatcttaaccaccggggtgaatgcaaccgaactgagaaactggaaaggcagcgtgcttgaacttgtggagacctgggatgaggatgagacgcatgatccagaagttcctgctgttacccacagcaggggtttgaccccatttgtgtttgttccatttgaggaggctgatacttcagtgatgaatctgccagtggagaagatggactactttgtccctgggtgatcttgcgcacaaataatagtttttccaagatatatgatgaagacgcaatttcgctgatgttagggcaataatgtgcatacaccatcagacgtcagtctttgttcaatttcatgctcatgttgcttgtatactgttgtatgaataatgctatgttttgttggtgcttgaaagcaaacattttgttggaccatcctcccgcagcaataatggtccaatacttactagtacatggtgttgccttgtaaatagatcatggtgcaactgatgaaacaatacatttgtggttc

SEQ ID NO: 14206 - DNA, 2080 bp, Oryza sativa
  ref <308>: DATABASE ACCESSION NUMBER: AK064824
  ref <309>: DATABASE ENTRY DATE: 2001-12-06
gagtgcagtagtagtagcatgcaaaggatttgccctgctcactgctcggtcactcactcactcaccatgaagtccatgaggctttcctacatccctcctgctgcttctgctgctccacagagccccagctatggcaggaagaagaacgcctccgccgctccgccatcggctgccgcctccaccaccgttctcacctccccgctggtgaccaccacccgcactccgaagcagaccgagcaagaggacgagcagttggtagccaagaccaagactacgagaactgttattgctacgacgaatggcagggcggcgccgagccagtctcggcctcgccgccggcctgcccccgccgccgcggcgtcggccgcttcgctgccgatgacgttctgcaacgcgctggaggaggtgatcaacacgttcatcgacccgccggcgcttcggccggcggtggacccgcggaacgtgctgaccagcaacttcgtgcccgtggacgagctgccgccgacgccctgccccgtcgtgcgcggcgccatcccgcgctgcctcgccggcggcgcctacatccgcaacgggcccaacccgcagcacctcccgcgcgggccgcaccacctgttcgacggcgacggcatgctgcactccctcctcctcccgtcgcccgcgtcgtccggcgacgaccccgtcctgtgctcgcgctacgtgcagacgtacaagtacctcgtggagcgcgacgccggcgcgcccgtcctgcccaacgtcttctccggcttccacggcgtggccgggatggcgcgcggcgccgtcgtggcggccagggtcctgaccgggcagatgaatccgttggagggcgtcgggctcgccaacaccagcctcgcctacttcgccggccgcctctacgcgctcggcgagtccgacctcccctacgccgtgcgcgtccacccggacaccggcgaggtgaccacgcacggcaggtgcgacttcggcggccgcctcgtcatgggcatgaccgcgcaccccaagaaggaccccgtcaccggcgagctcttcgcgttccgctacggccccgtgccgccgttcgtgacgtacttccggttcgacccggccggcaacaagggcgccgacgtgcccatcttctccgtgcagcagccgtcgttcctgcacgacttcgccatcaccgagcggtacgccatcttcccggagatccagatcgtgatgaagcccatggacatggtggtgggcggcggctcgcccgtggggtcggaccccgacaaggtgccccgcctcggcgtgatcccgcgctacgccaccgacgagtcggagatgcggtggttcgaggtgccgggcttcaacatcatgcactcggtgaacgcgtgggaggaggccggcggcgaggagctggtgctggtggcgcccgaagtcctctccatcgagcacgccctggagcacatggagctagtgcactcctgcgtcgagaaggtgcgcatcaacctccgcaccggcgtcgtcacgcgcaccccgctcgccgccgggaacttcgacttccccgtgatcaacccggctttcctcggccgccgcaacaggtacggctacttcggcgtcggcgaccccgcgcccaagatcggcggcgtggccaagctcgacttcgaccgcgccggcgagggcgactgcaccgtggcgcagcgcgacttcgggcccgggtgcttcgccggcgaaccgttcttcgtggccgacgacgtcgagggcaacggcaacgaggatgacgggtacttggtgtgctacgtccacgacgaggccaccggcgagaaccggttcgtggtgatggacgcgcggtcgccggacctggagatcgtcgcggaggtgcagctgcccggacgcgtcccctacggcttccatggcctgttcgtcacgcaggccgagctccagtcacagcaccaatgatacaaaccaacgtagcaatgtatagaattcacgtatacattttccatacgaaattacgagttactgtggaacacgtagtataagtgcacacatacttcgagaaaattatgtagagtacatatgaaatgaaagaatgattttaacc

SEQ ID NO: 14207 - DNA, 1591 bp, Oryza sativa
  ref <308>: DATABASE ACCESSION NUMBER: AK064825
  ref <309>: DATABASE ENTRY DATE: 2001-12-06
gaaccggcggccttgaagtctttatctcgatcagttgcccacttttgcagattgcagggcgcgcagtactgccgacagcaactcaaggagaaacgcaggtgcctgcctagcctcagcaggcaggcatgccgatcccggttgatctgggcgagcctgacaacaggaggttcttcgtgtgggtggaagacaatatattgacgatattaccacctgatgccgatgaccatgagtactctggatttaatatgtggaccgtccaaaagccttcagctggctcaaccgccattaacttattatttccaggaggcgcaaccgcagctgaactaatgtacgccgttcctggagcctccaagtgctccaaacccgaggatgatgatgccgtatactgcgtcgaggcccaagttcacttcattggagaacaacttgacggtaccgagttcgtttcaacccgagaaaatggtgttccacaaaggtttatactgggacaagagaatgtgatgcatggcttaagcttggtggtcagcgcaatgcgaccaggggagagagctatattcaccatccctccaaagttagccataaccaagtctggctcccctgccagtattccgtcaagcatacctcccgagcaaacactacggtttgagattgaactcatttcgctgtttgctataactgatatcctcgaaaatggaagcatattgaaaaagatcatcaagcgcccattaccggacaaatctccctccaatcatgcagatactgtaattgtgaattacaacgcatgtctagaagacggaaattcagtttccaaatctgaacgtcttgaattgaaccttgccagtcgtaccggtttcttttgtccagctttgaaatatgctgtgaagactatgagggaaggagaggaagcgatattcattgtaaagccaagatatgctttcggtgctcaaggcagggattctactggagaccaagctgctgtgccccctgatgcaactctttatctgtacgtccagttagctgaacggaagacagctaaacaaaatgaagcagaggaaaaaggaccattcatagatggcccgaatgaagccaagacgacagccagagctcttcccaagcgtcgtcctgtcaagccgggattctccttgcctgtagtacagaatgatagacctacgtatcctggacacgttctcttcgtcccacatgtggtagaagaagaggaggcagatgcaggccaagctgcttcaactactactagtggtcttgctacaccgccaacgactgccgccgatgttggcacgagtgcagccacaaacagcagcgctgctcaaggctcggggatagtcaagacggagacaggtttcctcttcaaacgtttcaggccatggcctgcaaactgaagcgatcattcgtgatcaattgtgccactgtgtcatcaccggatcattcgtgatcaattgtgtatttcggttatactaataagcttggactcctaaggtgattgtactcgtgtcaggtcgcgttattttgagtgtatccctttattgggttaacgtacttttacttctctgtatatcaataaaataagacagttttt

SEQ ID NO: 14208 - DNA, 1719 bp, Oryza sativa
  ref <308>: DATABASE ACCESSION NUMBER: AK064826
  ref <309>: DATABASE ENTRY DATE: 2001-12-06
ggatttttcttatcccctccctcatcttctccacgcacccacccctcgagagggaagaaggaacccggaaagggaggaaagcatggccggagcagcagccgcctccgccgccgccgccgccgtggcgtccgggatctcggcccggccggtggccccgaggccctctccctcgcgcgcgcgcgccccacggtccgtcgtgcgggcggccatctccgtcgagaagggggagaaggcgtacacggtggagaagtccgaggagatcttcaacgcagccaaggagttgatgcctgggggtgttaattcaccagttcgtgccttcaaatcagttggtgggcagcccattgtgtttgattctgtgaagggttctcgtatgtgggatgtggatggaaatgaatatatcgattatgttggttcctggggtcctgcgatcatcggtcatgcagatgatacggtgaatgcagcattgattgaaactctaaagaaaggaactagctttggcgctccatgtgtgttggagaatgtgttggctgagatggtcatctctgctgtaccaagtatcgaaatggtccgttttgtcaattcagggacagaagcctgcatgggagcgctgcgccttgtgcgtgcattcactgggagagagaagattctcaagtttgaaggttgttaccatggccatgcagattccttccttgttaaagctggcagtggtgttgccacccttggcctcccagactcccctggagtccccaagggagccacatctgagactctaacggcaccatacaatgatgtcgaggcagtgaaaaaactgtttgaggagaacaaagggcagattgctgctgtcttccttgagcccgttgttggcaatgctggcttcattcctccacagcccggttttctgaatgctctccgtgacttgacgaaacaagacggtgcacttttggtctttgatgaagtgatgacgggtttccgtttagcttatggtggggctcaagaatacttcgggatcacccctgatgtgtcaacattggggaaaatcatcggtggcggtcttccagttggcgcttatggtggacgtaaggacatcatggagatggttgctccagcagggccaatgtaccaggcaggaaccctcagtggaaaccctctagctatgactgctggaatccacacactcaagcgtctgatggagcctggaacctacgattacttggacaagatcactggtgatcttgttcgcggggtattggacgcgggtgcgaaaactggacatgagatgtgtggaggacacatcagggggatgttcgggttcttcttcaccgctggcccagttcacaactttggtgacgcgaagaagagtgacaccgccaagtttgggaggttctaccggggcatgcttgaagaaggtgtgtacctagctccatcccagtttgaggcaggtttcaccagcttggcacacacctcccaggacatcgaaaaaaccgtggaggcagctgcgaaagttcttcgccggatatagagtcttcgacagttgagcttagctacggcttgtgaatcacttgctatttttcatttgtgttgtacactgttagttctacatcactcaaaatctgtattgtgcagcagcggtacatttcctctagcccccatatcattgtgagttagtagcatccatggtgtttttgcagtgccaataaagttatttttgatatctcgatg

SEQ ID NO: 14209 - DNA, 1984 bp, Oryza sativa
  ref <308>: DATABASE ACCESSION NUMBER: AK064827
  ref <309>: DATABASE ENTRY DATE: 2001-12-06
gagatcctccatcccgcggcggccgtgagcaccaacactcacgcattccttcctactccgcgagatctccggattcgtttcggtgttttgcgagtcgcgcccggagaagaggagaggaaatccggtcaatcgcggcgtcggcgtgccgtcgcttggggtggtgttggtggttctgaattttgattgcttcgtgcttttcgtttgggggagggcagtggtcgccatgggattggggaacgaggcgagctcgtcgtcgtcgcggctgctggatccggcgcctctgctgccgcaccacggtggagatggcgccgggaagctgtcgtcgcagcccaagaccttcgcgaacgtcttcatcgcggtggtcggcgccggcgtgctggggctgccgtacacgttctcgcggaccgggtgggcggcggggtccatcctcctgctctccgtcgcggcgctcaccttctactgcatgatgctgctcgtcgcctgccgccgccgcctcgccgacgagcacccgaagatcgcctcctttggggacttgggggacgccgtgttccgcggtccggggcgcctcgccgtggacaccatgctggtgctcagccaggccagcttctgcgtcgggtacctcatcttcatctcgaacaccatggcgcacctttaccccgtcttcgcgccctcctccaacgcgctcctctccccaaaggcgctctcatctgggccatgctgccgttccagctcgggctcaactccatcaagacgctgacgctcctcgcgccgctcagcatcttcgccgatgtggttgacctcggcgccatgggcgtcgttctcggggaggacgtgtccgtctggctcgccaaaccaccacccgtcttcgccttcggcggcctgagcgcgatcctgtacggcatcggcgtgtccgtgtacgccttcgagggaatcggcatggtccttccgcttgaggcggaggccgccaacaagaagaagttcgggaccacgctcgggctatccatggggttcatcgccgtcatgtacggcctgttcggcgccatggggtacatcgctttcggcgacgccacgcgcgacatcatcaccaccaacctcgggaccgggtggctctcggccgccgtgcagctcgggctgtgcatcaacctcttcttcaccatgccggtgatgatgcaccccgtgtacgaggtcgccgagcggctgctccacggcaaacgctactgctggtggctgcggtggctgctcgtcctggccgtcggcctctcggccatgtacgtgcccaacttcaccgacttcctggcgctcgtcgggagcagcgtctgcgtcctgctcggcttcgtgctgccggcctcgttccacctcaaggtgttcggcgccgagatgtcctggtccggggtgcccagtgacgtcctgctcgtcctgctcggcctctcgctcgccgtcttcggcacctacacgtccctgctgcagatcttccattcctccagcgcttaatctctggagaatctttacggatagctgcgccgatgattgatttgctcatttgcttcgcgcgcgggtgtcagcctgtcaggtacgctggttgcattcttcgtgtacagagaaggtgatcggtcgatcagaggggcaatgcccaattcagcttgctgttgatttgggcatggacagcgtgcatcggccgcattctttcgattacaagtcagatggtttgtacaagttagcgtggatggcatggagaaatctgtatggttttgcaacgacagattcccatagctactcgtgtcagttaatatttatgtgtatgtcttggatgtttcagctgctgcattgcacggtggaatcgatgaaaggacatagtaagtttcagtctaagtttaagcctatttagttgataaataaagtgtctagttgaggttgcagcttgtgtgcggtactgcgggttgtgtcaattaggaaggcaagcaatcgggacgacttggcaaagtat

SEQ ID NO: 14210 - DNA, 2269 bp, Oryza sativa
  ref <308>: DATABASE ACCESSION NUMBER: AK064828
  ref <309>: DATABASE ENTRY DATE: 2001-12-06
ggctgtattaataaaacctcaccccctcgccgcctcgtcgtcgtctacctcccaccacacgcgaagaaccaagagatttttcttttttttttcctcttatatttaatttaattcgaggaggagaagaagcagaggaggaggagtaggttgggagaggaggagaggcattgccgatgggctcggtggcggacgatgcggagatcaccggcccgctcctcgccgccgccgccggcggcggcggtgacagcgccgcggcggcgggggtggagagggtgccggcgtggagggagcaggtgacggtgcgggggatcgtggtgagcgcggtgctgggcgtgctgttctgcctcatcacgcacaagctgaacctcacggtgggggtgatcccgtcgctcaacgtctctgcggggctgctcgggtacttcctggtgcggtcgtggacggcggtgctcgggaggctagggttcgtcatcgcgcccttcaccaagcaggagaacaccgtcatccagacctgcgtcgtcgcctgctacggcctcgccttcagcgggggttttgggtcatatatgcttgcaatggatcagaaaacatacgaacttattgggccagattatcctggtaacagggcgatcgatgttatgaatccttcattgggttggatgatcgggttcatgtttgttgttagcttccttggactatttagtcttgttgcactgcgcaaggtaatggtgattgattacaagttgacctatcccagtggaactgcgacagctatgttgataaatagcttccacactaccagtggagcagagcttgcagaaaagcaagttagctgtctcggaaagtatttgagcattagttttttctggaactgcttcaagtggttcttcagcggcgttggggattcttgtggttttgacaatttcccatctctgggacttgcagcatttaagaacacgttttattttgatttcagtccaacctatattggatgtggtcttatatgcccacatattgttaactgctctacacttcttggagcaatcatatcttggggtttcctctggccatatatatctacaaaagctggggactggtatccagctaacctaggaagcaatgatttcaaagggctatacggatacaaggtttttatatctgtatctgtgatacttggtgatggtctttataacctcatcaagatcatctatgctactatcaaggaagtaatgaatgcacggtgggagcaaggaagacttccccttgtgcgggttcatgatgatgatgaaggctctaaattatcagctgaagaaaagcttcggaatgacacgtttctaaaagacagaattccatcatggttagcaggatcaggttatgttggccttgcagcaatctcaacagcaactgtgccaatgatcttcccgcagactggaaccttgcgtccacgtatggaaagattggcctttttatttttgcctccttggttggccgaagcggtggcgtgattgctggcctagcagcttgcggtgttatgatgtccatcgtatccaccgctgccgatctcatgcaggacttcaggactggttacctgacactctcttcaccaaggtccatgtttgtgtcacagttgattgggaccacccttggctgcatcatcgcccctctgaccttttggctctactggactgctttcgatatcggcaatcctgatggcatgttcaaggctccatatgccgtcatctaccgtgagatgtcaatcctgggtgtcgaaggattctcagcgctgccccaacattgcctggcgatctgctcggtcttctttgtcgcagctattttgatcaacctcctgcgggacgtcactccgaagagcgtctccaagttcatcccgctcccgatggctatggctgtcccattctacattggggcgtactttgcgatcgacatgttcgttgggacggttatcctgtttgtctgggagagggtgaaccgcaaggaatctgaggactttgcaggcgcgattgcatctggtttgatctgcggtgatgggatctggagtgttccatctgcgatattgtccatcatgaggattgacccaccaatgtgcatgtacttcaagccatcccttaccagctgaaaatagcgcaaaatccgttgtttatttggatgccaaaatagaaaagaattttcacatgtatatatttctctctgttgtaaattagactgcgcaaaagtgcagtaactttgttctttctgttaatatatttctctgtttatg

SEQ ID NO: 14211 - DNA, 1591 bp, Oryza sativa
  ref <308>: DATABASE ACCESSION NUMBER: AK064829
  ref <309>: DATABASE ENTRY DATE: 2001-12-06
gctttatcatagacgattttatcgatgaacctgaaatagacatggcttgccacttgagattatttccctttactcaactactagtattggttctgtacaaaatcgccgccgtaggggcagatcctgcaaacgcagaactatccacaaagatcacccaacactctccattgtacaacccacagcctcaagactttccaaacgaggagctctaccgcaactatctagtcatccagcggttcaagaagacaatcacttccgaccccaagaacatcaccgccacctggaccggccatgacatctgcggcaacacgacctacctcggtttctactgtgcagcattgcctgggcgtactaagaagcccacggtcactgtggtgatctttaacggttatggcctgcgtgcaccgaagctggaaggatttattgaccatctccccgatcttgcacttttccatgctgcctccaacgacttcggtggtgacatcccctacctcacaggcctcgcctacaactacaagatcaatgtcgacagcaatctccaaatacaggatgattttagtcgtgacatggtcgggtcgcatgtaacaactaaagttcatggttattgcgttaatttagatctagatatcacatttcacctccggcccggaaaagacgacaagaaaggacgaagcatccccggtgccacagattctaaggcgctcctcctcaactacaatcacctgtccgggccattaccggtgaacatcggtttctccaagttaagctacctggccctcgccaacaacaggctcaccggcgcaatcccgccatcaatcttgcatttgcaagactccctcctcgaggtgctcctcctgaacaaccagctctccggctgcctcccccacgagctcggcatgctcaccaaggccgcagtgttcgacgccggcatgaaccagctcaccgggccgatcccctcctctttctcatgcctcaccagcgtcgagcagctcaacctgggcggcaaccgcctctacggagagatccccgacgcgctctgcaagctcgccgccgtcccagccggccgcctcgccaacctcacgctgtcgagcaactacttcacgtcggtcggaccggcgtgcttgtcgctgatcaaggacggcgtcctcaacgtcaggaacaactgcattccgggcttcgccaaccagcggcggccggcggagtgcgcgtcgttccacagccagccgaaggcgtgcccggcggcgagcgccacccacgtggcgtgccccgccggagctgccaacgctgcggcggcgccggcggacagggtggtcaaggactactccagctacgtgacgtacgccaccctgcacgagtgagcccggcgccacggcacgggcgcacgacgtgcgtgcatgcatgcagtaggggacagctagaagctagcgtctcggggtggtatttgctcttgtattcttgtgttcgtttgttgtgctcgtgagtcgtcattgtggtttgttttctctgcacgtgtggctagctatggctgtcacgtctagatctcacctcctgtactcttgtgtactgtactatgtgaaaatcattggtgatt

SEQ ID NO: 14212 - DNA, 1335 bp, Oryza sativa
  ref <308>: DATABASE ACCESSION NUMBER: AK064830
  ref <309>: DATABASE ENTRY DATE: 2001-12-06
ggctgctagttgtagcacgcacgctgtcgctgacgctgctgttccgccatggcgttgatgatgagccttcgcttcgcccccccagcgtccgtcgctgctccgccgccgcgacgaccacgagctgttgcctcttcggcgtcctctccggcactccaacgccgccgcccgcagaacgtccccggcgacttcttcgtcgatcaccgatgcatcgattgccagacctgccgctggatggcttcggaggtgttcaagagggtggacggaaaagccgccgtcgccgcgcagcccatctccgacgaacacaggaccaaggccctgcaggctctgctctcctgtcctacttcctccattcacaccgagaaacctgcaaaggacattcttcaagtgcaaaacatgttcccgctccccatcgacaatcatcttctccctggtgtttacctctgtggctatcattctcaagattcatatggagcaacttcttatcttttaacccatccagatggaaacatactagttgacagcccaaggtatacaacgaaactggcagagaacatcgaaaaacttggtggagcacgctacatgtttttgacccacatggatgatgtcgcggatcataggaagtgggctgagcggctaaaatgtgagaggatcatccattcgggcgatgtagaggatgttactgcagatgttgagtggaaacttactggaaatggcccatgggacattggagctgatttcgaacttatccataccccaggtcatactgaaggttcagtctgcttattctacaaaccagtaaaggcgcttttcactggagatcatgttgcaaaatcagaagaatctgatgatttagatctctttcttatgtacagcaagcaatcagtgggcttgcagctggacagcatgagaaaattgttgaagttagacttcgagtggtttttacctggtcatggctatcgaatccattataaagacgtacgtgctaaggattcagcaatcgagtccctcatagctaactacacaagctaggagcgtattataattctctctaccttcattgtgtataaataacgaccgattctggaatgaaggggcaagagagaatgcacttgccattttgtcagcgagagtggcacttcatatccttggaagatgatggtactgtttttgcttcacgacatttgcaatatatcaagtcgaaaatgtcattgatgcacaagaatctgtgcctttaatgttctttttttccagcagaagaatacttgtttatgatgacatgaagtttcctgcagttactctggcatctctaatttactccaaaatttgtttcttgcg

SEQ ID NO: 14213 - DNA, 2298 bp, Oryza sativa
  ref <308>: DATABASE ACCESSION NUMBER: AK064831
  ref <309>: DATABASE ENTRY DATE: 2001-12-06
gaaattggcaacttgacgccgccctcgctcacacgctcgccgcccgcttcccctcctcatcaagataaggcgggaaacccagctgcggctgcggattccagaaggttctggaagcttctggggcaccccacgcacagccgccggcgcccggcccggtgccggaagaggctgcatgcatgagtagtcgcgccgccgccgtagaggagcagcatggggatggtcaccgccaccgccgccgccgccctcctcgcctcgccgccgcagggtcatcttggaaggcggtgtcacctcgtggtgcccgggctacggctgaggcctccggccagctcatctcctccccacgccgccccgccgctcaggttaagcaattttgtcccaaggtgttacatcacaaatgttgaggttgatgttagtcatacgagtgaacaagaggctctagatgatcacccaccattgttgccagcctgcgccattccagttgtacacctacgagatgttccggatgctagtccttttcccctgcatgagagtgcttcccattctactgattttgaagagctacccgtcttgtctgagggtgagctacatactatagcggccacccctgcccaccctgctggattatatgctctatacgctagctacttatttggtaacttggtggaacaactttggaattttgcttggcctgctgcactggcaattctccatccaagcctattgcctgtggctattgtcggtttcttcacaaagctttcagtctttattggggcaccaatagtagggaaacttatggatcatttccctcgaatacctatgtacacagggttgaatgctgtccaggtagccactcagttgatatcagctgcaatggtcatctatgctatgaagaatgtgacccatgcatctacgtccgccgtagttctcaaaccttggtttatcgcactagtggcagctggagctattgaaaggcttgcaggattggcactaggagttgctatggagcgggactgggttgtgttgttagcaggaactaacaggccagttgcattagctcaagctaacgctgtgcttaatcgacttgatcttgtttgtgagactgttggtgcttcagtttttggccttctgctgtccaaatatcatccagtaacctgtttgaagattgcttgtggtctaatgatatgcagtttccctgtcctggttgtgttgggtcaactgattaacagattctcctgccatgctcttgattcctctagaaccccgagtgaagaatctatctgtgccaatctattggatgttcgtaagattgttcaaaatggcttgagtgctatcagaaatggctggaatgagtataagcagcaaacagttctacctgcaagtgtagctaccgtgtttctaaatttcaatgtagcacttgctcctggtgctataatgactgcgctattgatgcatcgtggtattagtccgtcgattgttggtgcttttagtggattgtgttctatcatgggccttgttgcgacattcatctcctcaagcttggtggaaagagttggaattctaaaggcaggagcagctggattgatagttcaagcttcactcttgtcggtcgctctcgtagtgtattggactggttctatttcacagaggacacctctacttatcttcctggctgctatcgcattatctcggttggggcacatgtcatatgatgttgtgggtacacagattctccaaacaggtgttcctgcatcaaaagcaaatcttattggtggaatggaggtctcaatatcaagccttgcagaactagtcatgcttggtatggccatcatcgcaaacgacgtttctcatttcggtttcttggcaatcctatccgtgtcatcggttgctggtgcggcatggatgttctgccagtggttgggaaatcctacagatgagcagagggaactgttcatgtttgatccccatttccaagttgaaccaatataatgaacaaggcatgttctaaagtagctgggaaagttacatcacatgctgcgtgtgcttggcgtcagaagagggctctgcaatgccctgaagacgctgtgacattttgattcaatacaatatacacttaggatacagtcatttgttactattagcccaagccatgcgtagaattcaacttgtacacccttttttttcacctcacatgctgtacagttcatctaccatgggcttagttgttttttgtaggcttgtagctgatgtagagcaccataacaatcagttgcaataacaaaatcaatagcattctctctc

SEQ ID NO: 14214 - DNA, 2526 bp, Oryza sativa
  ref <308>: DATABASE ACCESSION NUMBER: AK064832
  ref <309>: DATABASE ENTRY DATE: 2001-12-06
gattcccctcccacaaagccaccgcgacgctgcgcgactcctctctctctcctcgacctcgacctcgaccggaacgcctctcgccggcggcggcggcggagatggcgatgcggcacctcatcaccgggcagggcaactgcgcgccggacggggcgtcgtcgtccaaccccttcgggaacctcgccaacgccatcttcggccagtcgtccaaggcgcagtcaataaaggaacttccagggtctgcagttaatgttccaacaacatctgaattagggacagctgctcccttatcgaccatccctggttcagagaatgagttcaagcaagatcaactgccacttgcacggggcgctgatttcatccgtgggggtccttctcatgattgggttgaatcttttcggcctccaggactcccagaatttgctgtgccagatgcacagcttaaagaatttgagcaaatttttaacagcacagggccaacctttggaccaccagtcatggatggtccaccacaaagggtcttatctggtgtcctacgttctttcctagcaagtggtcaagctggtgtgccatttcaacctgttccagtaccagcgcttggtttgtctgaaagtgacaagcaatgtatacgtgatcgtagttgcattatggcacgccacattttggctgaccagcctgaagaatatatccaagcacaggtaaacacattgctgcattcacttgatatcgacagtaattatcgaatgaaaggacccatgcacggaccatacccagagatggaggagtattggaatcagtcccaaagcgccatgagatctggtccaatgcacaatgctgcagacaaatggataactgagtttggcaagcaaaataataaccctgaagagtgggctcattcttttgagcagcaatatggttccaatggttgggcctctgagtttgaacagcatcaatctcagatggccatgacaggaggaatgaatatggcaaacctggcagccatggaacaatctcgtatgcttgcacagacattagctagtaataatgacccaaaatttcagatgtcacaaggagcagataagtgggctagtgagttctctactgagtataatcagggtggcctcaacgagaactggattgatgagttctccaaaatgcgtgttgacgatgaatgggcagaagagttcagtggaggaacatttggtgaaagctctgctgatccatgggtagatgagttccagaaccaattatcagcttccaaacagaattctggtgcatctcgaggagtttatgttttttcagacatgaacccatacgttggtcaccctaatccaatgcaggaaggccaggaactgttccgcaaaggcctcctaagtgaagctgttcttgctttagaggctgaagttttggagaatcctgataatgctgaaggttggagactacttggagtaacacatgctgaaaatgatgatgaccaacaggcaatcgcagcaatgatgcgtgcacaagaagctgatccaacaaacctggaagttcttcttgcacttggtgtcagtcacacgaatgagttggagcagggagaagcattaagatatcttcataggtggcttcagaatcaccccaaatatgggggtatcgcccctccacagccaactgattcaccttatggtcctgatgttattagattgtttaatgaggctgcccaaatgtcacctgaggatgctgatgtccatatagttctaggagtcttgtacaacctatcaagagaatatgataaagctatagctgctttcaagacagcgctgcagctgaaaccacaagactattctctctggaataagctaggtgcgacccaagcaaacagcatccagagtgctgatgcaatattggcctatcaacaggctctggacttaaagcccaattatgtgcgtgcatgggctaatatggggattagctatgccaaccagggattgtatgaagactctattcgatactatgtacgggcggttgctatgaatccaaaagctgacaatgcctggcagtacttgcggatttctcttagtaacgcttcacgagctgacatgatcgctgcatgtgattcacgcaaccttgacgttcttcagaaagagtttcccctgtgagtccaaacattctaggcattgcacttgctcctcaggcccgcccccatgataaagggtacaaggaagtagagaactagcgaaatgggggctgcacattttggaatgatgaaagtgcaaaatggcagtggccgttgtgttgtggttttcggttcgtgtatacgaattgttcattttaacaaggcgcgacatgtatataaaattcaagatgggcacccattcttccgtaggtgtgggaaacgcaaagcagaaggcagttgtcacatgtaattctgtacacagagagggaaagaataaaagaatatcgaacgaatatgtcaaaaggaggcaacacgttcttgtaattttctacagaaaataaagtggtagcaggtttcactgtttcagc

SEQ ID NO: 14215 - DNA, 2021 bp, Oryza sativa
  ref <308>: DATABASE ACCESSION NUMBER: AK064833
  ref <309>: DATABASE ENTRY DATE: 2001-12-06
ggactgcaacctccacccacacggcacccatggtggaggcgggagaaatcggcggcgccgccgtcttcgccctcgccgccgccgccgccctctccgccgcctcctccctcggcgccgtcgacttccgccgccccctcgctgcggttggaggcggcggggcgttcgagtgggatggggtcgtcccgtggctgatcggggtgttgggcggcggggacgaggcggcggcggggggcgtgtcggtgggggtggcggcgtggtacgaggtgtgggtgcgggtgcggggcggggtgatcgcgccgacgctgcaggtggcggtgtgggtgtgcatggtgatgtcggtgatgctggtggtggaggcgacgttcaacagcgcggtcagcctcggggtcaaggccatcgggtggcggccggagtggaggttcaagtgggagcccctcgccggcgccgacgaggagaaggggagaggggaatatcccatggtcatggtccagatacccatgtacaatgagctggaggtgtacaagctgtcgattggggcggcatgtgagctcaaatggccaaaggacaagctaatagtccaggtgctggacgattccaccgatccgttcatcaagaatttggtggagcttgaatgtgagagttgggcaagcaaaggagtaaatatcaagtacgtcacaagaagcagccgcaaggggtttaaggcaggagccctgaagaaaggaatggaatgtgactataccaagcagtgcgaatatattgccatatttgacgctgatttccagcctgagccaaatttcctgctccgaactgtcccattcctcatgcacaacccgaatgtcgcccttgttcaagctcggtgggccttcgtgaatgacaccacaagcctgttgacaagggtacagaagatgttttttgattaccacttcaaggttgagcaggaagctggatcagcaacctttgccttcttcagctttaatggaaccgctggagtgtggcgcacaacagccatcaatgaggcaggaggttggaaggaccgcactacagttgaagacatggacttggcagttcgagcatccttaaatggttggaaatttatctatgttggggatatcagagtcaagagcgaactgccgtccacttatggagcctactgtcgacagcaatttcggtgggcctgcggtggtgcaaacttattccgaaagatagcaatggatgttttggtagccaaggatatatcgctcctcaagaagttctatatgctctatagcttctttttggtgcggagagttgtagcccctatggttgcctgtgttctttacaacatcatagtccctttgtcggtcatgatcccagagctattcataccaatctggggtgtcgcctacattcctatggcacttctgattatcacaaccataagaaatccaagaaatctacacataatgccgttttggatcttatttgagagtgtgatgactgtgcttcgcatgagagctgcactaactggccttatggaattatctgggtttaacaagtggactgtgacgaagaagatagggagtagtgttgaggacactcaggttcctttgcttccaaaaacccggaaaaggttaagagacagaattaatcttcccgagattggattttcggtgtttctcatcttctgtgcgtcatataaccttatcttccatgggaaaactagctactattttaatctgtatctccaaggactagcatttttgcttctaggatttaacttcactggcaatttcgcctgctgccaatgacgaggacaacaccttgactgtacgaaatgttgtttgcaattattttctgggtataaattcttcggatgacatttcagatcatgatcatagatgcatatggcgttgatctgtgcactaacacctgtttcagttgctagacttccagggaaactttcacagaatactaggatgtgttgtaatcaaatatcagtgatgtgttatgtactctagttaacacgaaacaccaatttgttg

SEQ ID NO: 14216 - DNA, 1601 bp, Oryza sativa
  ref <308>: DATABASE ACCESSION NUMBER: AK064834
  ref <309>: DATABASE ENTRY DATE: 2001-12-06
gaacctcaccaaatccggcgaattcccccatcgaccaaaccctaaccctaggtggccggccatgaaggcgtcgatcaagttccgggacgacgaccggccgctggtgcgcgccaaggtgcccgtcggcgtcctcgggctgccgttcctcaccggcgtctcggccggcggcggcggcgactcgcgggatctccgcttcgacctctccaccgccttcgcctccggcccggcgctccgcctctcgtaccgccccaacgacccgctccagcccttcgcgctctccgtccgtaccggcctcggcccgctcgggtcccccgcccgcgcgccgttcgccatatccgccgagttcaacctcctctcctccagcccgccggccttctccctcctcttcaagccccgcatcggcgacttctcgctcgccaactccgtcatctccccgcccgcgtccgcgtccccggccccgccgctgccgccgccgccgccgtcgcacaagctgaccgacctcgccaacggcggcgacgaccacagggcgttctcgttcagcgggaacgggttcgccgcgaacgtggccgccgcggggaagagcggcggcggggtcggcgcgctgctgtccgggatgcgcctcacgaccaggagcgtgctgccgctgtggagcaaggcgagcctgcggttccagtgggggctgcgcgtgccgcccgagctgaaggccgccctcgccgacgacgggtacggccgcaaggcgggtaacctggccatcaacaagttgccgctgctggtcatgaacaagatcacaattgagcacacgctgcggaatcctccacattccgatgccgacaaggggaagaagaaggatgcgccggaatttcagactgaagggttctcgctcgtcaagaggcagctcgaggtgctcaatgcagagagcatcatgctgcggcgtaccgtggaggacctgcgtgccgagatcggtggaaatagagccgcctcaatgcccggtaaaggcgacgcccgaaggatgccgtcgtccctggcaccaccaccaccacaaccattcctggcgaagccagatcgccacgggaacggcaaggagatggtggacagtggaccgaagccggtgtcgaatgaggcgagcgaggagttgaagaaggcactggaggctcgccggaagtgaagaagtatcagaatttgctgaaattgcaaccccctgcaatactgcaacttgacatggctgcttggttaaaattttgcgctcaataatacatttggtaggtgcagtttgcttccccagggaagcaaatggaattctcataaggtgatgtaataatctcgccttattttccaggccgttgcttgtgctagactgctactagtagtattatttatctccaattcgccatgtataaactcgctcttttgttagttgaagtttcagctccattgagatgtatgaaacgctttagttttccagatcatccttattacaatttcaatccatatgatcattatctctgtgcttgtacctttgatcaaagttcctaaacaaaaaattgatgataaacagagtgccagcttttgcattcggcatgaatgaatttgagaatttaggt

SEQ ID NO: 14217 - DNA, 1482 bp, Oryza sativa
  ref <308>: DATABASE ACCESSION NUMBER: AK064835
  ref <309>: DATABASE ENTRY DATE: 2001-12-06
gacaccgccttgaaaaccccacctgccctacttccgcctggagagcctcggcccctcgcctcgcctcgcctcacctccacccaaacccaatccgaaatctttccctccactcgccgccgccgccgccgccgctgttgccggtgacccgccagccatgtcgtgctcgcacctctccaccgcctggtcctcctccgccctggccacccgccgccgctccgctcctagctgcggcagcagcggccgcctgcaggtggtgcggtgctcgctgcgtgagctgcggagccgcatcgactcggtgcgcaacacgcagaagatcacggaggcgatgaggctggtggcggcggccaaggtgcggcgggcgcaggaggcggtggtgtcctcccgccccttctcggaggcgctggtggaggtgctctacaacatgaaccaggagatccagacggaggacatcgacctccccctcacccgcatccgccccgtcaagaaggtcgccctcgtcgtcctcaccggcgagcgcggcctctgcggcagcttcaacaacaacgtcctcaagaaggccgagacccgcatcgaggagctcaagcagctcggcctcgagtacaccgtcgtcagcgtcggcaagaagggcaacgcctacttcatccgccgccccttcatccccaccgagcggacgctggaggtgaacggcatccccaccgtgaaggactcccagtccatctgcgacctcgtctactcgctgttcgtgtccgaggcggtggacaaggtggagctcctctactccaagttcgtctccctcgtccgctccgaccccatcatccagacgctgctccccatgtcgcccaagggggagatctgcgacatcaacggcgtgtgcgtggacgccaccgaggacgagctgttccggctcaccaccaaggaagggaagctgaccgtggggcgggagaaggtgaagatcgagacgcagcccttctcacccgtggtgcagttcgagcaggaccccgtccagatcctcgacgcgctcctcccgctctacctcaacagccagatcctccgcgcgctccaggagtcgctcgccagcgagctcgccgccaggatgagcgccatgagcagcgccaccgacaacgccatcgagctccggaagaacctctccatggtctacaaccgccagcgccaggccaagatcaccggcgagatcctcgagatcgtcgccggcgccgacgccctcgcctaaatccaatcaactcatttcttcatcccatccacctcgcttgagctgctgaggttgctgctgttatatatactactctattcttttttacttcctttttctctcttgctattgtgtctgtaatttctgtgatagcacgaaaaaaaaaaggaaaaaagatcgatccgactcgatcgatgtaattgttaatcgcgcgagatacacaagatttcaattcagcgatgccaaatgtacaagcagagtattctactact

SEQ ID NO: 14218 - DNA, 2307 bp, Oryza sativa
  ref <308>: DATABASE ACCESSION NUMBER: AK064836
  ref <309>: DATABASE ENTRY DATE: 2001-12-06
gctttccccccttcttccaccatccactaacccccatctcaacgcaaaccaccctctccgccgcgcgcgcgaggcagatctcgacggggagcgcagccgccgccgccagatcccgccccgatcgcccccgcctcgtccccacggtcccgtggatacctctctctctctctctctctctctctctctctctcggatcggtgcgattgcctttctttttgcgcggcggggatcgggtgtgttttggggacggtgaaggagaggagtgaagtgtggaggcgaatcgaatcgatctgattaggagacctgccatttctgtgcttgattttgtttcgatctgctccttgggctgtagatctggaagggcttcgtgggatctgctgctcgagcttcgtgagttgcacaggaaagtcttgggcttttgcgctcagctccaccaccttcacctgttcctcgggccatggctgctctcgtcatctcgaagcagcgcagtcaccagcagcagtcatccgatcgccggaggaagccatcgtcgcacttcgcgtcaccccagtccatgcgtggcttcaatgctgtcaactgccgagccttccactccagcgtcagcattggcatcctgccatccccgcctccacccccagcgcgcacctactcctccccggagccgaagacgcccaagtcgcagccacaccacgggaagaagcggagcagggcaatatctataagcccttcaacgtctccgccatcccggcctgagctctgggctggccccgctttctcaaactctccgcctcccagctcgctgccgatacccaagttctcactccaccagaagcgcagtgtttcactcgagttgccacctgctggccgatcagatgatgtggtggtgcctttgcatgctaagtcagcgccttcgtcgccaaccgcaggctcaggtgtcagcttctttagtgatagtgatactgctatcgcgactgagaatctgaggagaatcctccacctgaaaatcgctgatcactgaatggatgatgggcaggtccttgtacataggctatctgcaaactaaccttggtagtgtgtatagagtaaccgagaatggccatctttcacctggatggtggttctgcatagttcatcaacaggaggtacttcaggcaggcaaagcacctcaagtatgcatggcagcgtgaaactgcggtgaatgacttggtggtgagactgttggttgtctggatgagagcacagcagtttctgggtagcctttgtagcttgtggtcacctctatgttactaatgttctttcagccttttgggtattccttctttaggttttagatcaccattatccatggtctcacatcattaacctttagtcgtagtctgtccttgttcctggtagttcatgcctggccagggtatgatagtgtcttagtactgttcaaatgcttagatgtctgcatctgattatctggcagctatccatgtgtgaaatatctgtaggatagcaatatcttgcagtgcatgcattttgcttcaccttgtagacattccttggttcctctggctcactctactcttgcttctggtgttctgcaaggaacattatgatctctcctagatgtctcttctgttttttggaaggaagaggcgcagtgggatttcatgaagctccaatcttccatgttcttgctccatatgacactactaattttatccatgcacctttccttttctttagtttgttccatagctaccatgtgagacctctcctatctttctttcatgcctctacaactagaattgtgtctagtagtgttatgccttttttagggcaccatcaataattcctagtccttgtttatgtccaagaaacgtatttggagttctactctcttctatatgatggacaagccagacttcagagacctttgagcatgcagacccaaatacggtttgcttatcacagtgcgcttcatggtattcatccctggagctcgtagccaccatcaagtttgaataatcttcgtagtcgacgggcagcacatatgctagaacgtcaattcagtgtagtgcctgcttggctagttgtacctggtactgtttttgttataacattttgtcgatgtcttgatacattagcgtagtgtctatttgggctggcagtgtagtacctgcctggctatttgtatcagcttgcttaatacttaaaagtagacctttttccactgccttccgagtttttatgatatatttggatgttaatgttgtagcacttaacttcttatatgtgcaatgtgaactgcttttcacc

SEQ ID NO: 14219 - DNA, 3597 bp, Oryza sativa
  ref <308>: DATABASE ACCESSION NUMBER: AK064837
  ref <309>: DATABASE ENTRY DATE: 2001-12-06
gggccctgtcaaaaaaaaaaaaataaatcgcctctttgttttcctcccgtcgctatcctcccttgctctcgccgctgcgcctggcagtgaggaggacgggaccagtggatgcagcggccccggccttgcgcctcgcttcgccgtcatcgtctctgcggcgtgctcctaccatcgccatcctcctcttgctcccgccgcggcgcccaccaagcactcaggcaggatgggataccgtctgccacctgctgcctggcgccgccctcctttccgttttcctctgcatcctcttcctccgtgtgcggcaacagcggcgggcgtccacggcgacgccgtcgacgaggcggggaaacgctaggcacggccttctcttgccttcttgccttggtgaacttggtctatgggtatagcgtgcctgacttgtggccctcctgcttgctttttcttttctacccaccatacaataggtttatgttttgatggatggttttaatgtcagtttttttttgtcttctttggtgtgtctctgttatgtgggtctatgcatcctctctattgtttaatatcgtgtgatttgttcatcggtgctagccgtctccttctcggcgtggaagaccgcgccaaccgtgggaggcagcttgccagggcgctgctcgctcagtggatgtgcgcttagtgggtgcggtgcaatgtgattcgtttatttctctgccctatgtcacagcgctgtgggtgctcatcgtccttgcaccctctgtctctgcactgtggtccagccctgtttgtttcgtgtgattggatcacgggtgttggtccatccagattatatgtgccatttggtttcactggattcttttggttggatggcatctctttgtttcactgcagggtgggatcatcttttatgggggccactacgccgatttcttattggtgggtttacattgtactacgtgaaaattgttttcctctttcgatgcaacctatggttgaggcttctttttttcttataacgccacaacgatacttctccctctttgcctttttcgctttgccatcgtcgctttccccgcctactcatctgttgtttcccgccatcgttttgcctgctttcccttcgatttcattcatcgatcatggctgggggggaagatctgcacgggctgcaccgctgcttcaaaggatcgtgatcgtttttctttatcagttcaagagctgtcagtgtaacttggcagctctcattcgcgtgcgtggtacctctctgcttttcttcttcgcttccagccttccacatcactgctcatctcgctattgttggtccatctttgttgttggttcatcgtgcatctttcatcgaagagtacaaatggcgcacgcgctcatttcacagctttaccctggggattcagacaaaaagattctcgcaagggtttctagactttggcattttcgtgatctgaatgatgatacaaacatcctgcatacagaccttgtcttacttgatgaagtgggcaatagcactcatgttcagatgtatcgaggcgcaattgaggttctgaaacctctcatccatgaagggaacgtctactacattgagtcgttcactgtcaaagatgcaaacagaacttatagaccagtttcaaatgacttcatgattttattcagtaaatggacaaccttagaagaatgcattgacatcccagctgatttccctgccataacattttcattgacacctttccaagaaatcccctctcttgttgataaaaacatattctatgttgatattatgggcgtcattactgagatcagttccacatctactgtgcgtccaaggtcaagggatgctgatagtttaaaaagaacattgcagatctgtgatgcaagcaactcaacactgcctgtcacactgtggggagatcgatcaactgcagaaaatatataaggatggccaaactaaaccccaggttgtcgtgtttgttggaacacttgtcagagattatgcagggataggcttaacaataactggtagctcaccatgcaaatggtatatcaatctggacatacctgacgtgctcgaattgaaagaaaggttcagtgtcaactttcagccaatcaaatgggttgaaaatgctgctcctgcattcaaccaagacactccagaggaaaaaaccattaaagaaattctaaaactaaatccgcacaaatataagatctattctactccatgattttttatatgcatttcatacttttgctttgttttgtataaccgacaattctctttctctacagcgagcatgttttattgtcaatgttactatcaagagcatacatgatgaaaactgctggtggtacaattcatgtgaccgatgctgcagaacttcaaagccatatggttctacctatagatgctctagctgttgttatataggaatgccagtgccaagatacaaagttgtgctcactgccacagacaatacttctgaagctgcatttgtcctcttcggacgaattgcacatcgcctaatacacagaccagtggagtctctaatcgaagaaaatccacctgactttatcctagctgagatccaagctcttgtagatcaagcctttgtatggaatgtcagcttcactaaacacacagttaaacggaatcaagaatccttacaggtcaatagcattgtatcatctggtgccccaaaacagcacttcctgcctatctcatcgtctgcttcaggaggcacctcaactatcgtaccactgagccctggcacttcactccaaacaccacccgcagcaagcgaaagcagtattgaataacagtcatcaaccagaggaaagcaaagtgcatctctacagccaagtctatcaacaccaacaaaatatgttgttagccctgcagcagatgacacaccaactagcaagtccaacccctcaggatccaccaaaaagaaatatgttgtcttagcatatcctatgcaatctcaaacaatgcagccttccattgatgataaggccacaactgagccaaagagtggacagaaaactttggaacatccatctcttcctgcagctggaccgtctgaatctgaatctgaacataagatcaaaggaaattttgtcaatacacctgatgatccacctattagcccttctgtgcctagcaaaagtgcaagcaaaaaaaggaccaacactatagcttcagttccagctccacctgctaagaagctattcaaagaacattcccagcacacaaaggatcaaagtgaatgagatgcttgtgtccagccatccaacagatattttgggtgtttgtacaaaacctatgtccactgctagaagaaaggaggcatccaaaataaagctacaaagttaaaagcaagactcttttgctgaagacctacatcctaatattaatgtatataagtggtcatgctgctatcacctttgctagaacatatgctatgtatttactaatagaagtactgcctcctacatggaacattaggcaactatgacacatatctagctatcaaccctctatcctgccagctacataattgcaatgaaataaggtttgcaggccactgctatacg

SEQ ID NO: 14220 - DNA, 2574 bp, Oryza sativa
  ref <308>: DATABASE ACCESSION NUMBER: AK064838
  ref <309>: DATABASE ENTRY DATE: 2001-12-06
gggtgagctgcgagctcattgagcacaatggcagtgcagagaacagatgctgcctcttggctccgtgagctggttcttgtttacgccatgtgctggacagtctcactgggttttgttgcgggtcaaaccgggcagttgaatgtcgatgcctcgccgcagaatgcaaggaagatccctgataagatgttcggtatatttttcgaggagatcaaccatgctggggctggtgggttgtgggcagagcttgtaagtaacagaggttttgaggctggtggacctaatacaccttcaaacattgacccatggctgataattgggaacgaatcaagtatcattgttgggactgataggacatcctgttttgagaaaaatccggtggcacttcggatggaagttctttgtgattctaaaggaaccaataactgcccttctggaggtgtaggagtctacaatcctggttattggggcatgaatattgaaagaaggagggtttataaggtgggcctgcacattagatcttcagatgcagtatccttaactgtttccttgacaagctccgatggtctgcagaaactggcctctcacaccataacggctagcaagaaacagtttgctaaatggacaaagatagagtttcatctgaaatctagccaaaccaatactaattcaaggctccagcttacaaccagcaaaagtggggtgatttggctcgaccaggtgtcagttatgccatcggatacctacatgttttgcagactattcatcagtaaacgccagtagacaactatgatttttttaagagcaaacccatcactatactggatggcccatatcctataagggaaattccttttttgccgggtctataagggaaattcctactgagttgccatcagatttacaggtgttttatacttatcagttcccaccttttattcattgttatgttttcattttagggacacggttttaggaaagatctcgcttctatgttggccaatttaaaacctcaatttcttaagtttccaggtggtaactatgccatgggaaattatctgcgaaatgcatttcgatggagtgaaactgtgggtccatgggaggaaagacccggtcacttcaatgatgcctggggatactggactgatgatggacttggattctttgagttccttcagctagctgaagacctcggtgcttcgccagtatgggtggtcaatgatggagcaagccaaaatgaagaggtatctactgcaacaattgcatcattagtgaaggacgtggttgatggcatcgagtttgccaggggagggcccaagactacatggggttcagttcgtgcagcgatgggtcatccacaaccctttaaccttgactatgtttcaatagggaatcaagaatgctggatgctgtattacagaggcaattaccaaaaattctattccgcgattaaagctgcctatccagacatcaacgtcgtgtcaagttgtggtaaatccactatttctccgtccaaccctgccgatctatatgatgttcatgtttatacctcatctagtgatatgttttccagaactagtatgtttgacaatacgacgcgcagtggaccgaaggcaattgtaagtgagtacgctgtgactggaaaggatgctggcaaaggaacactggtagaagcactagcagaggcagcatttctcgttggattagaaagaaacagcgacgtggtagagatggcaagctgtgcaccgctctttgtaaatgacaatgatcgcagatggagtccagacgcaattgtgttcaactcatggcagaactatggatgcccaaactactggatgctacatttcttcaaagattcatgcggcgcaacgttccacccatcaaacattcagatttccagctacaaccagctggttgcatctgccatcacttggcagaatagcaaagacaagagcacttacctgaaaataaagctagtgaactttggcaaccaagctgtgaatctcagcatatctgtgtctgggctggatgagggcatcaagagctcagggtcgaagaagaccgtgcttacttccagcgggccgcttgatgagaactcattccagcagccacaaaaggtggcgccagtgtcgagcccggtggacaacgcgaatgagcagatgggcgtgttggtggatccatactccctcacgtcgttcgacctgctgctgcaaccgagcaagcactcgaccatatgaaaggagatatatactgtagtagtaatagtcttaagaatatttattagcctgcaaaaagaggggaaaagagaataaaggaatgttgatggggggcttgattgctcaggctaactgcattgcatggaacataatatgcccatcaatattcttattcgattcagcccaagaatagagagatttaccaggtgagggtgagtcatccgactcaagaattgttgtttcaatgaaattcagattagctgacgttgcaccgcatctgggatcttggctggcacacagcatatgtaagtatgtacatacgtgcataccatcaccacctgctagtgctaggaagcttcct

SEQ ID NO: 14221 - DNA, 2813 bp, Oryza sativa
  ref <308>: DATABASE ACCESSION NUMBER: AK064839
  ref <309>: DATABASE ENTRY DATE: 2001-12-06
gcctagttccttcccttgcgtaatagaaagagagatctcccgtctcgtccgtcgtctcctccgctccttgcgccaagacgagtcgcggctcaacagaggaggggcgccgatctccatctggcgagcagagcaggggaggggaagggaaggtatcctgaaagatgcttaatcttatcaaaataaaggataaaaagaaagagcaggcagcaagtgctgctggaaaggctcctgtgaagaagcaatctgctggagagctccgtcttcacaaaggtgcattgagttatagatgactgtcagcacttccttttggtcataaaaacatgttgtctggacattgacagagccttcacagtgcaatctttatctctaatttattttgtaatgtaatttaaaatacgataaattacaatattatgaagataattttgatactaatctacaattctgtatatatatgattattatgtatctgatattaatatttattttttttgttattttaactagatgtgtgtctaaaatgaatgtgttcttgtgaccaaagtaattacctttgttgagttctcttacaaaaatttgtgagctagacatacaattccttgaattttaaacttttaactaactctcaaagcttatcaaactgttctcataaatgtaatgtttccactatcctcacaggtggtttttatttgaataatttgatgctggcatgctgctgcatatgtggctatgctcttttttaagttgttagcaatctctttattttcatgttgagcatgactagtagtatatgcgtcatgtggggcagtcctgccggctgccggtgtcaccaaaggggacctgatagtgctccagcacacatgccagatgtggaacagtagctctctcatcttctctttccttcatttctctccttatttcctctctttcttgaatcctgatctagaggagatggagcagcgagggtaggagcagcactgggttaatcagtaggagaagtgacaaagaagatgatagcagggatgtcaattaatacttacagttgctattcctcatcgtgtgaaaggaaattaaagtgacaggtggatggctattccaatcatccaatgcagcgtatattaatttgtggcactttaagctaggtgtatggtatcttatttaagtaatgcattccgtacactggcatgctgtctagatgccatggaatatgtgaaagcaactcttctagcgattgtgcaaatggccaaaccttgaatttgtggaccatccaagttggagtgccttaaaagattttgcttgaggccaagagctatatgcttgcacggactaagccacaagtccatgcgtgaatatattagtgagctaaacctacccaagagcacatcaatttcttttcccaatggcaaggatgatctgatgaattttgagatcatcgtccgacctgatgaaggatattacctaggtggcactttcgtctttacttttcaagtctctccctcttatcctcatgaacctccaaaggtgaagtgcaagaccaaggtataccatccaaatattgatttggaaggaaatgtatgcctgaacattttgcgtgaagattggaagcctgttctcaacatcaacactgttatttatggccttaaccttctttttacgcaaccaaacgatgaggatccgttgaaccatgaagcagcagctgtcctccgtgacaacccaaagctgtttgaagctaatgttaaaagggcaatggccggaggctatgtgggtcaacactatttcccaagatgtgcatgatatggtgctgggtgccacaaacattagtaagttaagccacctgggcctcttcccgacattctggattgtatggtttcggtgcgttaaagtgctgtcggatggatgtgatatgttgactgtatgacggcgatgctgccatctgtgtgatatttgtttaaagtcagtaaattggtaatctggtggtggtacagataaaatttgagttgcagttcaagctggatttatacatcattttcttttgtgcagtttgcttcagtcagaacctgatatccatctttgctcgtagatagtgctgtgtatgttttccttcctgtatggctgtatgaggcttgaattcggtccaactatcagattgtagtttacgacttgtctacataactctcaaaatctccaatcgacttgtctacataacacacaaggcacatgtttataggaggatcagagattaagggttattaataagagcaccattcgaaaatttcatttttttttgtcactataggtgaataccagtcttttgacatcccacgaaaaatttggatcataaggattgagttacaaaggcaaaggcgaatcttctgcaaaagttaaacgtgctgaagtccacaagtcttgtgtggcaaggggaatcgcgtaaattcacgttcgagggacgtggttcgttgcgtcgccgtcgcttcctcatccgacggcgcaatttcctgtgtgcgcgcgttgtttgttgggggtggccgggtggggtataacatctcaccgtgatcgcctccgttgccgactacagcccgcagctgcttaaagtaactgggccgaaccgaaccgttggacatctcgttttttatttggtatttttattctcttcagcctatgttagctacatttttattgagaattgagccaattattttgtaataagtagttattatagctctttaaagcaaaaaccgaacatgtatactattgactaaataacaataacggtggtgatggttctgccaccaatccaccaccacttctttcac

SEQ ID NO: 14222 - DNA, 1743 bp, Oryza sativa
  ref <308>: DATABASE ACCESSION NUMBER: AK064840
  ref <309>: DATABASE ENTRY DATE: 2001-12-06
gaatcacgagacccgcactctttttttgcgtcgctcgagcgcccgcgttccccgcttcgccgaaactaccaaccgcctcgccgttctcctctccccgtggcgccgccgcgccgcacggcgggagggcaactgaccgagggagactgcccaccagcgtgccgcgcgccgtcgcctccggctccctggttcgtggaataatggcggcggcggtcgcgggcggtggggaggagggggaggagctgctcctgctctccgccgtcgaggccggttccttcggcggcggtggcgacggtggcggcgcgggcgcagcggcggagaagtcgtggcgcctcaacttcgacggcttccgaccgccggaggtgcagcaggagaggcggccgccccgcgggctccacaaccactgcctcggcgtcctatctcaaggtcctgaggacgtagttgctgaatactaccaacagcaagtggaaatgctagagggctttaatgaaatggatacacttactgatcgtggttttcttccaggaatgtccaaggaagagcgtgagaaggttgctaggagtgagactttagccatccggctatcgaacatagcaaacatggttctttttgctgcgaaagtgtatgcttctgtgagaagtggttcacttgctattattgcttcgactttggattctcttcttgacttgttgtcaggatttatcttgtggtttactgccttctctatgcaaacaccaaatccctacagataccctattggtaaaaagcgtatgcagccactgggaatacttgtctttgcctctgttatggcgacacttggccttcagatcatcctagaatcagtacgctcgttgttgtctgatggggatgagttcagcttgacaaaagagcaagaaaagtgggttgtggacatcatgcttgcagtgacattagtgaaacttgcccttgttttatattgccggacattcacaaatgaaatagtgaaggcttatgcacaggatcatttttttgatgtcatcacaaatatgattggtcttgttgctgcactactagcgacttatatcgaaggttggatcgacccagttggtgcaatcatcctagcaatctacacgatcagaacatggtcgatgacggtgctcgagaacgtccactccctggtcgggcagtcagcctcgccggaataccttcagaagctgacctacctatgctggaaccaccacaaggccgtgaggcacatagacacggtgcgggcgtacacgtttggctcccattacttcgtcgaggtggacatcgtgctgccgtcaagcatgccgctgcaagaggcgcacgacatcggcgaggccctgcaggagaaactggaacgcctgcctgagatcgagcgagcgttcgtgcacctcgactacgagttcacccatcggcccgagcacgctctgtcccatgaaaaatagccagacgcaggttgcaagttcgcaaccactggtattaagtttagcagcagcaattagtttcagaatttctggtgctcgtcaggaaacctgcgggtgtatgagattttaattctgtatactggattggcgggtgtgacagtgccaaagccgtagattgtgatttgtaactacttgttgtagactataggattcttgactgttaaatccgtcatctcgatcatctcgtgtagtacaatttatactcaaagtctagagagacatatgcctggtaattacaggctcacagccactttacatt

SEQ ID NO: 14223 - DNA, 1917 bp, Oryza sativa
  ref <308>: DATABASE ACCESSION NUMBER: AK064841
  ref <309>: DATABASE ENTRY DATE: 2001-12-06
gctcggcatctgcatctccgcccccgcccccgtggatctgaagcggcggaagagggatgtcgtcgtcgtctccctccggccacctgctcgcctctgtctcctccgccctcgccgtcctcctcctcctcctcgcctgcgtcgagctcggcgacgctgctgccgccgtcggagtctaccgcctcatccagtacgacctcgccggcgcccctctcggctcccgcgccgccgccctcaaccaccacgccgccgccctccctctccccgccgccgccgacctctcccgctccgccctcgtcgcgccgctcctcgatctcccgctcgccttcctccgcgactacttggcggacaaaaaatatctgggaggcttgctcattctactgcctaaaaaactaaaccatgaacccaacaatgaagacaagggacaagtaaaggcttctctggctgagctggaacagttgctcttgcatcaacaagtgccatatccggtctacttcgctttccaggatgaccactttgataacctgctggcggatatacgtaaaattgcctcttcaggtcagccagcctcagcaacaacaggaggttacaagcttgtcgtgtctacgccggaacctagaaaagtggcatctccgaccatttcaaatatccagggatggttacctggattgaaaggagagggtgaaactgaacaacttccaactattgccattgtttcaaattatgatactttcggtgctgcaccagcactttctgtgggaagcgacagcaacgggagtggagctgtggctcttctagagattgcaagactgttttcacgcctctattcaaatcctaagaccagaggcaagtacaaccttctgtttggcttaacatctggtggaccctacaattacaatggaactaacaagtggcttagaagtttcgatcagcgtgtgcgtgagagcattgactatgcaatttgcttgaacagcgttggttcctgggacaatgaactctggatgcatgtgtcaaagccaccagaaaacccctacattaaacaaatctttgaagatttctctgatgtctctaaagagatgggtgtttcagttggaatcaagcacaagaagattaatgtctcaaatcctagggttgcgtgggaacatgagcagttctcaagatttagggtgactgcactaacactttcggaattgtcctctcctcctgactttttagaaagcaccggtggcctttatgacactagagaatcagcagatgctgagtcagtaattagaactgtcagattagtttctgaaagtcttgcgagacacatctatggactaaaaggaaagaatattgatgtttttgcggagaacagcagtttagccatcaaccctcactacatccagtcctggttggatcttttatcacgaacaccacgggttgcaccgtttcttcagaagaacgatccctttatagcagccctaaagaaggaactatctgagcacactgctgatgtccacgttcaaagcgatgttcttgatggcatgttcactttctatgatgcaacaaaggcaactctaaatgtatatcaggttgcaagtgttacttttgatttactgttccttctggtgattggctcctacctaattattctcttcagtttcctagtaatcactacacggggtcttgatgatctcatcaacatattccggcgaccaccatcacgcaaggtcaagggggcataatagaatagattgtgctttgtgtattagtatccaggaacgcgctgctagttagaagagctagacaccaggacgacaggcgagacgacccagctctccacagcaaacagacttgtaatttcaaaattttcatgttcgatagccaatgtgagtggcttcagatactgcaaggcagaaacatcacgaattttgactg

SEQ ID NO: 14224 - DNA, 874 bp, Oryza sativa
  ref <308>: DATABASE ACCESSION NUMBER: AK098850
  ref <309>: DATABASE ENTRY DATE: 2002-08-28
gatatccatattttccccttttccatccgcgagcgagggagtgagtgagcaatcgagatcgagatggaggtggcgagaggcggcgggaagctgaacccgtgggcggagcccttcgtgccggcgggctggtcggccacctactggcgctgcggcggcgtcgctgccgtggagccggctgtggacgaggtggaggacttctccccggagtggtggcgcctcgtcggctcctccccggccttccgcgaccgctggctccgggactactccgcgctgggcctcctcgacgacaacgacaacggcgacggctacgacctcgaggggttcctcctccccgacgacctcttctcctccacccctcatctggtgggagaaccggcggatgagaaggagggcaagggtttcggcggcgccggggggaagaaggtgaagggcgggtccgccgaggtggtggcgtggggcatcgacaagtggtggcgcgcgcactcctcgccgccggaggtgcccaggtacgccgacaaggcgcccaggagggtcgccgccgccgccgctagggtcaacccccgccccatccagcagccgcgctgagcgtccgtctccgccgccgcccgcgtaatcatccatccatccacccatcttgacaaacaagcagaaaaaaattagggaaaaaaaggttttgttttgttattttcgatctactcctagcttttttgctaatctcgtcgcgtcgtcatcgtcgtcaagatctgggttttggtcaggatctatggagctgcgagagatctcccctgtgttgtgtacagaatcatgtaaaaaaaatgctgatgtaataaagattgcagcgagagatttcgcagctgctgccttgtaatttccg

SEQ ID NO: 14225 - DNA, 578 bp, Oryza sativa
  ref <308>: DATABASE ACCESSION NUMBER: AK064842
  ref <309>: DATABASE ENTRY DATE: 2001-12-06
ggcttcgcactccattttccctctccccgctcgccgccgccgccgccgccagccaagctcgccgctcgccatggcccggatcaaggtgcacgagctccgggggaagaacaaggcggagctgcaggcccagctcaaggacctcaaggcggagctctccctcctccgcgtcgccaaggtcaccggcggcgcccccaacaagctctccaagatcaaggtggtgcgcacctcgatcgcgcgcgtgctgacggtgatctcgcagaagcagaaggcggcgctgagggaggcgtacaagaagaagagcctgctcccgctcgacctccgccccaagaagacccgcgccatccgcaggcgcctcaccaagcaccagctctctttgaagaccgagagggagaagaagcgtgagaagtatttccccatgaggaagtatgctgttaaagcttaggttattaggaacataaatgttttaccggtcaagttttgcccagttgcctaaatttgatgttttgtgtggacatccattgtcaccttagtacaatgtatttggtctactgcatgaagtgcgtactattttgcctttt

SEQ ID NO: 14226 - DNA, 1694 bp, Oryza sativa
  ref <308>: DATABASE ACCESSION NUMBER: AK064843
  ref <309>: DATABASE ENTRY DATE: 2001-12-06
gaaccagggcgggccgcgcagctgctgcactccaactctccaagagagaaggaatcgcgacttcgccgccgcggccgcaacaccgacttcgccggcggcggcggcgatgggcaacgcgcaggcttccgcctcctccaccagctccccccgcttctccatggcgtccagggccttctcgaggcaggagctggacgacctccgcgcgctgttcgtctcgctggcggcgcagtcgcagaccggcggccgtgccatctcccgccccgtcttcctcgagtatttcgggatacgtggggcgctcggggatcggctgttccagctggtggcgagggagagcggcgggggtgagggggtcaccttcgaggacttgatcgtctccaaagcaacatacgagagaggaactcgagatgaagttgatgaattcatttatcaactatgtgatgttacaggagatgaagtcttagaaaggtctgatctggaaactatcttggcatctattcgtgaaaccatattttcagaaaataaggaagctggggaaggctcaaacaagaggacatttgaagcatttatcaactctgcagtattttcgaaggatgctgaaggagtcgcaaggaagtctatgtcgctatcagactttaggagctggtgcattctcattccatccttgaggaagttccttggaagtttgttgatgcctcctgattcaggcagaccaggcttccaagtaccagcgcttcattacctagaaaacatctccccagatttgctacttttaaataaagagtatgcttggcatattggaggtggttttttcacaacaggaggtgcaagaatggaggcttctatatcacagttctcttcatggacaaagcttcaacactttcttaggcaatgtaacgaatggagatgcacagactgttatcatcgttaaagatactgaaggatttgtttttggtggatacgcatcacatccttgggaaaggcacagtgatttttatggtgatatgaaaacattcctgttcaagttatatcctgaagcatccattttccgccctacaggagggaacagaaacctccaatggtgtgccgtgaacttcagctctgactccattccaaatggcattggctttggagggcagccgcatcacttcggttttttcctatccgcaaattttgatcaagggcactcatttacatgtaccacattcaccagtcctgccctttcaaagacaaataggttcaggccagaggtaattgaatgttggggcatacaaacgaagggggcacttgatgaaaaggcagagcttgtcaaggggacagtcctagagagattcaaggaggatcggaacatgctgaagctggttggtttggcgaacgcgagtgattgacagctgaaagaggatcaccacggcaaattcctgaggaccctgtacagcacaattttacagaagaagatagatccttatatacgattgtcactgctgaactgagctttatgaaacttgtttagctgcaagttggtctgtactgtgtgttgtggctgtattagatcaacttcaatgccgaattcgagatatgatgagagagaaactgactgtattttgaaacattgtctatttgtttgttaatataaatgttgactgctgaatatagatgtatgacatgtactttaataaaaagatactcccttcatttct

SEQ ID NO: 14227 - DNA, 1075 bp, Oryza sativa
  ref <308>: DATABASE ACCESSION NUMBER: AK064844
  ref <309>: DATABASE ENTRY DATE: 2001-12-06
gaaacgcaaagcggtcaacatgcagagccagagggagaggccccgcgaagaccgcgtccacgaagaaacccgaggcgcagaccacgcccatccatccgttccgcacgcggcggcggcggcgtcggcgacggcgacggagacggcgacgcgaaccatgtccctccacgccggcggcgtcgtcgtcgtcgacgggaaggagaaggggaagaaggaggagggggaggggaagcggaaggggaaggccccagctacggcggaggcggtccgcgggcgcgcgcggctgcgcggggagcagctgcgccagctgcacgagatcttcctccggttcgacctcgacggcgacgggagcctcaccaagctggagctcgccgcgctcctccgctctctcggcctccgcccggccgcgggggacgagatccacgccctcatcgccgccatcgacgccgacggcaacggcaccgtcgagttcgacgagctcgcctcctccctcgccgacctcatcctcggcccgtgccgcccctccgtcgccgtcgaccaggcggagctcgccgaggccttcagggccttcgaccgcgacggcaacggcttcatctccgccgccgagctcgcgcgctccatggcgcggatgggccaccccatctgctacgccgaactcaccgacatgatgcgcgaggccgacaccgacggcgacggcctcatcagcttcgaggagttcaccgccatcatggccaagtccgccctcgatttcctcggcctcgccgccttgtgagcgacatggacatggatcgatgcttcatctccttcttcctctggttagctttggacttcttctccgttcctgcatttgttcgttttcttctctcttttttttaatccctggcaaatatacgcttatttgattgaattgattgtatcattatgtgttgctgtaaatattgtgcaatgttatctagtgaaaaatctcaattgttatccaggaacaacatagatgatcgggaaatgcctgaccaaattatgaaataaaaaaccggtaatgcttgatccatattattatggagttaccgtgcttatcagt

SEQ ID NO: 14228 - DNA, 2019 bp, Oryza sativa
  ref <308>: DATABASE ACCESSION NUMBER: AK064845
  ref <309>: DATABASE ENTRY DATE: 2001-12-06
tggaggcgacgcgagaggagaagcgaagaggcgacggcatgcggctggcgacgcgagaggcgacggcgacgacgacccgcttcccatccgacgtccacgctctccgccgccttctcgccagtaacgcatcaccgtcgtcttccttgttcctttctctccccggcgctagggttgttgcttgctagggttcttggccaccgcctcctcccctgccgctgtagcacgccaccgccgcctccttggtttttgcttgctagggttcttgtgctgctgctgctcttcttccgcccaaatgagggctttccaagggctggtgtttgttggggattccgatccgcgtagggggtggggatgggggaatcgtgatgggttcttggagatttggtctgtggtttaggttcttgcagtgttgcgggggattcttggtggaagagccctaggttcttggttctgtttcttgccctagatcttggctgaaggatcgatgtgttgcatagccatggatctgtcaaccagcttccctttcagtttgtcttcttctcgaatgaaccaggaaattatgctgaaaaaaaaacatgtcactgtaactggactggtgctccatctctgtttttgtactcacccaagccaggctaagtcaagattgttattaaattcagtgttgcataagaaaagatcctttgataaccagtttttgtcagttcttgatggcatttctgttcattattcagattttgataaccacatgtcctcatggattagctgctttttagcttggatacttaattttagccagcactggctgcctcaacaaactactatgctaattataaaccttttctatttccatctttctgtttatgattcattaaatcttagccattttccatcagatgctttggtcccttctccctttctctgcatatatcattgtagattgtccttgttccgatggggccatcctctttctctgaggatcatcatgcatgacaatttgcacctcataaccagaatttgcaggaagcttcaggcgttttcaacagacatgaaggcctggcattactgacaactattgttgagggtggtggaaactgcaatcctgctagtgatccattaacaaaccagcccctgttatcagcaaacatcattaacaagcatatttttctgctttatttggagaagaaagctttgcgcatcgatgctgaaatataaattgaactgcagtaggaagatgattttgttgcctcttttttggctgcctcattctggcaactacagtgcagtatcttaacatttttttcagctaaattgcctcttatgtagtctgtaataaatgacaacaacaaataggctcatatttttcaattacatctaagtcctggaataggaccattttctttctaagctctgggtagtttaggctaattaaaaaactcaaacatgtgaataaatggaaattctctgttcattaccaaattttcttttgaatttacttgatattatgttgtattagacttcacatatctacttattatataagccgacaagtttggttttttcgaatctgaagatatcaaatgttgtgtccacataggatagcccttttatgatgataacacaaatgcagatcccccaagtttgtttgaatgcatgcaaacaaacttgtaaaatggataataagtgtgaagttcaacagctctattgtatttttacttgctctgtttttacttgcaagagttgtactgcttctatatcacactgtctaagtcttaaccgcaagatttctttgctatggctgcagcggataatcaattgatattcccaaatgccgatggattgctaccagagggaccggaggaaggcgaagccagattgattagtgatatagtcctgaaaagaatgtgcttaatcctgaaatatattactgttcatgcttaactagatagaaatatgcatgatgttctgaattctgatgaatgatgacagcaactgaatatggtgaagaattgtcctgatgcc

SEQ ID NO: 14229 - DNA, 2852 bp, Oryza sativa
  ref <308>: DATABASE ACCESSION NUMBER: AK064846
  ref <309>: DATABASE ENTRY DATE: 2001-12-06
gaagggctcgtcctccgcctccgccgccgcggctgcctcggcgtcggtggcaggcgccgccgtacgccaccgcgctcctttcctcgccgccgccatcaagcgctctccgcgggacatctacaggacggctactcgcccgccggagcccttgacctcctcgcctccgggcgacccagacctggcgcggctcttcgtcgggctcgcacgctctattcgatccgtgcgggtgcgaccgggcgatctgaagtctcgctgagcatcaggcctttttcggtcacatggaagacaatgatgacagggcgtcagctgagattaccactgaccaagagaatcatctcaaggacgccttaatccaggtgtttgctgctacttctgaacaccaagaaggtgaaggtgaagctgcagaggttgtgcaggatgaagagattggtgaaggtgtggagggtgtgcgggatgaggagattggagatatcaattcgaagcccgacaaaccatatgttggcatggagtttcgtgacaaggacgaggcaaagaactattatgatgactacgcgaggaaatggggtttcataacaaagatttcaagctgtagaagaagccagatcacaaagcaatacaatcggtatgagttcgcttgccactccgagcggagctcgagggaatctggtggctagtgctggcagcaggtcaaggaggtccagtagagttctgaagacaggttgtaaggcaagaatggtggttgtgaagagggatgagaaatgggtggtcaccatagtagatctggatcacaaccatccacctttgaacccttctgcacttatgtccttaaagcctcatcgcctcataaaagatgaagatcatgatctcttagagtttctgcgcacaaacaagatacccacgcagaggatcatgtctgttctctgtgatttgtatggaagcatgcaaaacatccctcttgcaaggaaagatgtgagcaacctgagggcgaccatgaggccagaggctgagggcacctgcactgatatggcagctacaatcaaatacttccaagaatcgcaagcagatgacccatcattcttttacagtatggaattggacagcgaaagcaaaattaccagcgtcttttgggtggatggagtatcaagggaagcatatagagaatttggtgattgcgtgttttttaacacaaaatacatcacaacaaagtactgtcttccatttgcgcccattattggtatgaacaatcatgggcagactgtgcttttcgggtgtgtgttgctgaaggctgaaattgaggagacatttgaatgggtgtttcagacttttcttaaggccatggatgggaaagtgccaaagagtatcatgaccgatcaagatgaagcaatggagaacgcaatcgcaaatgttttgccaaacacatctcataggcgttgctcatggtacatatggagaaatgctaagttcaagcttggtgtgctgccgtctcggttggaagggtttgaagatgacctaagacattgcattgacgagtcatttaatgttgaagagtttgaaagaagatgggctgctgtgcttgaccgatacaatttggcaagcaacaagtatatgcaggacctctacgaaatcagagaaaaatgggttccatgctatttcatggactgcttcttcccatttatgagcattacccaacagagtgaggtgatggaagcattgttcaaggattttgtccaccctggggacatcatccagaacttcatcgtgcaatatgagaagctcgttcaatcttgtctggacagggatgataaacagctctttcttactgtcaaaacagatgcaaatttgtggtccaaatttccaatggaggagcaagcatcaaaattctacactcgtgcaatatttgagaggtttcaggagcacctcaagaacactactatgtacaatgtagtatgcgaggcaaccccttattcctatttggtccaaaatgtgtttggtgaccaaagccagaacagaagatatgttgttcattgcaaattggaggatgagaccttcacatgtgtttgcaagcagtatgagagggaaggattactctgtgagcatatcctaaaggtgatgacacataggaatgtcaatctgataccagataaatacttgttccgtaggtggactctgaagggatcagacagtgctgctacacgaagtcatgtacctttgaacatggctgaagcgtccactaggaaaatgaggtattcaacaatttgcaagaaatcagtgtgcatggcaagtgaggcatgtagaacacaggaaggatacaatctagccctccgttcaattgaagaactgactgacaagcttgccgctattaacttgacccgacaagatcaacaccttcctcggcccaacatttgtgataagaatgggaaagggatcaccatgggtgagagtaatacgatagctgagaaggtgctttcagaaagctgtctaaaagatccaacaaaaatcaggcctgctgcgtttgacaataatagtgagtcagcaagaaagagaaacaaagtgatgaaagcggtgcaagatctcaggagtccatttcaggtaacaaaactgacggattgaagtacagggtatcagtccatccttgatgtctgattatgtaaatgcaatagtgtccttgtgcccccttctcttaactcgctgacctgtaaggaaagaaggatttgctgcacatgggagaacggtgctagccttgttgacttcttctttttttctttttttttttttagcaaatgccctgctggagctaatgtgctataacgtcattttggcactttggtagtgattgcgctcttccgtatctg

SEQ ID NO: 14230 - DNA, 3206 bp, Oryza sativa
  ref <308>: DATABASE ACCESSION NUMBER: AK064847
  ref <309>: DATABASE ENTRY DATE: 2001-12-06
gacaagctgacagcgtcgcagcgctggagatcgaaccacgcaacccaacccgtgctgcgaatcacaccacgccctaccagctggaccggagatggaccagccgcacctcgcagccaccccacggcccccgagaagagaaccccgccaccgcgggagcgggacccaccccgccggtggctgcgtcgtagctgcggcatccacacccagtcaggcagtcacccactcccactcccccgctcgaaaacccccaaaaccacccggagaaacagcaggaaggagaggaagagaggtggaggttgcctttggctggctgtggagagggtgagacggtgggtgggaaatttcaaacttggccgccggcgtgctgttcttggctccccggggcggcgctgagaaggatgggggtgtccgggaaaggcggtttcttggcggtggtggcggtggtggggagaggcgctgtcctgctcgcggatgcggcgagggtggtggatttcggcgaggtgggctcgccgcctgcgccgtcaccggtggcggacgcgccctatctccctgatgtggcgtctcctcctgcagtgcaaactgagggtggcaacaattaccaaaaggagatccttgttgcagtcatcttggcacttgccgcagtcattgtaacggtggtatcagcaatttatgcatggaccttctggaaaaaaactcgtcaagctctggattccaaggacaagaaactctcaagtactaccaaggggcacatgctgttacccatgtttgggaaactgaattcaatgaaaacgtccaagaaagaagtggttgcaatgatggacttttcagtcttagactctgctacgggcaagttcagtgagaataacatattgggaaaaggaggttttggttgtgtatatagagcatgtcttgatagaggggttgttgcagctgttaagaaacttaattgttgtagacaagaagtagagaaagaatttgagaatgagctggagtttcttggaaaaattcggcatcccaacgtgatctccgtgctaggatattgcattcatgaagacacaaggctgcttgtatatgagctgatgcaaaatggttctctagaaacacaattacatggaccttcaaatggatcagctttaagttggtacattcggttgaaaattgctcttgatgcagcaagaggattggaacaccttcatgagcactgcaatccattgattattcacagagatataaagtcgtccaatatacttcttgattcagacttcaatgcaaagatatcagattttggccttgcaatttatggtgggaaccacaacaaagctgatttaaagccttctggaactgtcggttatgttgcacaagagtatcttctagatggtcaattaactgagaagagtgatgtgtatgcttttggggtggttcttctcgaactgttacttggaaggaaaccagtagagaagattggagattctcactgtcaatccattgtgtcatgggtatgttttgcgatttccgtgctttgtggtttatgcatctaatagttctgaaaaatgtgtgatgcctgaggttttagcagactgttattgtgtttccttatagcaattgataattgaatatgtctttggatgaactaatttcatggatatatcgttgatgcagtgaaatcttaattagttgagtgcattgatgtgcctcacacttgagatactttttacattttcttcacaaatattcagtatttaaattattttcttgcagcaaatgtgttgataaataaaacctgacgtaagtattatatttcaagcttcacattgcactgaattaagaatatttgcagctccccatagaatgagttaataatgcccatgacagtatgtcaatttagagctttgatacatctccttagtattcagtttgtactagcaaatttgcactcatctatttctgcccaattggccgtttacccgtggtaaaaattctattagggctgggcatattccacacttctggttcatggttatggtaaccaaaacttgtcccagtaggcaaacagacactgaccttgtccgttcacccatctacactactgacacgcggatattccaaaagccatttactgtacctatagcatgatgtattgatgttgcattggctaccgaattctgacttttcaaccttaaatttaaactacgcacaaagacttattatctatacgcatcttttatgctcttttttttggttacctaagtgtttaaatttctacctttccagaacgacatagtcctccatttcatatatctggttgattattatctcttttactttagttcatagttgcatgacaaactaattccattagccttttctccgttgtaaagtggaatagtcagtaaaccacaaagttatcttctgcaggccatacctcagataagtgatagaacgaagctaccaaatataattgatccggttatcagaaacaccatggatttgaggcatctatatcaggttgctgcagtagctgtcctttgtgtccagccagagccgagctatagaccgctaatcacagatgttctacattctcttgttcctcttgttcctgtagagcttggggggacactgagggtagtagagcaaccccgtcaaacgggctaacgaaatgggcccttttctgaacaagtatgatatattcgatggcctgatgaaaatatttcgcgctacgcgtttccaaagattgtggaagttttcccatcaaacaggttgggtgcttgagtaggatgacaacgatggctgaactatcctggagggaaattttcatctaattgccatttttgaagaccaaaacgcttgcctacgaagagatgacaagctactgccgacatttgtagggcattctttaagggtacatcaatctaacattgatttcagaggtagttttgatttgttggtgctctttaactcctgtgtgaccatcctgttagattgtggggcctagttcggcgatttcgtgtaaatttcatcgccggtagatttgatgtaaattcgagtgggtaggcattcatgatcatttgttacagaaaaccacttaatagacaaaatttattcagaatattgtagtgttgttgcgagcagtttaatgtttgatctgatgatttatgagacatcttttttcaaaaaaaaaaaaaaaaaaaaaaaaaaaaaaaaaaatt

SEQ ID NO: 14231 - DNA, 1351 bp, Oryza sativa
  ref <308>: DATABASE ACCESSION NUMBER: AK064848
  ref <309>: DATABASE ENTRY DATE: 2001-12-06
ttggagccagcagcaacacgcacgcacgcaccacacacgtagcagcagagcaatggcggcggccatggcgctgcaggtggtggccggcggcggctgctgttgccagcggcccgttcttggagctggtcggcggcggttggcggcggcgcgtgcggtggcgtcggacgcggcggcggcgaaggtgagcgaggaggaggggaaggtgaggctgggtgggtcggaagtggcggtgagcaagctcggcatcggcgcctggtcgtggggggacaccacctactggaacgactccgagtgggacgacaggagactgcaggaggctaaagcagcatttgacacaagcatagataatgggatgaccttatttgatacagcagaagtttatggtacagcgctgatgggagcagtaaattctgaaagtttactcggaggtttcatcaaagaaaggcaggagaaagaacagattgatgttgccgtcgcaacaaagtttgctgcacttccatggagatttggccgaggaagtgttctttccgcactgaaaaaatcgcttgaccgtcttgggtaatcttcagttgaactctaccaacttcattggccagggctatggggaaatgaaggggatcttgatggactggcagatgccctttagcaaggccttgtaaaggctgttgggagtctcaaactacaatgagaaacgccttcgggatgcatatgcgcggttgaagaaaaagaggagtttccacttgctgcaaaccaagtgaaactacagcctaatatacaggactcttgagttgaatggtgtgaaggcagcttgtgatgagcttggcatcaccctgattgcttattccccaatagcccaaggtgttctgtcaggaaaatacactccagaaaaacctcctaccggtcctcgagcaaacacatatacccctgagttcctcaccaagcttcaaccactcatgaacaggatcaaggagattggagaaagctatgggaagaacccaacccaggtttcactgaactggctgacatgccaaggcaatgtggtgccaatccccggagccaagaacgccggccaggcgcaggagttcgccggcgcgctcggctggagcctcaccggcgacgaggtcgaagagttgcggtctctggcacgcgagatcaagggcatcaagatgcccatcgaggagtcatagacatgtaaaaactgaagaagtttttcatgtatatgataggagatgtgtattgattgtaccatgcaatagtaaacattttacggcgataaaatgtgtagaaggtgtagaaaatgagtcagaaatttctgcctgcatgaatagaaaaggtttatatgactttgagc

SEQ ID NO: 14232 - DNA, 834 bp, Oryza sativa
  ref <308>: DATABASE ACCESSION NUMBER: AK064849
  ref <309>: DATABASE ENTRY DATE: 2001-12-06
gaccagcagcagctcgccatccaagcatcaaagcttctaaactgaagcttaatctatatataaggagagttcattttgattttggtgaggaagaagtagtagaagtgaattagtgatatcgatcagagtgtgaagaagatgtctctggtgaagctgtttgatacgttggcgttcgacgcctggaacccgttcagcatctttgggacgacggtggcggcggacgcgtggctggcgagcgacacgtcggcgttcgccaacacgtacatcgagagccgggagacggcggaggcgtacgtgttccgggcggacctgccggcgggggtgaagaaggaggaggtgcgggtggaggtggacgaggggtggtgatcaccggcgagcgcagcgtccggcgggaggagaagggccagcggtcgcaccacatcgagcgcagctgcgccaccttcttcggcaggttccacctccccgacgacgccgtcgtcgacctcgtcagggcgtccatggacggcggcatgctcaccgtcaccgtgcccaaggtggtcactgacaagcagcccgccatcgccgccgccgcacccgtccccgccgtcgtcgcacccgctgtcgaggcgaaggcaatcgaagccagcccgtagtgatgcgatgaacacacacacacacacacagacagtcagtcaatccaacgatccgtatgtatacgttgtcgtcgatgataagttcaaagtgcttgcgagtaaggtgcttgctgtacttttggtttaattacctttggtgtgaaatgctttctcgatgtaagacaagaaagctagtagcaaaatcatactatttgcttgatgc

SEQ ID NO: 14233 - DNA, 1508 bp, Oryza sativa
  ref <308>: DATABASE ACCESSION NUMBER: AK064850
  ref <309>: DATABASE ENTRY DATE: 2001-12-06
ggttgttcgcctccgctcgccgcgcctgcagatccccctctcgcctcctctcctctcctccccaaaccctagcgagcgaccaactcctgggtggggggatttttctccatggcgctgcagttcgtcgagtcgcagcgcgaggcgcggccggagctcgccgacccgtacgccgacctcgccgacctctaccagcggaagctctggcaccagctcaccctcaagctcgaccacttcctccagctccctgccgcgcagacgggtgacaccctcatacagctctacaacaatttcatcactgatttcgagacgaagatcaatcttctcaaacttgcgcatttcgcggtcatcgcttcgcgccagtaccccgacaaggatgctgctataagtttcctcgagggggtaatcacaaaattgcgcgagacaaaggacctgcgcatcaatgaacccattctctacgtcaagatgcaaatcgctgcgattaacctggagaagggaaatcagaaggagtgcaagaaacttttggacgaaggaaaatctactctagatagcatgactgatgttgatcccacagttcatgctagcctctactggatatcatctcagtaccataaggctcgccaagaatttgctgagttctacaagaatgcccttctgtatctggcttacactactgtagagtcactctctgagtctttcaaactggatttggcatttgatctctcccttgcagccttgcttggtgataacatctacaactttggggaattgttagctcacccgattatcaacagtcttattggaaccaaggtggagtgggtctatcatatgttacaagcattcaacaccggcaacctagctctctaccaagaactatgtagggtccacaatgctgctctcagtgctcagccagctttggtgcagaatgaacggaaactgctagagaagatcaacattctatgtctgatggagataatctttagccgggcgtcagaagacagaactatcccattaagtgttatagccgagcgcactaagctttctatcagtgatgtggaatatcttcttatgaagagcctctcggttcatcttatagaggggataattgatgaggtggacagcacagttcacgtgtcatgggtccagcctagagtacttggaattccacaggtgaaggcgttgcgcgagcggttggacgcctgggttggaaaagtgcataccaccctgttgtccgttgaggcagagacgcctgatcttgtagctgcataacttatccaaccttccttttgctatatggccttggtcaccaagggtgcggtgcgaaaagagagatgatctggctgtggtggctgtagttttctgggtgatgaaaacatgttgccttgaacgtttccctggcaccctattgatcaggacctgtaatttcatttctctttaaatcctctggacgttgaggcctggagcttgatgcattgatcacggaaaaagcacaagcggatcaaaagtttcat

SEQ ID NO: 14234 - DNA, 1674 bp, Oryza sativa
  ref <308>: DATABASE ACCESSION NUMBER: AK064851
  ref <309>: DATABASE ENTRY DATE: 2001-12-06
gaaacttcacctctactctctctctctctctctctctctctctctccctccttccggcggagctacggcgagccttctcccccgcgccgccgcgcggccggcgagcaggttcggaggagtcgcggctcctcctcctcctcgccttccctagccttctccggcctcgcgctcgctcgctcgagccgaatttggagtcggagattgtgatactccaaaatccaaattggattagattctacatgacaagagaacatggcacctggaagcaaggcagagagaaaagcagcattagatgctggagcttggatgttcaacattgtgacatctgttggtatcatcatggtcaacaaggccttaatggctacacatggttttagttttgctacaacattgactggactgcattttgcaaccacgactttgatgacattagtaatgaaatggctgggatatattcaaccgtcctacttaccagtgccagaactaataaaatttgtcttttttgcaaacctatcaattgttgggatgaatgttagtttgatgtggaactctgttggattctaccagattgccaagttatgcatcattccagttttgtgctttctggaaatcctgtttgataaagtccgatactcaagagatacaaagttcagtataatggttgttctagtaggtgttgccgtgtgtactgtgactgatgttagtgtgaattcacaagggctcatagctgccataatagcggtttggagcactgcactacaacagcattatgttcatcaccttcaaaggaagtactcgcttggctcattcaacctcttgggtcatactgctccagctcaggcagcatctttactagtactggggcctttcgtggacttctggctgaccaacaaaagagttgatactttcaattacacagcaatagttacgttcttcatcatactgtcgtgcataattgctgttgggaccaaccttagccaattcatatgcatcggaagatttacagcagtctcgttccaagttctaggccacatgaagacggttcttgtgttgaccttgggctttcttttctttggaaaagagggccttaacttccatgttgcgattggcatgatccttgctgttattggcatgatttggtatgggaatgcttcatcgaaaccaggaggcaaagagcgccaggtttactcagcacccagcgagaaaacacagaaacacaatatactgtcatcacagtctgagcttgaccagaaggtctgaaatacaatgttgatgactagtgttttattgaacatcttgaggaccatgatctgatttattctttttacacgttttttagatgcttctatagaatttgtaggctatagcagaaagagggtacctgggcaaactgtcctggctatacttttggcgtatatgtcaacaaaaagtaactagatgttaatttgaattttaatatttctttaactgcaagagcagtgctgtgtaacttgtgttcctaaagtttttatgtgcaccacctgcatggggtaaaagtacaaatgactctcccccttgtgttgtcttggttgttttgacaataaattgtgtcattcattcagtcgacaagttagcagcatttgtatttggggcactatctgtaaacagtactgaatcctcatgaagagctttgat

SEQ ID NO: 14235 - DNA, 1754 bp, Oryza sativa
  ref <308>: DATABASE ACCESSION NUMBER: AK064852
  ref <309>: DATABASE ENTRY DATE: 2001-12-06
ggcagtttggcaccgaagccacgccaccaccaactcctccccccaaatccgccatggaagacggccacgctcccgccggagccgagctcgcggtggccctcgacgaggaggaggaggaggccgccccgctggtatccggcagacgcggcgccgcggcggcggcgagggcggcgacgtcccagacccgcgacctgcacctgctgagctcggccttcctcttcgtcttcctcgcctaccacgccgcccagaacctgcagagcaccgtcaacacggacgagaacctggggtcggtgtcgctggggctcctgtacacgtcgttcacggcgttctcggtggtgggctcgccggtggtgcggcggatggggtccaggcgcgcgctcgtgctcggcacctccggctacctcctcttcatcgccgccaacctcgtcccctcctggtacacaatggtgccagcctccctgtatctgggttttactgcatcgatcatctgggttgggcagggtacatatctcacgtctgctgccctcagtcatgcaagagacaataatttgcctgaaggccaaactttggggaacttcaatggagagttctggggaatgtttgctagcacacaggtcattggaaatttgatctctcttgcactactgagagatggaaaggatggaggaagtgtcacggggaaaagtctgctgtttgttgtgtttcttggctgcatgattgtcggcattatattaatgtgtttactttccaaaagggacgagaaaggaaataatgctccaacacattcctcatttggggctatgatgaagtatattgttgcccctctcaaggaccgaaggatgattcttatcatccctcttattgcatattcaggattacaacaggcatttgtatgggctgttttcacgaaaaatattgtaacacctgtgcttggcatctctggcgttggcggagccatggcaatatatggtgcagccgatgttgtttgttcattggttgctggacgtttgacctctgggcttcattcagctacatctatcgtttcggttggagctattcttcaggctgtagtcctgttctggttacttcttttttacagtccaatgggtggactgcttggtgcagcagttccactgtttataggtgccttatggggtgttggtgatggtgtcttgaatacacagttaagtgcattacttgggctgctgttcgaggatgtcaaggaggcagcttttgcacagttgaaggtttggcaatcgggtgccatcgcagtcatcttcttcctgagcccaaatattacgctacaagccatgcttatcttgatggccactgcgctcatcatctctttcggcgcattcttgttacttacacttgttgtggagaagccatcgaccgtcagatcgtgaggaaatccgaaatccttttgtccaacagaaaccaattccaaagtggggccaatttcaccacatatcttgatcagtgttaccaacaaccaaagcagcacatactgtatgcacgagcgatacgaaaccaaaaggaaatgaggtatctgtcagttgatgtgcaacacaacaccaccctgactccatttgtttcagcgatttttgctgaattgaagtgattgcattcaaaattagagtgacggccttgtagcaaaatctgttttcctccagttgtttctgttccgtggttgtttctaccaaatgtaacatcagtcaaatatatatgtttataatagctgctcttttgttctg

SEQ ID NO: 14236 - DNA, 4155 bp, Oryza sativa
  ref <308>: DATABASE ACCESSION NUMBER: AK064853
  ref <309>: DATABASE ENTRY DATE: 2001-12-06
gttcctctctcgcgcgctctccctagcccacgccgccgcctcctcctcctcctcgcgcctcccgcccccgctacgccgcgccgcaaactctcctcactgcgtcgccgccgccgcgcctcccgcactcttctagcacccagatccagagccggtggggaagttggatgtgacagatcaaggccgccggatctgttgagctcagcagcggcagcagcttggcgatgatggcagcaatgtctcagacatgccctcctccccactggtgacaagcatgaggccacggccgaagcttatctttcgcacctccatcagaccttgtaattaagctcggccaactgcgaccttctaacgcagggaaggatggaaaggagtggctcctgcttgaagagctgcagggacagatcgccaggatacagggcagcctcgaggaatgtgaaccatggcaatctgcatagcccttcatttggaagctatgtccccccaactattgagtactatttttttagctccacctcccttttcattcaaggtaaaattgaaaatatcatttgaaagtttgtaaaatactatgtatttggcgtttgaatcctacatggctgcacaatatttgcacactatctctgaattttgggtaaaagttagtaattattttaaagacaagctagatatatggagtttttaaaatataacctctattattagttattggttctcgctggtaaagcaagtatacagttaatcaatctgggcactgcaaccttaaagcaaaagttttccttacttagttttccttacttgttcttgcttttcttcaaattaagttgaaatctaaatattcatccagtgattttggaagatgaaaaacactcgtgtgtatgatggagtttataggagagtagcacagttacttgcaagacatttgtccccttttgaaacaaagtacttatttattttatatagtacaagatatttgttcagtgagtagataaaaatccagtttgttgtgaaggctttcaaatgggctaattttgcactatatgattagccctttgcttatatatgaactttttttttaacattctcttgctgttgctgctgcttagtgacatttctcattctgtgctttcagcagggcagctttgctcttatgcaagtgacatgttaacactgcagttgttatactataggctgtgtgatagtgtgctggtcaagtcggacgcatactaaatgtttgtgatcttttgatgattaatttaccttgttttataggtgtagaaattggtggaagcatagttggtttgtttctgctctcatttcaggtctacttgtcccgtactgtttgctgccggcgtggacgctgctgagtccccacacatcagccacgactagaatcctggaatagccgctaccatatatatggcgtttgcttcctagaatccttttgctttacataaaactgcaatccagactatgaacaaacacttatggttcaaatcctataacccttaattattattactctaaatgtctactgctttgatatgatccttatcttcagcttaaacatatgccatgaaaaaaaaatgcatgaggtaactctcagccaactatggtttgctatcctctagatgggaaggtatagctggggtacatatttgtagctaatctgggatgagctacattttttttccagcctgattcatgtctagcaatgtaagctttataaatatttgatcttagtcaatcttgtggaaatggtattattttggcttaattttcctttcttatctttcggaataacatagcttcctgatcaccaaactgctcatgctccttgattagaacataaatggttagtaataaaaatgtattgtccctccccatatctctgtttcccccccatttttccatggttgtatgggtttggtccccttttatcagtcaaggacaggactgctcttgggcgagtcaaacaatttccacttagcacattcctttcgttatttttcggagcaaatcatttttctataaaaaatgctttaccctactctactccactactaacatctcaacacactctgtttatgtgagcaaacatatataaattatgtgtacaaccgtacctctcacatatgtagttttttatctgtagattaattgaatatgcacatgagaattgcttgattaggcctggtgttatggtgctgaattgctgattgaaaagctggtgataatgttggtatcgttttggtattagttcatattttagaaaggttgcaagcttattgctattatgttggcttaatactcacaggcagatgttgtttttgcatgctaagtgatattgataggtgctaagctcttggaaattgttacaaaccagaaacataattacctcattcagtttttctacaataaatatttttctcttgaatgaccaaaattaattctatgccttctttttgcttaattgttgattacacatttatgctaaactaattactgctctttctgtgacattttaagcatcctctgacaagtgttaggtagagcctgctttcatttgccgcagatcgggtttaagtgtatgatcaacaaagtggaacactcatggatatcatacctaattattgttgttaaccaggaaacgaactcggcaaatccagagaaagtgtcgacacctaagattttgaagcacacagctgacaaagtggacatggtgtaacaatttctagaacaagatgcaccatttatagagaaaaatgtagtacacgtattcccatagcagtcctaggagtgcaattgatttttttacatggatgaaatggaaggcacgatactctgttcctgtgaatgaattgagaccatcctaatgttggtttgcacaggtactatatttcattggatttttccttttatgcattgtttacagtagttggtttgactgaaaaatcagagctagaagaccttttcggtttcttttttcctctgaatatgggcatgcctttaaaccattttttttcttattacctattcattgcttttgtgcaagttcagttgggatttggatttgttaagctgcttgggttcaattcgcaagacgattcaaatttatgctattctatattttgttaaatgaacatgatggttgttagacaaaggtagttgttattgatagcaatgacaacgctcctttggaaatatgaggcatatataaaaataaaatgtgtacttttgttttctagatcctacttgccagccccatagttagtggtcatttagtaattcaatctatcccctcttatcttacatgtgcaagtaataatttattgcattgcatttgttcacagtttgatcatgcaaagttatagaagatgttgtggtggtcttgcggaggtgggtatccattactggtgattaaggtgttaaatttgcttggattttccattgctcagaattgtatatttccattactgaaaattgcaggcaacaagtttgattccattggccaatataatcttttagtgatgttgtgtaaaatgttatgtcaaatccatgagtattacccacactagaaccaaatttgtgccacaatgtgttgtgattattgctgaggcatagaatttatttgtaaaaaaaaatgtgttattagcttgacagaagaaaaaaactaccagattacgttttataggataaacattgaactaatttgtttagtatgacattttgttgaagctatctttttcttaatgactttggaagtaatgtagtgtttcataactaattacaataccttcaatgaagagattatcgtcctaatgcttttgtttcatgtgcactctattgcgttaaaaaaagaagaagtggaacctgaagaactttagaggacctcgcttggccagttggcctgtctctgtgtcattatagcttctcacttacaggcaaccaaggtctcttcatggattattgcttgtggatggccatgctcttcaacaaaatgaaaaggttaaatataatgaaatattatttccttgatcccataaagcttcagatgtagagtgtgagcttgctgccctgtgagctaaaattccatttttttacatattcctattgtactattcatggctgctttataattgatgtgctttcgtttgt

SEQ ID NO: 14237 - DNA, 2382 bp, Oryza sativa
  ref <308>: DATABASE ACCESSION NUMBER: AK064854
  ref <309>: DATABASE ENTRY DATE: 2001-12-06
gagaagacctaaccctagtcatccaccaactcgatcggagaggagatcggagaggagaggaggtgcggtgatcccgacttcactcggtccaggccttaaatccaaggcaatcgagagaagagatccgcggatgaaggaataaggaaaccgatctcgatttggttcgtcatggacttggagtgggttgcggaaaggggaggggaggggggcctcctcgtttaagaggaagaggaagaggaggacgaggacgaggagtaagttacttgctgccgccgagtcaaggccgagccgaagacggcgaggaggttttgtttggagcttttccgtggcgggaggggagggattcccgacgcaaccgtcaaaaatcttccacccaacactctccaaaggatccaacgggctcgagtggagagattctgcaggacgagcaccgcatagaggagaaggcggagatggcttctagtggagagaagctgcagaagcaccggccagaggagatagctcttagaacgggctcgagtggtcagaccacgcagaagctccgagagaaggcagccactgagaatcaccgtccaaaggagattggcccaagtggagagaagccgccgcataagctcctccgggcaaaggggaaggcgggcacgagctcaattggagtaacgctacagaagcaccgggcagagaaggcggactcaagtcgagggataccgcacaagctccaggcaccggccggcacaagctctattggagtaatgccacagaagtaccaggcaaagcagcagatgggtacctctcggcttggacgccatccaccatgtatccaagtccaaggaggagtaagcaacagagaggcacaagcggccactaccaaccggcagaagcacaccaaaagtaacaattcattatcgacgagggccactacaaagctcagatcagcaacaaacaccccatgtcaaaagcccaccactgccccttcctccaatggcaacactgctcctcccaaggatcgtaaagaacctgctacaaacgctgagaataatgctgttcctgtcgcagagaacaatgatttgcaagaagcggatgaggcaatcaaaaggctgaatgaattgggcttgggagagaatatcagctctgaggagttccttacatacattgaccagctgaatgaacaacctaaaatcgatacttccattgaactggacgatgcacaggtcactaccctctattttcagcatgcgcgctatcgcgtcagatactataagcacttgtcacaacaacctaatactgagttggtagaggattcttaccacatgaaacttgtggggaagatgaactctccgatgagtttattcgcgagatggaattttttatgcgtttcgaggaagatggcacatttgattggtatttctaccctgattactgctggcttgctgctctgaacgactaccaacgtctagtaccgataaactgtgttggtgaggagtacgcttattgggacgactaccgcggctattttaatagctatcatactgaattgcaatatctcgacttctgcaaggcattgtcgaaggaacttaagtggatggaagactatgacctgaataaactgccatcttctaagtggggaagaatatgcagcagaggagcctaccaagcaattaagattgccacccgcttttccaagatcactgctgctttggcctataatgcctactatgattgtttacagcacatgcgcttttatgttgcttattgcaaggacatggatagcttgtactttgagatttggcagcgggtcaacatgcaaaaaaagagtttcagagattctttggaggaagtctacaacctcaacaagttcccttcacggcaagataaaatgaaggatgcattggagaataactgttcccacatggaaactgtgtttcatgtttgcacggcaagtgttaccagtgaaattgcggaggataaagctctggagctgattgcaaaggcagttgaaagtcggatgaacaaagcaaaattctacgagcagtatatcgaaaagaagatagatattgcccaagctattggattgatttccacggatgggactgaagcaacatgatgtgcttaacttatagtgtttttttttgggagggcttagcttacctttctttttatatcagtatcagtagatgtcgatgccccgccagcgcctgcagaaataaagatcccgaaccaatgtttttttagctgttatgattaattcggtttccaggctccggcccgatcgaaagcattgtaattgataatgttatgtgcgatacatttagcgtacgttgcaatcgtgcctcggagtgattcgacttgctgattcggaagatgaagttttttttttgcatg

SEQ ID NO: 14238 - DNA, 1630 bp, Oryza sativa
  ref <308>: DATABASE ACCESSION NUMBER: AK098851
  ref <309>: DATABASE ENTRY DATE: 2002-08-28
gggtttcaagtctcatcgccaaatttcgttttcgattttttttattttttttgctcgtctcgtctcgtgtctaccctttattcatccctcttctcgcgttggtgctcctccgcccgatctctcgtctcgaagcttctggaagcttcggggggagggatcccgggccgggctcgcccgccatggcgctgtggcgtgtagctcctcgtggctctcgtcggtgtcgcgctcgtcggggggagtcggcggcggcgaatcgaaggtgtcgccggagatcgcgccggtgagcggcggggagggggagggagaggaggaggagggggaggaggagaggtggtcgcggctgctgccggagctgctcacggagatcatgcggcgcgtggacgccggcgccgagcggtggccgccgcggcgggacgtggtggcctgcgcctgcgtctgccgccggtggagggacgccgcggtgtccgtcgtgcggccgccgctggagtgcgggcggatcacgttcccttcctcgctgaagcagcctggaccaagggatgctccgatgcactgcttcatcaggaggaacaaaaagaactcgaccttctacctttatctcagcttaacacaggccctaacggataaaggaaagtttctgctggctgctcgaaggttcagaaacggggcacatacagaatatatcatttcctatgattgtgatgatctatttccaggaagcaattcgtatgttgggaaactgagatctgacttcctgggtacaaagttcatcatctatgatagccagccaccatacgatggtgcaaagccctcacggagccaatcgagtcgtcgctttgcaagcaaacagattaacccaaatgtttcaggcggtaattatgaagttggacaagtgtcatacaagttcaacttcctcaaatcaagaggaccaagaagaatgcagtgcaatatccagtgccccgtaggccagagcaccgcatcagatccattgaagaagctgattagcacctcaagccccttggctctaagaaacaaggcaccacgatggcatgagcatctgcagtgctggtgcttgaatttccatggccgggtgaccgtcgcctcggtgaagaacttccagctcgttgctccagctggcaccagcgatccatggggcattgcagatgaggagacagtgatcctgcagttcggtaagattgaggacgacgcgttcacgatggactaccggcagccgctgtcagccttccaggcgttcgccatctgcctcacaagctttggcacgaagctggcctgtgaataagtgtaacttttgggtttgatgatgatttacaccgtgcatatggatgggatctccgttgatagcgcggatagcctgaagccctgaactatagcgcccctgttgaaccaggagagtaaggtgtaaaagggcgacaggggcacactgcactgaacacaccgtgtccctaactctcgactctctcttctctttttctctcgtctaatgatgtggatggacttggtttatgttgatcttggagagatgatggtataactctttgttgtaaatggcactccttttcacttgctgatgtaccccgtgcataatgaatgtaccattctccagtcgagtttg

SEQ ID NO: 14239 - DNA, 2579 bp, Oryza sativa
  ref <308>: DATABASE ACCESSION NUMBER: AK098852
  ref <309>: DATABASE ENTRY DATE: 2002-08-28
gcttccgatcttcttcttcttcccccaaaaatctaattaaaatcccctcccccaaaaacccctctcacccgaatttcctcatggactcggtgccggccgccggagtcggcgtcggcggcggcggcgcgggcgcgggctacccggagtccacggagtcatccccacgcagccggggcggcgactcgtgggacgagcccttcccttcctccgccgcggcggcggccgcggctgccgggggagggaggctccgcctcatgtgcagcttcggcgggcggatcgtgccgcgccccacggacaagtcgctgtgctacctcggcggggagacccggatcgtggccgtcgagcggaacgcctcgctggccgacgtccacgcgcggctctcccgctcgctcctcggcggccagccgtttactctcaagtaccagctccccaacgaggacctcgactcgctcatctcggtctccaccgacgaggacctcgataacctcgtcgacgagtacgaccgcatcgccgccacctcctccggcggcggctcctcccgcacgtcgcggatccgcctcttcctcttcccggccaagcccgagtcatcctcctccctcggctccctcctcgacgactcctccaagtccgagtcatggttcgtcgacgccctcaacagcgccatctccggctccctcgacggcatcccgcgcgggatctccaccgactccgcctcagtcaactgcctcctcggcctcgaggacgactcctccacgcactcccgcggcggcccgcctaactcttctcccgccgaggaacagcgcgccaaccagcagaagctcgccgcggccgcggccgttgctgcggcgaggcacccgcacgacgtgcagtccgtgccggactcgccgatgattgacaagaactcctcgttcggatcaacgtcctctgcgccatcgctgtcgaatctaccgccgatacgggtgcggcccgaggatcgcccgccggatagccgactcgccccgcaggttcccgttgaggatcacttcgcccagatggggatctccgatcagccggtgcagcctgtaattgggggatacatgcagccgccgccacaggtgccgatccccaacatggctgtccccagcatctccccctcggatgcgtccagccgagtgttctccgacgatgacaagtccgatcacggcggcggcggaggtcggaagccgcagccacccaagccggaggttccacctgtcgctgaccccaccaacagagccatgtactacaacgatagatcgcctcctgctgaattgaagcgtgacatgccggttggaactgatgctgccagctatcgtgtgcctgtgccagcccaagatgctgctgccgccgccgccgctgcggctgctgctgcccagcaacccccagctgggtatgtgtatgcacagatgcatgcgccgccaccgcagcagcaacccccaccaccacagcagcaacagccagtcccacagcaatatgtcactgcacaaaatcagcatttcattcacaatccagctactggcacattcatcccaatccaatcctattaccaccatccggtccctcagcaagcaccacagccgcccatgccgcagcctgtgccacagccacaacaatcacacgctttcgacccaaatactggcatgtattacattcccatgcgcacgaatgcgcctcaggcatatagcatgcctcctggtgccgctgctgtgccgcctcccacccttgttgacactacaccaaaaccaaccgtgccaattcctcagatggccgtgaagcagcctgaactgcagcaacctggtttgtaccgaactaccgcagcacctacccctgtaccagcgtctaatgctcctgcgtatgctgggatgggctaccaccgtgttattcaaacacaccatcatccagcgccacagcctgcagcgactgtggcaggcaattttggatatgactatggtgatcccacgcgagcacaggtcttctactcgcaggcagcggcaccaccaacattgccacctcagtatcagcccatgggctcgcccgatgctggccaggctgacctgaaacaggcccgggcttcatagctcaaggatttgtgaactctggtatgttgagaatcctagaagtgtagttatcctgccgttaattatcactattgttattacatgttacatgagtcagttggcaaccagtggatggatgatggcattaggcagctgtgcatttgggatcaaaataagatgaaaatgggatggtagttcttgtgttgggtgaaactcaagagggtgtttgtgattggttctggagatgccaatcgccaatgctggagcaagtggcggggagtggcttccaattccaattgccgtcttcttattttttaaaaaaataaatatatagtgtctaaagaactcggtacaaattctgaatcaagaactcatcatttgtgtagccctttgtatatttgaacctggaagttattgaggttgaaatgtcagataaaagtgtcattactttgcttgtagaaacttcatttgagttaaatatcatatatatacatcattcctgcc

SEQ ID NO: 14240 - DNA, 2345 bp, Oryza sativa
  ref <308>: DATABASE ACCESSION NUMBER: AK064855
  ref <309>: DATABASE ENTRY DATE: 2001-12-06
ggcaggagcttgcagggtggtgagagaggaaggggagagtgagagagacaaagcataaaggcgaggagctggatgccgtgaagaaatctttagcctgagagagagggagagtgagagaagaagaagggagggtgattgctctgatctggagctggttggggggaaaggagttgggagaatctcatgggagctgtgatgaaatgggggaggagaagctccttgatccgttcttgagccgggaaatttgatctttttaagctgcggggttggggggaaatttggatcttgaggctacccgagcgcgaagcctggtttcttccggtgctccgttgctgcattgccttgttgcccccagatccgagctgccgtgcgagggaaactcggatctttgcttgcgctctccccaaatccgcccaaaatttgggctctggagcaagctgtgttcgtggtagccccccgtgcttcaaatccttttcagaaagttcatttgtttagttgggggttagatatggcagtgatgcggactactttatgaggtgtctcctgccatttttttttagagtagattcgtcagtaatggcggatcttgccatggagtagtagtagtagtagtagtagtagtagtagcagggggttccttcggtgatagcgaagggtgcttagccattaagcggcggcgatgtctctgaagagcattgtgcgggagctgagggagatgagggacggcatcggcagcatgtcgaggcgagccgctgacgggcgcgccggcggcgggcgcggcggctcgcggcattcttggccggtcctgtggtcggagcagcagcagccgccgcagcagcagcagctgcagcgtcaggagcatcagcagcagcaggggcggtgggcgaacctgccgccggagctgctgctggacgtgatccagagggtggaggccagcgaggcgacgtggccggcgcggcggcaggtggtggcgtgcgccgccgtctgccgctcgtggcgcgaggtcaccaaggaggtggtgaagacgctcgaggagtgcggcaggatcaccttccccatctccctcaagcagccggggcctcgtgagcatccagtgcagtgctttgtgaggagggacagggcgacttccacctatctcctctacctggggctcagcccatctctacatggagaaaacgacaagcttttgcttgcagcacgcaagattaggcgtgcgaccaggacttcttttgtgatctcactggtctccaatgacttctctctatccagtagcacctatgttggtaaactgaaaccaaacttccttggcacaaagtttacaatctttgacagccagcctccttgcgatgctgtagtgttgccaaacaaccgaccaagcaaacgacatttcaagcaagtatcaccgcgattgccactaggcaattacaatgttgctacggtctcatatgagctcactgtcctacgtaatcgaggaccaaggagaatgcaatgcaccatgcactctataccggcattgtgtattcaggaaggtgggaaggccccaacccctaccggcatcatccactcacttgacgaacaagttcccgccttatcaactagcaaaggaaaggaaccagccatagaattttcatcgacaagcctcagcgctgatttgtctggaccggtctgtacaaatgaagtgcctcttgttctgaagaacaaagctccccgctggcatgagcagctgcagtgctggtgcctcaacttccgagggcgtgttacagtagcatcagtcaagaacttccagctcgttgcctcagttgatccttcccttggtatccctgcggcagagcaggagaaggtcatcctccaatttgggaaaatcggaaaggatatattcacaatggattataggtacccgctctcggcgttccaggcatttgcgatctgcctgactagctttgacaccaaaccggcgtgcgaataactgaagaaaggtatcaaacctgtgtcttctctctatttagctcaggcagcgtctgattccgttggatgctgtaaaattctcggtcttgctatgccaaaatgagcctactcctgggggagacagtagctttgtcagatcaagatgaacaatggcatctatatcttggcaactggcaaaaccccaggaaagatttgagtgacaatgctgtaaccaacaaactgctattgtactattgttcttggaatgtttagcggtgaaatatcactgcgctatggataatatggacgctgttcatcgtgccctacctccttccttgatgctatttacagtgaggttggcgattatgatgctaattaaggagtatctcctgtgatccacc

SEQ ID NO: 14241 - DNA, 1588 bp, Oryza sativa
  ref <308>: DATABASE ACCESSION NUMBER: AK064856
  ref <309>: DATABASE ENTRY DATE: 2001-12-06
gtcctctcggtcgccgccacagcagccccgatccacgccgctgccgccagacgcgcccttctcctccctcgcacgccgcacgcctcaccctcaccgccaccccgccgccgccgatctacacactcgccgcccccgcctccgctcccacacgcccttctcgcccctcgcgcaccgatctccgctgtagttctccgcgccgcccccgctctccaccgcccgaacacagtcgctcgcctcgccggtctccactccgcctcgtcatccacttccactcgcccaccgccgaaaggtcagcgtcactggaatttaggctttcaataaagatctcctaaggcatatcaaggctcacgggcaagggatctccctcacagattcttcaaggaggagggactgcatactcagtattgccgtagcgtggtgccgccgcccatccttgagtatccaccgtcaccgactacccttctctgagcgggtgcaaatcctgccaattgaccccatctcagaacgtagagccatgcggttccgtgtagtattcctgtagtccactcctgcaatccacccgccctctgttttgtcaaacttctcatctccccttcccttccgccgccatgctgccggccggtagcctcaccgacaagcagctccacttcttcgacgccaatgggtaccttgtgctggggtcgttctcgagcgcggaggaggtgaaggcaatgagggaccgcatggcggtgctcatcgacggctttgacggcgctggcgacgtcttctccacaaaggatcatcggcaggtgaagaatgattttttcttcaagagtgcggagaatatctctttcttctttgaggaaaaggcatttggagatgatggatgcttgaaacaggcaaaggaactttcaattaataaagttgggcacgcgttacatgaacttgaccctgtgttcaaaaagttctcttttggagagaatgtttccagcctattctcttctttacgctacaaaagacctgcagttattcaatctatgtacatctttaagcaaccaggcattggtggcgaggtggtgccacaccaggataatacattcctatatacaaaccctccatcatgcacagggttgtggcttgcactcgaagatgcgacaaaaacgaatggttgcctatgggcaattcctggatcacataaaaatggtctgaaaaggcgaatgatcagagatgaaaatgatactcattttgatcatccttcgccaacctatgatctgaaagaatttgtgccattagaagtaaagtcaggtgatttggtggttattcatggagatcttgtacaccagagctttgaaaatctttctctggtgtcaagacatgcactgagcttacatgtaattgataccgaaggatgtgaatggtccaaacaaaactggttacaaaggaaaatcccacctcagccactttatgaaaattagtacaagcagttacctatgtgtcaaataaacgagtgatgacctagaagcaatggtcagacaatgtaaataccttgctactctgttttcatggatgttttttatggcaataaatttggtgtacgatgttgagtagc

SEQ ID NO: 14242 - DNA, 1236 bp, Oryza sativa
  ref <308>: DATABASE ACCESSION NUMBER: AK064857
  ref <309>: DATABASE ENTRY DATE: 2001-12-06
gaggttaaagcgacgccgccgccgcaagccgtccgccttgctcctcctcgccgagagcttggtcctcgccgtctcctctccccacgcgcagatctaagcctagggttagggtttgtgtagctcgcagcgatggcgatcaagaggaccaaggcggagaagaaggtggcgtacgacaagaagctctgccagcttctcgacgagtacaccaaggtgctcatcgccgtcgccgacaacgtcgggtccaaccagctgcaggagatccgcaagggcctcaggggcgactccatcgtcctcatggggaagaacaccctcatccgccgctgcatcaaggtgcacgccgacaacaccggcaacaaggagttcctcgagctcatgcccctcctcgtcggaaacgttggcctcatcttcaccaagggtgacctcaaggaggtccgcgaggaggttgccaagtacaaggttggagctcctgctcgtgttggtcttgttgctcctgttgatgtggtggttccccctggcaacactggtctggatccatcccagacctctttcttccaggtgcttaacatccccaccaagattaacaagggtactgtggaaattatcacccctgtggagctcattaagaagggtgacaaggtgggctcctccgagtctgctctgcttgccaagcttggtatccgccccttctcatatgggctggttattaccaatgtctatgacagtgggtcagtcttcagccctgaggtgcttgacctcactgaggatgacctgatggagaagtttgcttctggtgtttctatggttgcctcagtctccctggcaatctcgtacccaactattgctgctgcaccacacatgttcctcaatgggtacaagaatgtgcttgctgttgctgtggagaccgaatactcgtacccacatgctgataagatcaaggagtatttgaaagaccccagcaagttcgctgttgctgccccagttgccgccgacagtggtgctgctgctccatcggctgccaaggaggaagagaagaaggaagagcccgaggaggagtccgatggtgacctgggcatgagcctcttcgactaagcctcttgccatatcgctgcaaagttgaaagttttgtttcaagttctgaacatcgaagtttgtttttaatctttagcatattaattttctactagacaagaatgtatccaacaatggtatcgttaattatgcattttggttgtgccc

SEQ ID NO: 14243 - DNA, 2441 bp, Oryza sativa
  ref <308>: DATABASE ACCESSION NUMBER: AK064858
  ref <309>: DATABASE ENTRY DATE: 2001-12-06
gaccttatccactgctcctgcactccgcgcagtctaccggcggcgagcaatggaagccgctctcctccgtcctcctcccctcgctgcccgaggcggcgtcagcatcgccatcgccttctccgtctctcgactcccttccgccgccgccgccgctgcggggaagcccaggaagctcgctccccccgcatgccgctgccgcgccacgccgcaatggcagctcgatttcctgggcgcggaagcggacacggaggcagacggcggcgacgacgacgacgacctcgacctcgacctctccctccccgccgagaccaacgactggtgcgtccgcgcgcgccgctccgctctccgctccatcgaggcgcgtggcctctccccctcgctccagcggatggtggcctcgcccaagaagaagaacaagaagaagaagtccaagaagacgaacttgaagcagaagaaggccgccgagcccaagcctcctcgcgacaccgacgacgatgaggacgacgaggaggaagcggacgatgatctggaggccctcctggcaggagggggtgagctggacgacctcgagctcagggtcgcgcagttcgccgatggcatgttcgacgaaaagcgccagaggaacagggagcagttcatccagacgctctccgccttctcacccgccgcgccgtccaaccggagccaggaggtgtccctcaacaggtccatcgtcgaggctcgcaccgccgacgaggtgctcgcgctcaccgccgaggtggtcgccgccgtggccaaaggcctcagcccgtccccgctcacgccgctcaacatcgccaccgcgctccaccgcatcgccaagaacatggaggcggtgtccatgctacagacgcaccggctcggcttcgcgcgcagcagggacatgtccatgctcgtggggctggcaatggtggccctgccggaatgctcaccgcagggtgtttctaacatctcctgggctttgtccaagattgggggtgacctgctctacttgccggagatggataggattgcccaggtagccatcaccaaggttgacagcttcaatgcacagaatgttgccaatgtagccggatcattcgcttccatgcgccactcagcaccggaccttatctcagcattgacccggagagcagcagaactagtgtacaccttcaaggagcaagagctcgcccagttcttgtggggatgcgcttctcttaacgagtgtccgtatcctctacttgatgcacttgatactgcttgcagggatgctcctagtttcgattgccatctacatgatacagtgcctggcatgtggcagagctcagacaaagaagcttctagcctgaaaaacagtagcaatgcctatgctctgaactttacccgagatcagattggaaatattgcttggtcctatgctgttttaggccaaatggaccgtccgttcttctcagggatctggaaaactctaagtcaatttgaagaacggaaaatctcagatcagtatagagaagatatgatgtttgtttcacaagtttatcttgcaaatcagtctttgaagctagaatacccacatcttgatatgtgcttacgaggtgatcttgaagagaatttaacaaaaactggaaggagcaaacggttcaatcagaagatgacctcctcgtttcaaaaggaggttgggcgtctcctatgtagtacagggcatgaatggaataaagagtatacaattgatggctacactgttgacgcggtgttggttgacgagaagcttgcatttgaaatagacggaccatcacatttctcaaggaatttaggtacaccattaggccacacagcatttaaacgacgttacattgctgctgctggatggaaccttgtttctttatctcatcaagagtgggagaacctcgaaggcgagtttgagcaattggaatatttgaggcggattttaggttttgatgcagaataagccccatagcaccatattttagcacaagcaacaccattcttgattcttgagagggccaatacaaccaagaacttgtggagtggtggtagtcacgcggataatggtatcagtaaccttgaaagcacatgagcagagtcctggcgctgcttttccctgtgcaggtgaaacgatagtgttcattcataagctgtcttcgaagtattgctcttgaaatctccatctattgaagggtcagatgagaggcttttctttatagccttaacgttaatgacaaaggtttgagagaggaacattaggttctgcaccttacctttatattgacgatttgatactaatttagatttttgtcaatggtgagttttttttgtaagagcaaacctgttgttaccctacaatcatctacctagtgttatttgtctgtaaaatacctcaaagtattgttattgcagtcaaaacatttttattgatgctt

SEQ ID NO: 14244 - DNA, 3546 bp, Oryza sativa
  ref <308>: DATABASE ACCESSION NUMBER: AK064859
  ref <309>: DATABASE ENTRY DATE: 2001-12-06
gattccattcccttttctcctcctcctcctcctcctcaccgccggcggcgagcggccggccggcgagcagagcagagcagaggagagagccgacctccatctgggctccaatcgaagctgaagcgcctcgtcgtagtttgggcaaaagaagttttgattttttttatttattttgggtgctgaggaagagtgtaattaagctgtgaggattgagaagatggatggaggtgggacgccggatggggatccggtgccggacatggacatgctcatgctgtcatcagcgctcgatggcctcgacagctacaccgacctcgtcgcgggttcatcggtagccgacagcatcttctcagctcttacctgtttcccaccatcacaagaacgattgctgcacgtctcgactcctgtgggttctaattctaggcaagatgattctgatgtttccatcactaaggagggtacaacaacaagaagaggtgattgcgccgccggattagcttcaggtgagccggtggccgcgggaattggctctgtcccgaagccgttcgacggcgtcacactgacggagaggatgctcagggcgcttgcgatgctcaaagaggcgtcgggtggcgaagcgatccttgtgcaggtctggatgcctgtgaggaatggggagcagcatgtgctgactacctctgaccagccgttcttgctcgatcagaagcttacgggatacagggaagtctccaggcagttcacattctcggctgaagaaggacccggtctgttccccggattgcccggccgggttttcatgtccggcatgccagagtggacgtcgaatgtgatgtactatcatggctcggagtatttgagggttgattatgctaggcgccacgaggtccgtggatcccttgcgatgccggttttcaactcaagtggtgggtcttgctgtgcagtgttagaagtagtaatgacacgagagaaggataacttttgcttagagatggtcaatgtttcgaatgctctgcagagttctataatttctgatgaggcctttcaaatgattaacttcgggtgaattcctatttctcctacccttggtttcacacagactacatctggtctttttcttaaagagaccataaaggtattttctatctcgagaaaaaataatctatagtttcctcgtctttgaggatacaaggtttgtactatcctaggaggattaatcagcactctcctgtactgatccctccctagtctgctctttgtccttggatttgatgctaccaatatacatttcacactttggttgttccaggccttcaataacccattattcctcctttgtgctgcccaacgttacgcccaattgcaatgcaatactgctaagtacctcttcaaagaattaagtactgtaggtcatatgtttgccttccagtttcacattccaaatctatgtgtttcactaagtcggatcaatatcatgtactggagcaagaagaatgattggaagcataaatagtctgttcagttaagcactgtcaatgcatggagacattctcagagctattcaagggaccagaaattagcattgatggaaatattcgatgttctgcaagctgtttgtcaagcacacttgctacctttggcacttgcatggattccagtttgctccaaaagagatgtgcttgtgtcagtagaatatggtgcaaattttggtaaaaggaacaaagaagtgctttgcatagaggaatctgcatgttatgtcaatgacacgagaatgcgtgattttgtccaagtctgtgctgaacacccccttgagaaaggacaaggtgtcgctggaaatgcatatttatcaaataatcccttcttctcatctgatgtgaaggattatgatatgcacgcttatccacttgtcaatcatgcccgtaaatttggtcttcatgctgctgttgcaattaggctgcagagcacatacaccaaaaatgatgactatgtgcttgagttttttcttccagtcttgtgcaaaggtggtggagaacaacagctcttacttgacagcatatctgcgactatgcggagagtatgcaaaagtctgagaactgtttcagatgctgagttgaaggaagatgttacaagaaagccatcaaatgaaaatcgatcaggaacaagatgcccttcacctgttaaccttatttattcaggccgagaaattgatgtatcgaatgaaacaaaaacaaatacgcctttggaatatcagatagagggcattgatgaacaactatcagatacaaaaagtactaacaagttaataaagtgtagcaatgcatccgacggagagaaaagacgcagctcaacagagaagagtgttagcttaagtgtcctccagcagtacttctctggcagcctgaaagatgctgcaaagagtattggtgtttgtcctactacgctgaaaaggatatgcagacaacatggaatatcaaggtggccatctcgtaagataaagaaggtaaaccgatccctaaagaagatccagaacgtcataagttcagtacatggagtcgagggagtgctgaaatatgatccttccactggatgccttgtttcatctgtttccccttccatagagcctgtattgatgaatgttgaacacaaagagaacatgcaggccaagatgtactccacaaactgcagaataagcaaaatggtgaaattaattttgacatggacgatggagaattatttcgaaactcacattctaccagaacattgagtggggcattctgtgaggatatgccaaatggtttatatgttgcaagggaaatgacttgtgttgcgaaaactggcacgaggacggagagactggagcacaaaccatcatcaagggattctttttctgcgccacaagaatacagaatggagagtgagactgacaagagcaataagaattccaaacaaagcctaccgtcctcttccagcatgacagattgctccacatcaagcggcgaaactttcaagagcatcaagagtcagtcagctaacgaaagcaacaaaaccgtcgtcgtaaaggcgagctacaagaatgacaccataaggttcaaattgctaccatccatgaaatacgagcagctgctcgaggaaatagcgaagaggctgaaactgtcaattggcctatttcagctcaagtacaaagacgatgagggtgactgggtgattttagcgagcgatgcggatctccaggaatgcctcgagatacttgacaccaccaggttgcgtatcttgaagcttcaggtgcaagatgttgtgtgtcctatcggaagttcgtcaggtagctgctccatgttacgtccataggttaggatactactacaaatgcaaaaaatgagaaaccaatcgtggagttctacttattttgagtaattgtacaaaaggacgtaggtatcttgaggaaagctaaggtgctagttttggtttatgatcttgaatattcacagtatggtgctttgaaacatgtacatatttatgaaacccggtgcaatagagtcgaaggatgtttgc

SEQ ID NO: 14245 - DNA, 2538 bp, Oryza sativa
  ref <308>: DATABASE ACCESSION NUMBER: AK098853
  ref <309>: DATABASE ENTRY DATE: 2002-08-28
gagcggctgatctctctcatcaatctcctccgtcgcggtcgcagctgcgggagtgaagccgccccgcggagctagctaaaccctagccactgcccgggcggagagttggggtttgggttggtggcggtgggccggtggcggctcggtggcggagctccggtgtggggtggtgtggaatggaatggaagttattcgatgatttcccaggattttgactaggccacagatggttacaagttgcattcatggtcaaaattgtgtctgaacatagagattctttggagttcatagacgaagtgatttgttttgttcaatacttccacacttataatgggtgctgtctgctcaaggaagagaagccaattagtgcacgaggatgactctttccagacatcttccaggttctcaaagaccagcagcttgaaatggctgctgcttacactgccacgcagcaattccgatgtctcccgcaagggccagggaaagggccctggtcgttgcccatctctaatggagctttgtgtggccaaagcctgcgaggatattaacaagtattctagtttttctgtattgccgagggatctcagccagcagatttttaatgaattggtagcgtcgaaccgtctcacggagacattgcttgaaacttttcgggattgtgcactacaggacattgatttgggggagtatcctggagtgaatgatgcttggatggaagtagtggcttctcaaaggcattcattgttatcagttgacatttcttgctctgaaataactgatagtgggttatatcttcttagagattgtccaaacatgcaaagcttggcatgtaattactgtgatatgatctcagagcatggcctaggaatcttgtcaggtctttcaaacctgacatctctcagtttcaagagcagcgatggtattactgctgaagcaatggaagcatttgctaatttagttaatttggtaaatcttgatctcgaacgatgcctaaagattcatggtggccttgttcacttaaaaggcctcaggaatctggagtcactcaatatgagatattgtaacaacattgcagattcagatatcaaatacttatcagatctcacaaatttgaaagaattgcaattggcttgttgtagaatcactgatctgggtgtttcttatcttagaggcttgtccaagctaacacagttgaatttggagggctgtccagtgactgctgcctgtttggaagctatatcaggattggcttctctggtggtgttgaatttgagtcggtgtggcatatacggtgaaggctgtgaaaactttcaaggtcttaaaaaattgaaggttttaaagcttggggttcaataatatcacagatgattgtttagcacatctgaaagagttgatcaatttggaatctctaaacttggactcatgcaaggttggagatgaaggcttattacatctgagaggccttatgcttttgaaaagtttggagctatctgacaccgaagttggaagcagtggactccagcatctatctggccttcggaatttggaaagcatcaatctctcgtttacgttagttactgataccggtatgaagaagatatctgcactgaattcactgaagtcagttaatcttgacaatcggcagattactgatgttggcttagcagcacttacaagtctcactgggttgactcatctggacctttttggtgctaggataacggactatggcacaagctgcttcagattttttaagaatcttgaatctcttgaagtctgcggtgggttaattactgatgctggagtgaagaatatcaaggatctcaaagctctgaagcaactcaatctttctcagaacgttaacctgacagacaaaaccctggagctgatttctggcttaactgctttagtctcgctgaacgtctccaacactcgtgtatccaatgccggcctccgccacctgaaggatctgcagaacctgcgctcgctgtcgcttgattcctgcagggtcacgacaagtgaggtgaagaagctgcaggcgacggtgctccccaacctgataagcgttcgacccgagtagctggacactacatgatcacctgtaaataatcatctggatggcttcatgtagatagctttgcaagggcctggattgaagccagattaataagtaaagtctatggtagcatttgttggcctaaaaccgggagacgttggcccaaccgggagaaagcctttctacaccccaaaagctagctcatgaggtgagggacccctccccttttaagttggtgccactccccctaaactttcaatgtgggactattctcaacagcatttactaggtccttcctgctccgtttatcgggatcttttcgttttcaagtactgaaaaaattacttgtatttccttcactccgtgtaccctccaaggcgtgacgggaaggaacaaaattgtaaatattgcgcttcctcgccattgtgggatgcttatgtgtagtgtggtgtacagtgccgcattttctgtggcagtttgtg

SEQ ID NO: 14246 - DNA, 1616 bp, Oryza sativa
  ref <308>: DATABASE ACCESSION NUMBER: AK098854
  ref <309>: DATABASE ENTRY DATE: 2002-08-28
ggcacgcacgcacacctctcccctcctctcctcctcccgccgccgccgccgccgccgccgcaaaaacccgaggccgagaggaggagacgggcgcgggggctgatctcgtcggcgaggcgagcgggcgatccggtgcggtgcgggccgggtggacatggcatcggaggacgtggtggggaagagcaggggggacaccgcggtcaccaccatcgtcaacctggcggaggaggccaagctcgcgcgggagggggtcaaggggcctggttaccaggtgctctccatctgcaagtctctcttcgccggtggcgtcgccggtggagtatcacgtactgctgttgctccgctcgaacgaatgaagattctgcttcaggtccaaaaccctcacagtatcaagtacaacggtacaattcaaggtcttaagtacatatggagaacagagggtctccgtggactttttaagggcaatggtaccaattgtgccagaattgttccaaattctgccgtgaagttttttagctatgagcaagcatcaagtggaattttatggctttatcggcaacaaacagggaatgaggatgctcagcttagtccactattgcgccttggagctggtgcttgtgctggtatcatagccatgtctgctacttacccgatggatatggttaggggtaggattaccgtgcagacggaaaagtctccttatcagtaccgtggtatgtttcatgcattgggttcagtataccgtgaagaaggcttccgtgctctatacagagggtggcttccatctgttatcggagtggttccgtatgttggcctcaactttgctgtgtacgagtctctgaaggactggctgcttcagacaaatccatatgatcttggcaaggacaatgagttgcatgtagttacaaggcttggatgtggagctgtggctggaaccataggccagactgttgcttaccctcttgatgtcatcaggaggagaatgcagatggttggttggaataatgcagcatctattgttactggagaaggcaaagaggcgctccagtacaatggtatgatcgatgcattcaggaaaactgttcgctatgaaggtgttggtgctttgtacaagggtcttgtgcccaattcagtgaaggtggtgccttctatcgctattgcattcgtgacatacgagtttgtgcaaaaagttctaggagtagagatgaggatatcagactgaagaaattggagttagtgctggtcattatcaactgctatttttgtagggtggtgagttctgtttttgtaggaagggcaggtagaaggatcatagcactgaggctcccattcagcataaggccctctcagcccatgttggtatatcctactactgtttccagatcctaattgttgctggacccgtgggaaaaattaataagttggctgtaaagcatgaagcatttgcctaactcataaagtctattcagtcgtgatggtgtattgagattgaaaactcatgcagtatgctgtgtgctgctaatagttgattttcatcattttcttctctttgtctaagattgtttctgctgataaatactctacttaaaccgagtaatgttggtgcgttttatacc

SEQ ID NO: 14247 - DNA, 788 bp, Oryza sativa
  ref <308>: DATABASE ACCESSION NUMBER: AK064860
  ref <309>: DATABASE ENTRY DATE: 2001-12-06
gtgagatgagataatccctttcctctcctctccgtgggggtgctgtgtccaccttcggccgccgccatggacaggaatggtgttagccactaaaaaaaactaaataaataaaagggcctccgctgggaacacacaaaggccaaggcggaggtggggaggtgcctgtagagcgattggattcgtatataaagaaaagcatcgtttgccttgcccaaatcctgccgcagatgccaaggttcataacaacatagatcctgcaagtcttgagacgctagtgcaggagaagaaagacgagctgttccgtctgctacttcagatggatcttcacaatggctcgtgtgaaaaaagtgccgaggagaacaaagccatactgaggctgcttcggcaattccgtgctgagacgcgagataatggtaccttgtccggtgctgatacgaaaaacttggccaatcgatacgtcctacctgtgtccattattttgagtggtatcatcatcgtcgctcagggccattttatatctcacctctgaaatgggggccctgctcgttcgaagaataagttatctaacggtgtggatccccatggtgcggaggctaaatatcaccatgttatcttttcctctttttttttttcatattttaagaaaacgataccgatgtgttctctagtgctaatggttagcgagttcgcttgctgtcataaccaattctcttgttcgtctatgttcgaattgtcaatgtcttctttctctgaaactagcgaagtgcatgtgcctttgcaacaaatcc

SEQ ID NO: 14248 - DNA, 2119 bp, Oryza sativa
  ref <308>: DATABASE ACCESSION NUMBER: AK064861
  ref <309>: DATABASE ENTRY DATE: 2001-12-06
ggtcttcacatcgctcatctccgcctcctccgagctcactgacaggtgggccccctccctcctccgagtcctcgccgtcgccgccgttgcctgctccgacctgacggacggagaggcggctggggctcgatcggacgccgccgccacgggaggccggaggaggggaggcacggcgaccggcgaccggccacgggtgggtgggtgcatgtcgacggccgccgcgtcagccgcgcgcggtaggtagatgaaattaaggaacacagcaataacacgagctaactcagcctgtcttccaatggaggattgtgttggtatcaagtacagcagtgtcaatgagggcgaagagcgtaagggaggccatggcgtcccaaaggtttccatcatcccactcattttcctcatattctatgaagtttctgggggtccgtttgggattgaggatagtgtcaaggctgctggcccactcctagcaattgctggatttctgctgtttgcactcatatggagtgtcccggaagccctgattactgcagagatgggcactatgtttcctgagaatggtggttacgtcgtctgggtctcttcagcccttgggccattctggggttttcagcaaggctgggcaaagtggctgagtggtgtcatagataatgctctctatccagtcctcttcctcgactatgttaagtccagcattccagctcttggaggtggtctcccaaggaccttggcggtgcttatcctcacagttgcacttacttacatgaactacagagggttgacaatagttggctgggtggcagtctttcttggcgtgttctctctactcccgtttttttgttatgggattaatagctattccccgaatcgaaccctcaagatggcttgaaatggacttggggaatgtgaattggggtttatatctaaacacactgttttggaacctcaattattgggactcaatcagtacccttgctggagaggttgagaatccaaagagaacactcccaagggcactttcttatgctctagttttagtggtggggggatacctctaccctctgatcacctgtacagcagcagttccagttgttcgggagttctggacggatggatatttctcagacgttgcgagaattcttggtggtttctggttgcactcgtggcttcaagcagctgctgcactgtccaacatgggcaatttcgtaactgaaatgagcagtgattcttaccagcttctcgggatggctgagcgtggaatgcttccagagtttttcgccaagagatctcgctatggaaccccacttatcggcatcatgttctccgcgtttggtgtggtcctgctgtcctggatgagcttccaggagatcatcgctgcggagaactacctgtactgcttcggtatgatcctggaattcatcgccttcatcaagctgagggtggtccacccaaacgcctcccgaccttacaagatcccactgggcaccatcggcgctgtcctgatgatcatcccgcctaccattctgatcgtcgtggtgatgatgctcgcgtccttcaaggtgatggtggtcagcatcatggcaatgctggttgggttcgtgctgcagccggctctggtgtacgtggagaagagacggtggctgaagttctccataagcgcagaactgccagatttgccgtactcgaacgttgaggaagacagcacaatcccacttgtgtgctgacctgcatatgcatgccatgaaagtagaatccccaaccatagccatgctagacggaaggaacactgcgatttgcgacttgtttcgtctcacggcttttcaaagcctcttcatctgccatgtataattagaagagaagcaagttcaaaattgtgatcatgctatttgtataccatgttggcgtcagggaggattgtaaatcccagggccagtttgaggaaaatacttcacttggctattgccaatagcacctggttattcgttcattatatatgtgctgctgctcttgttagagagattctgaggacaagcacctggttttatgttttgctatcgatatatgcaggttctagaaaataacattgtacaataagatatgtcatcgctatcgaggttcc

SEQ ID NO: 14249 - DNA, 1725 bp, Oryza sativa
  ref <308>: DATABASE ACCESSION NUMBER: AK064862
  ref <309>: DATABASE ENTRY DATE: 2001-12-06
gacttcttgttcttggcagcgagcgccatttccagaggatttcttgggttctataggtgaggttggaggcgcagcttcgtcgtcgtctgatggcgccatggcgtgcggcggcgatggcgtcgtcccagctcgcgcgccgcgcggcgaggaggctgctttcgtctcagcatcgccgtcactgcgccgcgcccgcctgtccctggctcctgggctcggcgccgccggttcttgcgccgtctccggtggctgcggcggcggcgggagatcgtcggggattctgctccgtccggcgtttcaccggggagagcaacgccgccgccgccgtcgaggaggcggagaacgggttggtggccggtggtgatcaggcaatagatttccctggaggaaaggtctcctttgttgctgaaatgaacttccttccagaatctcagagggataggatcaactgttaccgtgttcttgacgatgacggcagaacaatatctggaagcagattccaagaggtcagtaaggagctggctctgaaaatgtacaatgaaatggccaccctccaggtcatggatacaatcttctttgaagctcagaggcagggaagaatctcattctatctcacttcacatggtgaggaagcaatcaatatagcctctgctgctgcacttactattgatgacattgtactgcctcagtacagggaacctggtgttcttctatggcgcggcttcacactgcaagaatttgcaaatcagtgctttgggaataagctggattatggtaaagggaggcagatgccaatacactatggatcgaaccgtctgaattatttcacggtgtcatcgcctattgcgtaagtctgaaatatctcttccatgtccacaccaaattcatgcaagccaagggcaggttcatcattctttgatgattcatcagtacacagctccctcatgctgttggagctgcgtactccttgaagatggacaagaaagatgcatgtgccatcacgtattttggcgatggcggcacaagtgagggagacttccatgctgcactcaactttgcagcagttatggaagcgccggtgatcttcttctgccgcaacaatggctgggcaatcagcaccccaactagtgaacagttcagaagtgatggagctgttatccgtggtcaagcttatggaatgcgcagtatcagagtagatggaaatgatgctcttgctgtgtacagtgcagttcacacagccagggaaatggctatcaaggaaggaaggccaattttagttgaggcactgacttaccgggtcggccatcactcgacatccgatgattcaaccaaatacaggccggtcgatgagatcgagcactggcgaacagcgcgagatccgatttccaggtacagaaaatgggttcaggggaatggctggtggtgtgatgaagatgaatctgaactcaggaacaatgtgaggcaagagcttctgaaagccattcaggtggcagaaagaatgccgaaaccgccgctcgctgaactattcaccgatgtttatgatgaagttccttccaacctaagagagcaagagcgattgctgagggatacaatcaagaagcaccctgcagactacccagctgatgtgcatatttagttgtattgggtgaccagaggtttccatattgtagtaactattgataatttaggttcatagcattgataaataataacaacaataattcaggc

SEQ ID NO: 14250 - DNA, 940 bp, Oryza sativa
  ref <308>: DATABASE ACCESSION NUMBER: AK064863
  ref <309>: DATABASE ENTRY DATE: 2001-12-06
ggatagcccacactctcatccacactgctcttcccccccgcgcgccggccatggccaccgcgacgctgcccctccgcctcctcgcctccaaaaccctagccttcccctccgccccgtccctcccggcctcgcgatgctccctccccgtcgccgcgtccgcgccccgccgctgctggcggctcctcgcttccgccgaggagccggcgcccgcacccgtggaggccgaggccgaggcggaggtggtagaggaggaggaggttgaagaagaggaggctgcggtgccggagcctgtggaggcgcagatcgcagccgcgggcgccgggaaggacgccgacatcttcgccgttgtcatgattgggtcgagacagtacattgtgatgcctggaaggtatatatacacgcagaggctgaaaggcgccaatgtcaatgatcagataatattaaacaaggtattactggtatcaactagagacaaggcttacattggcatgccagtggtgaccaatgctgctgttcatgcagtggttgaggaacagggacgggatgataaagtgatagtcttcaaatataagaagaagaagaagtaccagaggaaacttggtcacagacagccaaacacaaggttaagaattaccggcataagtggatacgaggacttccctgctgacccgatacttgagtatgttccagcttaagagcaattgtaagttctgtagttacaaacaactggtagtacattagaatacgagtgctaccttttcttgtctggaagaacagtttttgaacaaaatttgctttgttcatgtgttcgagtgctgccagtcatccagttgttccatcctttgtttattccaccatctgttttgttcattctgatattgtgtatcctagccaactgtattattttcactgtgcttaaaaaaagagagagcattttacc

SEQ ID NO: 14251 - DNA, 2598 bp, Oryza sativa
  ref <308>: DATABASE ACCESSION NUMBER: AK098855
  ref <309>: DATABASE ENTRY DATE: 2002-08-28
gaaggtttcccccaactcaactcccctccccttcgcttcccttcccttctctcctctcctctcctctcctcttctcccccccaaattcgccgccgcctcctctccccctctcctcctacccttccccgcggcggcggcgagaggcggcgcggtgcgtcccctcccctcccccgcactctgctggtgctggtgctgggctgccgttgggggaggcgggagatccgcccgggcccggggttccgtttcctcctcctgctcggtctcaacctgttgtaatactatccatcaccagcaatgaataccccagaaaagaaaccactgtgctatacttctagaagagcactgcaacagaggacagaatcctcttcggaattgatctctgtatcaaaaagagcaacccgccagaatactccacgcaagccggattctcctcccaaacgaacaacaagaagtagcgctaacctggcgaaatgtatagagaacaaacaccatagcagtcctctgaagcggcggcggggttcagatgcggctaccggaaagtctgcaacagggccaacaaggaggaagcataaacagaaaaggaaaaatgatgagagtgatgaggtcagtcgcatggaaaaaagagcaagatatttacttatcaaaataaaacaggagcagaatttgctagatgcatactctggagatggttggaatgggcacagtcgagagaaaataaagccagagaaggagctacagcgtgctaagaaacagatcatgaaatacaaaatcgctatccgtgacgtcattcaccaacttgatttgtgtagttccagtgggagcaaggatgactctgtgattccaccagatgggtgtcacgagtctgtcaatcctgaacatacaatatgttcaaggtgcaaatcccacgagtcatttcctgacaataacattatattctgtgaggggggctgcaaactggcgtgtcatcagaaatgtttggagcctccttttgataaaattcttccaactacccgccatgggcggctttgcaaacactgttcttccaagatgaaaattttagacgccattaatgcccatctggggacaagttttacagtgaagtgtccctccagtgatattttcaaggaagcagctgaacatttcaactctgatgatggactgggccaagattggctatctgagtattcaggtgatgaggactatgaccctgaagaaaatgaggccagcagcagtggtgaagagaataaatctgccgattccaattgttcagggagtccactttattctccaaatgatgatattccagacttcatatcagcagatttcaatgatgctgaaggattctgtcgtgaaagttcaaatctaggaatcgattttggtgaagatggtttggctgagattcttacccaccaaaggccaagaagagatgttgactatacacaacttaatgagcaaatgtttggagagcctattggcaatgacgaacagagtgaagatgaagattggggtcttaacaagagaaagaaaagaagaactggttcaactggtgttgggactaattccgtagagggtcgatcagatgtcaaatccaataagaaagcccaacctcggagaaaacttttcaggattcctcctgcggcagttgaggtgctccgtaaagcttttgctgaaaatgagcttcctgcccggagtgtcaaagaaaatctctcaacagagctgggtatttcttttgaaaagattgataagtggttcaaaaatacacggtgtgctgctctcagggataggaagggtgaaagtcgttattctggtcccagcaaaaggtcaagaacaagcatagaaaaggctgaaacttcagctaaagtggatcaaatggacaactcatgctttcttcccttatctgaaataatcaacgtgcccacacgtctgcagaaaggtcttgataagaagccaaaatcaattaacagccctccaagacctcaggacaatgaaacttgcttgtcgccaactgataaaaccaaggagggtacaccgcctacgatcaagccttccatcacagattctagtcaactgatgaataacaacatcggcactgaggagactgctgtttcttgggtggacacttgggcctctgacgctctgcatttcttggacgtgagcgatgatgaacatttcttcgatgtgatcgagaaggtgtgcggtctcgagaatcggctgcagcggttgaaggagaacatgctatcatcgtcatcgtcaactgacaacaatgtggctgctgagagtggcttgcaaaacgaagttgtgcttgtaccagctgctgagctcaaggataaagcatcttaaccttgcatctgggtcccaatgctttgcttcagttgaccatttgctcataggattttatacatcagaaaatagtacaggaggggctggagtgtagcttgccccgtttatctttgaacttatataccggtgaactggtaccattctatatagggagggacagataattcggattaggttcgtgaggatttgcaaagagttagtttaactgtaatctttcagctggaactttgttcagcgagtaataggtcatggacaatt

SEQ ID NO: 14252 - DNA, 1215 bp, Oryza sativa
  ref <308>: DATABASE ACCESSION NUMBER: AK064864
  ref <309>: DATABASE ENTRY DATE: 2001-12-06
gacggccagagttccgctctttccccttcccaatcctccgatctcatcccccggctccggcgacgcggcggggcgatgcgtagctgctgagcgcgcggcgccacgaccccccccacctcgagagcgcggccatggacgagggctacgccaacctccccaccagccacctcctcggctccgtccccgccgccttgacccccgaagagaggaagccctcacccgtcgccgaagttggcacctcgcgtctgcagcagtttcctcctgctcttggtggtactggtggtgttggtggaggaggaggagggtaccagcctccagggacccctgcagatggagttgtagaaactcaaacaaattggaaaggatacttcaatgttgcatcttatgctccatatttcaatgttgatactgatgttgtagttgacaggctcatcagctcggtttatccaatggatgggtttttcaggaagattgatgctaatcctgacatgtatgggcccttatggatcacaacaacactgatattcatgctagctgcatttggaaactttgccacttatctgatgcaaaggaaaacagacctgaacatatggagctttgatgttggctatttcaactgggcagcatcggtcatgtatggttatgctgccgcagtgcctgctatattctttttcctgtttcagtattttggatcacgcccaagccttgttcggttttggtgcatgtggggatactctctgtttatcttcatcccagcatctgtactgttacttattcctgtggaatttcttcgatgggtcatcataatccttgttggtggtgcttcatcttggttcatctccttaaacttaaaggaatgtactgagggagctgatatgatggttttgattgctagtgctgcagtgctccagtttactctggcactgttcatcaaagttttctttttcgcctgagattgtcttttggtgttgctcaggtgagcttgatgttttgtctgctccaatcattctgttctggcgagcatccttttgaggaccaagcggagtagttttacttgacatacatattgacactagattgatagacctttgtgttttgtgttcatgagttttttttactcctttagttcacagaacttcactgtatgtttcaattcggaattgctgagtttgtcatctaaaattgcatagtgaaccttcgaccattttgatctac

SEQ ID NO: 14253 - DNA, 3363 bp, Oryza sativa
  ref <308>: DATABASE ACCESSION NUMBER: AK064865
  ref <309>: DATABASE ENTRY DATE: 2001-12-06
gactccccccgcctccatccgccctcccccagtcacctccgtcgtcgtccgccctccacccgccgccgccgacgtcgtccgtcctcccctcgctatccgttgcctctccttgcaggccgtgcgacggcgcggctcgtggcctcgtctccggtgccgccgtagtcagatccggccctcccgcggctggatccagctccgctgccgccggatctggcggccggaggagacggcacgacggagtaggatggccgcgatagcttcggacgacgaagcggcggaggccgacgggtgcggcaccatcatccgccttccccgcaacacctccctccccacttgttctccccccaccccacccgccggcaatggggcttgtggcggctgcgcatccggccgcacacgggcaccgcgccactgccgcccgtcagagctagcggggagaggccggccacgcgaagtaaggatggcgagggaaggcaaggagtggggtgcagtggtggtgatgtcaccgtcgcctccccggcatggagcacggcacggcggccgcgtcaacgccgcctccttctccggcggcatcgtggccggtgtggcgccaacgccaccgcgcttcctcacgccggctactggattccaactccggtcgccctccggcagccgctactgccaagagcccgtggtaacgcacgatttcctcaacacgaggtgccgccgccggccaaactacggcgaggtatggtctctaggaaggtttccaggcctccactacgggtgcgacccctaatcttctcttctacttcctactctctgattcccttggccaattgttcctggatgctcgactccctgccatgccgccgcagccgcagccgagatggccggtgctgcctgtccctggttccgcttcttcctatccccttccttcctctattcccctgcttctccctctcttcttctcttcctttctctcttcccctgatcctccctctctctcatcctagccgttgccccgcctctccaattgccgctgctgcccgtggagatgactggtgccaaccaccacagaactcctgcggctacatcctatccccattgatgagtaaactcttccttccctatatcattcttatgatgatgttttgtgtggtgttctctcttgtatgatgttgtgctgtgaactgtgatgcattggggataattatggactagcgctaatactcaacttggtgatgtcctgtgctcatggtctctgttggttgtagtgattttatttagttgatgcctatatgctatgaatggataaatgaatgctcataattctgatgcaagtgcagtactgaaattagaaaggataataaaaaaaagttgcactaacatgattaagtccttgtatatgctagcatataaaagtaactgaaatactggaatcagtagcacactagaatgatcagaaccatatatatatgtttgaatgttgatattatctaatttctgaaattagtgacacagtaataaaatcggatttaaaaataagatttattgaataatacaacaattatatggttttatactttgataatcatggcaaaaacctgcgccattgataatggaattgtaacccttgaaatataatcttgaatacaaatagatagtgactgatcgatttccttcagtgatttatttctactgtctttatgtcctgattattaccctatatgatttactgaacaataggttaacttatgaaatactttattacaattttgataaatgactgagtttaactactgataaactgataactatgtgttataattttattttgatgccctgtcctaaacattagctttattgtattaaatgatttgctacaaaaaatctaacgtattgctggtttctcctctctggtctaatggcggcggctgcgctgtggtgtggtgtgcaggaagggtatctcgtcgtcggcgctgccgtgcaagaggattcccccgagcttgctcaagaacgccgcctccaatgtggaggagatgatcatgaaggccgcgaagatgggtcagatgtcgtcgcagattggcgttgtgctccgtcaccagcacggaatccccctcgtcaagagcatcgccagtagcaagattcttcacatcctcaaggcccacggtgagatctccccaccctatgacactcccacttctattgattgcttcatgcgttcgtgtgctggtttatgttgtttgattgatgggtaggtcttgcaccgaagatcctggaagacctgtacttcctgatcaagaaggctgttgctattaggaagcatttggagaggaacaggaaggacaaggactcaagtttcaggcttattcttgttgagagcaggatccaccgcctcgtccgctactacaagcgcacaaagaagctcccacctactttgcggtcttggattatttttctcgagttttctacagttttctcctgcagtttgtacttttacaaagcttgataatgttctgaattgactgctcataatataagattacgaatctgggcaagcttagtaattatggatgtttgtttaacaaatagaatggtgcttacttgagtaaatcactcaatacctgatcaatcaatatactagcacaatctcgctgatattattatctgccttggatctctgttctcatttataattgatattctgatgacagcttcaaatggatactcttcaaagtcggcttgatgttgagttccttgttgctcacatgtgttctgtcaaatttaaggaatggattgttgtgctagcaactttattgagacgcgctgaggtactgcctatctttcacatgttcaacaactgtgcacacaatttcagtaatactgttcttttgactaacttgtggcaggcttctgcatctgacaatgcagttttttttcttattttgttttttggatttttaccatgtattgatcgtttaatgttttgtaagaagcgtacttcatccttgctgcacacatgcaaaatagaccagtgtcatgtgtgctgatggcactgggagatcaattggacggacaacagtttaacctgtgttaatttaacacatagcagatggagaggcgcaggaatacaatgtaaatagcattttttggggattttccccttagagcaacattttggaggctatggcagtttttttccagagaatcagctactcgccatattgttgtaccattagtttgttgaaacagattggagtgtgcatccttcccctttttgtaagcagattgaagtgggcatttttcccctttttgtaagcactttttgtaatatgccttgcaatttaatatgtaaagtatgtacattgggaaggttattgt

SEQ ID NO: 14254 - DNA, 2117 bp, Oryza sativa
  ref <308>: DATABASE ACCESSION NUMBER: AK064866
  ref <309>: DATABASE ENTRY DATE: 2001-12-06
agatccccccgccgcgccgcgtcgtctcgctctcatctcctcccccaaaaagccggaagagagagagagagagagagagagagagagaataattcgaacgcggcatcgcgctggtgagtgtgagagtgagatcgatggcggcggcgtccatctcgcggagcctcctccgccgatcccgctgcggcggcggggagcaccacctcctcctgctggcgcgcggcttcgtcacggcggagtgccaccgccccgtcgtgctccacaagcgcggctccgacatcctccacgacccatggttcaaccggggcacggggttctcgatgacggagagggaccgcctcggcctccgcggcctgctcccgcccaacgtcgtctcctcccagcagcagatcgaccgattcatgcttgacatgcaacggctgcagagatatgcgagagatggcccatcggatacttacccgttagcaaaatggcgtatccttaacaggctgcatgacagaaatgaaacaatgtattacaaggtcttaatagataatattgaggaacatgcacctattgtttacacgccgactgttggacttgtttgtcaaaactatagtggtttatttagacggcctcggggaatgtattttagtgcagaagatcgtggggaaatgatgtccatggtgtacaactggccagctgaccaggttgacatgatagtagtgactgatggaagcaggatattgggcctgggtgatctcggggtgcatggtattggtattgccattggaaagttggatctatatgttgctgctgctggaataaatccccagagggttcttccggtcatgattgatgtgggaacaaacaatgagaagctcctcaaggatcctctgtatcttgggttacaagaacatcgtctggagggggaagaatatgtagcgattatcgatgaatttatggaagcggttttcgctcgctggccgaatgttattgtacagtttgaagatttccagagcaagtgggccttcaggttgttgcagcgttacaggaagacttatcggatgtttaatgatgacgttcagggaactgctggcgttgctatagctggtctcttaggagctgtaagagcacaaggaaggccaatgttagatttcccaaagcaaaagattgttgttgcaggggctggcagtgctgggattggtgttgtgaatgctgcaagccggactatggcaaggatgctgggaaacaatgaggttgcttttgagagtgccaggagtcaattctggatagtcgatgcccatggtctaataacagaggagcgcacaaacattgacccagatgcacggccttttgctaggagaaagagtgaactaggtcaccaaggcctaagtgaaggggcgagcttggttgaagtggttaaaaaggtgaagcctgatgtcatacttggattatctgctgttggtggtttgttctcaaaggaggttttagaagcattaaaagactcatcctcttcaagaccagcaattttcgcgatgtcaaatccaactaagaatgctgaatgtacacctgaagaagccttttcaattcttggtgaaaagatcatctttgccagtggaagcccatttagtgatgtggatcttggtaatggaaagattggccactcaaatcaagggaataacatgtatctctttcctggaatagggcttggaacccttctatctggagcacgggttatctcagacggaatgcttcaggctgcagctgaacgcttggcttcgtatatgaaagaagaggaagttctcgaagggatagtataccctccaatctccagaatacgtgatatcaccaaggaggtggcagcagcagttgtgaaggaagctgttgcagaggatctagctgagggatatcgtgacatggatgcacgtgaacttgcaagactcagtgaggaagaaacagttgagtatgtccagcagaacatgtggagtccagtttatccaacaatagtgtacaagaaagactagagctttaatgtccacgtattctattgctcatgcccaattctctgaaggctgcagtttgtatctttcaaaatactggcgcttctgttatgagaatccaatatattgttttcatcc

SEQ ID NO: 14255 - DNA, 2074 bp, Oryza sativa
  ref <308>: DATABASE ACCESSION NUMBER: AK064867
  ref <309>: DATABASE ENTRY DATE: 2001-12-06
gcggctagactttcgtcgatatccccgataaaatccacccgtctcccctcctccccactcgccttcgcctccatcctcctcctcctcctgccggcttgcatccgctcttccttcctccaggaggaaggcatacaggcatggcgctctcctgcatgaggtgctccccggccgccggcgccgtacgacgaggattggcatcggcggctccgccggcggcgctctccttcgccagatgcggcctccgtagagcggccgcgctcgggtggcgcgtcgccgccgtcaccactacgggagtgcagggtgccaaggatgctggtctggagaaggctgccagaagtgcttcccaatcaaaggtggaaaatggctcaccttcagaaatcattttagatgattttgaagacttgagccctctatcagaaaatgatgactccactgttagtatcactgtagtcggagcatctggtgaccttgccaagaagaagatatttcctgcactttttgctctatactatgaagattgtcttccaaagcatttcactatcttcggatatgcacgcagcaagatgacagatgctgaattgagaaacatggtcagcaaaacactgacatgcagaatagataaaagggaaaactgtaatgagaagatggaagagtttttaaagagatgcttctatcattcaggccaatatgattcagaggagcatttcatggaccttgacaagaagctgaaacaacatgagggttccagagtttctaaccgtcttttctacttgtcaataccaccaaatatattccttgatgttgtaaaatgtgcaagcaaatcagcatcatctgggaatggttggacaagggtaattgttgagaaaccttttggtcgtgactcagattcatcttctgcattaacaaggggtctgaagcagtacctggtagaggaccaaatcttcaggattgaccactacttgggaaaggaactagtggagaacctgtctgtccttcgcttctcaaatcttgtttttgaacctctatggtcaaggcagtatataaggaatgtgcagctgatattctcagaggatttcggcactgaaggacgaggagggtactttgataggtatggtattatccgtgacataatgcagaatcatcttcttcagatactagccctatttgcaatggaaactcctgttagcttggaggcagaggacataagaaacgaaaaggttaaagttctgcgttccatgaagcccctgcaactggaagatgtggtgataggacagtacaaaagtcatacaaagggtggtaccacataccctggatacactgaagataagacggtgcccaaggatagtgtaaccccaacatttgctgcagctgcacttttcataaataatgctagatgggatggagttccttttcttatgaaagctgggaaggctttacatacaaagggggctgagattagagtacagttccgacatgttcctggtaatctttataagaggagttttgggactgatcttgatacagccactaatgaacttgtcatacgtgtgcaacctgatgaagctatctacttgaagattaacaacaaaattcctggtcttggtatgagactagatagaagtaatttgaatcttcactatgcagcaaggtactccaaggagataccagatgcttatgagaggctcttacttgatgccattgaaggagagcgaaggctttttatccgttctgatgagttggatgccgcatgggagctcttcactcccttactcaaggagctggaagagaagcggatagcccctgagctatacccttatggaagccgcggtcctgtaggggctcactaccttgcagcaaagtacaacgtcagatggggtgatttgaccacagaacagaaggcatgagacagatgatatctattttcgctccttttttttcttttgccattgcatttctgtaagattgcatgctcagttagtgggacagatggaaaataaggcaatcagttagcttaggttgcaaggcctgtaaccattagactataaatagctttgtggtatattcactattgggt

SEQ ID NO: 14256 - DNA, 2901 bp, Oryza sativa
  ref <308>: DATABASE ACCESSION NUMBER: AK064868
  ref <309>: DATABASE ENTRY DATE: 2001-12-06
gctcgttgcctcccctccctgcctacccccatctccacctccgcctccacgcgtcgccgccgccgccgccgccgccgccgccgccgtccgggcagtcgaccgctgcggcgccgtcggagctccccgggccccgtggatgagagcggcgcggataaggtcgccgcgggcccgcttcgtctgcacccgtctcggccccgggaccccactgggctggatctaggtttggcgaggggggttctggaagcctccgccgcgatggaggcggaggatgccgccggcggcggcggcgacggaggccggtacttcaaggccgacctcaccggcgccggcgtcgtccagctcagcgagcgcgtgcgggagaagctgcgggagttcgtggacgactacaccaacaacaccctcgtggagtacgtcattttgttgctcgaaggtggaaagcgcaaagatgaggccatcaaggagcttgatgtatttctgggaaaggatagtcgcgcctttatttcctggttgtgggatcatttatctgtaaatttgcacctttatgtgcaaacacaagaacaactgcaggtggataataaggatgacgaagccccaaatgaactacctggagaacagaaatcgtcagagttgcagttgagaagcaaagatcaaactcatcctgagtgtgtaagtgaacccagtacaaccagaagtcggactaaaagggattggaaaggaattggtcgggagggtaatgaaaactttccacttagaagtgtactgaaggatattttgcatggtgaggagaaaaggtcgcaaaaggttaatgaaatacgacatcccccatcgtctaatcaacggaatggcagaaagcgtgacagggatgacgaaccgcaacaaataaagagagacttgcctttgcgccgtgacgttggtgcctcctgccgtcttctaaagtttgctgttcgagatgctgtgaaagctgtacagcaaaccagcagctctacggaaccatcttctaagcgcctacgttctgtggtttccacatcatctgcagacagcctgcatggtaaaagaatagaaacatctacagagggccacctgtatgacaaaaagccagaaagaactaggcaaattcttcaagtacctggagctgctttagctctcagagctgccgcagaggctgctgcagattctaccaaagttagatctactggaagcgtgtttagtcgattaggccaagggaatgctgtgaatcagacaccccgttctcgtgaacagcagagagattacgaagatttcaaaccagctacaactgcagatgatcatgattctgatcgatacgataatgatgatgagatatccggagacataacattagaagatggggaagctgaaatgaatgttgattctacatctgatgatgatgttagcagagatgatggaatcactagatatggaagttccgattcacaagtagctgcttacccttcagttgtggagaagaaagatgttttcgtgaaatgcagtgttgaaccagagaccagtacaatgaggcattcaaacttgattaaggaggagcaaccaggttctttgtcagtaataagtatgagcaaaactgtggttgtcccagttaatgccaacaatctggaaccttccaattatgagacaccaaaagatgttcatgttgtagagaaaacggacattacacccatgaatgctactgttacctctctgactagtaatatcaaagaactagctcatggagaagtccaaaaggattcacagcgatctgcaattgcatcatctgttacgagttcatatagcactgcacacccaactgaggacgcagactctagaaccctctatgttagcaatgttcattttggtgccaccaaggacgcgctatctcgcccatttcaacaagtttggtgcggtgctcaaagtagttattgttactaatgcagcaacagggcagccaacaggatctgcttacgtagaatttttacataaagaatcagctgaacgtgctctttcattgaatggaacatcattcatggcacgcatcctcaaggttgtcaggcgaagttctcatgaagctgcacatttttatggttggcctggtggtgggcgaacatcaatgtatgccaggcatggtagaatggcatacccaaggggtggcctccctggtagcaccttcagagggcgtgctccaatgatagctggtgctagaagtttacaatggaaacgggagccttcagttactgattcaaatacaggtgcaaccgtggcactgccttctgctgaacaggtgcttcctcctgccacataggggagatgaattatagtttatatgatgagaaccaaattggtgcctagcccatcatacagcatattagaatcagcataataagcttggaagatggtttatggaaaaaaatgctgctttgtaaaaaaggctaaaagcaggaaaatacaaaaaaagagaagaaaataagaaaagaggaaggagtttggagccagaatttgataaaccaccatgctgatacttggaggtggttgtattggagatcaatgaactgtcgtcacattgagcaaacagttttcttcagtcatctgaaaggacttgctgagatttgaaataacttccatggatgaggatcaattgtcaaatagagcatttgagggctagtttttggacatggcatttagtcggtagtctgggctcttcatcattgtaagctccgactgtacagcagtctatctatttgtactcttcttagaaccagtccctttcccaacaaaaaaaacagaaaaaaagaaaaggaaaaacatctctctttgtttcttttttgtttttttattgaacatagtactgttttatacttttattccttaatgtattgatataattttttagtt

SEQ ID NO: 14257 - DNA, 1593 bp, Oryza sativa
  ref <308>: DATABASE ACCESSION NUMBER: AK064869
  ref <309>: DATABASE ENTRY DATE: 2001-12-06
gcccttcgcttttctctatttctctctctctctccatccgcgagaactcgtcgggatatttatgagcgctggtggagttgcgtggcgaggtgaggaggtggctgatctctctcatcaatctcctccgtcgcggtcgcagctgcgggagtgaagccgccccgcggagctagctaaaccctagccactgcccgggcggagagttggggtttgggttggtggcggtgggccggtggcggctcggtggcggagctccggtgtggggtggtgtggaatggaatggaagttattcgatgatttcccaggattttgactaggccacagatggttacaagttgcattcatggtcaaaattgtgtctgaacatagagattctttggagttcatagacgaagtgatttgttttgttcaatacttccacacttataatgggtgctgtctgctcaaggaagagaagccaattagtgcacgaggatgactctttccagacatcttccaggttctcaaagaccagcagcttgaaatggctgctgcttacactgccacgcagcaattccgatgtctcccgcaagggccagggaaagggccctggtcgttgcccatctctaatggagctttgtgtggccaaagcctgcgaggatattaacaagtattctagtttttctgtattgccgagggatctcagccagcagatttttaatgaattggtagcgtcgaaccgtctcacggagacattgcttgaaacttttcgggattgtgcactacaggacattgatttgggggagtatcctggagtgaatgatgcttggatggaagtagtggcttctcaaaggcattcattgttatcagttgacatttcttgctctgaaataactgatagtgggttatatcttcttagagattgtccaaacatgcaaagcttggcatgtaattactgtgatatgatctcagagcatggcctaggaatcttgtcaggtctttcaaacctgacatctctcagtttcaagagcagcgatggtattactgctgaagcaatggaagcatttgctaatttagttaatttggtaaatcttgatctcgaacgatgcctaaagattcatggtggccttgttcacttaaaaggcctcaggaatctggagtcactcaatatgagatattgtaacaacattgcagattcagatatcaaatacttatcagatctcacaaatttgaaagaattgcaattggcttgttgtagaatcactgatctgggtgtttcttatcttagaggcttgtccaagctaacacagttgaatttggagggctgtccagtgactgctgcctgtttggaagctatatcaggattggcttctctggtggtgttgaatttgagtcggtgtggcatatacggtgaaggctgtgaaaactttcaaggtcttaaaaaattgaaggttttaaacttggggttcaataatatcacagatgattgtttagcacatctgaaagagttgatcaatttggaatctctaaacttggactcatgcaaggttggagatgaaggcttattacatctgagaggccttatgcttttgaaaagtttggagctatctgacaccg

SEQ ID NO: 14258 - DNA, 2709 bp, Oryza sativa
  ref <308>: DATABASE ACCESSION NUMBER: AK064870
  ref <309>: DATABASE ENTRY DATE: 2001-12-06
gactcttctccctctccatctcttccctatctcccgctgccggagccaccgccgcgcgcctcgcctcgcctcgcctccacgcgctcgcggcggccggcgagcacgcccccgcccccgcccggagcgcgcgcggcgtggaaacggtgctcctctccttctccggtcccgccctaggcagcctcctcctcctccccctccgccgacgaaagcaggttcgcgagaggcggcgtgcggcgtggcggccgcggagctgaactcgaaggtgattgtgtggcgagatgggaagagcaggttacatgatagagaaggatggagggtaggaagattgagagggggagattgaggggcttcgtccggcggatggcaatggagtgcctgtgctccggggagcagctgagggcggcagatgagatcatccggtcaccggaatctgcaatcaccaaagattgctcggccagcgggtactcgtcccagaacggagagatggagcagtaccttgataatggcaacattgaggaggccgagttgtcgctccgggagggtgtttgccttaactatgaggaagcaagggcattactaggaaggctagagtaccagcgtgggcatgtagaagcagcacttcgtgtatttgatgggattgatatacctgctttagtccctaagatgaaaatctcaattgctagaaaagtggatcgtcggaagactcgttcacaatgggattctccaccaatgcccttgcatgctgtcagcctactcatggaggccatataccttaaatcaagagctcttcatgatcttggaaagttcaaagaagctgcacaagaatgcagaatgatattggatatcgtggaagcagcagtgcctgagggtttaccagcaggctttggaaaagattgtaaattaaacgaaataatatgcaaggctgtagagttgctccctgaactatggaaactagggggattttcacttgaagccatatcttcatataggaggtctcttctcaataattggaaccttgatggagagaccatagctcgcatacaaaaagaatttgccatttttctcctatatagtggctgtgaagcacgacctccaaatcttcattcacagttggatggttcatttgtacctcgcaataatatggaagaggctattcttcttctaatgattctattaaggaagttcaatctcaagagggttgagcgggatcctactataatgcatcaccttacatttgctctgtccatctcagggcagctaaagtcactagctgtacaatttgaagaattgttacctggcatgctggataaaagagagtggtcatacaatgttgcgttgtgttaccttgcagaagaagatgattcgacagccctgaatcttctcaaaaggatattaaaatctggagatgattctgacaatttcaaagaactcctcttagcttcaaaggcttgcactgaaaggagtgcccaaactgaaggtgcttcctacgcacagagagcaatagccaatatgcagggaggatgtgaacaaatggcgggtgttgcagacctgctgcttggagttaacctttctaatcaagctagatgtgccacatctgatacagagagagcttcttggcagtgtgaagctctggaggtgcttgaaaatgctgaaaataagatgcatgggaaagatcctcgtgcaatgtacagtctcagccttgaaaatgctgaccagagaaaattagatgctgctgccttttatgccaagaaattggtgaaattagaggctggatcggaattgaggagttggcttcttttagctcgaatactatctgctcagaaacagtttgctgatgctgaaaccattattgatgctgctctcgatcagactgggaaatggagtcaaggagatttattgcgaaccaaagccagaattcaggctgcacagggccaactcaggaacgctgttgagacatacaccaaacttctcgctgtcattcaactcagaaccaaaagtctcagtgctgggatctttttggcaaagggcactaaggatgatataagcctggaaatagagacctggtatgatctagctctgttgtacctacgcatgtcacaatggagggatgcagaggtctgtgtatccaagataaggaccatcagtccatattctgccttggcttggcatgttaaaggaaaactctatgaagcaaaaggtcaaccaaaagaagccttgggatcctatttcagagcattagaccttgaccgtaaacatgttccaagtttgatatcaactgcctctgttcttcgagaaattggcaacaggccattgccttcggtccggtgctttctgaccgatgcgttgcaactggatcgaacaaatcatgcggcttggtttaatcttgggctactctacaaagaggaaggtggtcggtcagcagcagaagctgcagaatgtttccaggcggctgctcttcttgaagaaacagcacctgtagaacctttcaggtgacacttgtatgtacaggtgctatagaaactgtaagctattgtttgtcttttgaaatgtttcatttacactgatgaaaaggtagattgcagaactccagtcatgacctttgggagattatagtgtcagaaattgttggagaaaaacttggttaacagtcaatatatatagcctcagttcattttttatgtagatttctgaaaaatgatattcctctcg

SEQ ID NO: 14259 - DNA, 632 bp, Oryza sativa
  ref <308>: DATABASE ACCESSION NUMBER: AK064871
  ref <309>: DATABASE ENTRY DATE: 2001-12-06
gtttgcctagctaattcgcgtcattcatctcctcctccttatattaggcgcgcaccgcacgcgtgctcatcccgatcgccatggccgtcgacgcgcaccacctgcaccgcctcccaccaccgatccagcctgctgaatccatgttctcgccgaggcagccttgtttcggcgccgccgccggcgaggttgtcgtcggcggcgccggtggcgcggtgatggcggggctttgccaggaggagcagctggtgcaggggtaccgccaggtgtttgttggaggtggtggggtgaggcagccggcggcggcggaggtgatgaggcagtactcgcaggtgtgcgcggcggcggcggacgcggcgtgcccggcgtgcgggtgcgccaagaatggcagcgtcagcgtcaacttttcgtgagcgatggcggagggaaaggagtaatagcaattagactagattttttttcttttcttttcttttttttctctctctcctccgttttttttcttttctgttttggtttagctgatggggataatagggcgatatggtctaatgatgtggatatgaggggatgagttttccttttttgtgttggatcaatttgatcaacaaggaaaaaaaacataggaatttggc

SEQ ID NO: 14260 - DNA, 2011 bp, Oryza sativa
  ref <308>: DATABASE ACCESSION NUMBER: AK064872
  ref <309>: DATABASE ENTRY DATE: 2001-12-06
gatagattattccgtccgttccaacaacctctccgcctcctcgtccccgtcctcaacctcaccgcctccccgccgcagtagcagagtcgcccgccgccgcgcatccgcatggcagctgctcaaggtagcagcgttgtcccatcctctgcgaaagttgactttttaaagctccagaatggcagtgatattcgtggtgttgctgttggtggggtcgaaggcgagcccgtaaatctcactgagcctgttactgaagcaatagcttctgcatttgctgcatggttattaaacaagaagaaagcggatggatggagacgtttaagaatttctgttggacatgattctcgaatttctgcacataaattgcaggatgcagttactcttggaattaccactgcagggcatgatgttttacaatttggattggcttcaacaccagcaatgttcaacagtacacttacagaagatgagataaatcattgcccagttgatggagccataatgataacagcaagtcatcttccatacaaccggaatggtctcaaattttttacaagtgccggtggtttgaataaggctgatatcaaagatatcttggagcgcgcttctagaatatatgaggactcttctcatggtagcacacaagaattagagcaagcttcgaagggagaagtgagtaatgtcgattacatgtcaatttatgcatccgatcttgtgaaagcagttcgtaaatctgctggaaacaaagaaaaaccactggagggactgcacatagtcgtggatgcagggaatggagcaggtggcttttttgtggataaggtactcaagccgttaggcgctattactactgggagccaattcctagagcctgatggcatgtttccaaatcacattccaaatcctgaggacaaaactgcaatgaaagccattacacaagctgtggccgataacaaggcagacttgggcatcatatttgatactgatgttgacaggtctgctgctgttgattcaagtggtcgtgagttaaaccgtaacagattgattgctttgatgtctgccatagttcttgaagagcacccaggcactacaattgtgacagatagcgtgacttctgatgggctgactacatttattgaaaataaacttggagggaagcatcatcgtttcaagcgagggtacaagaatgtaatagatgaggctattcgtctgaatactattggtgaggagtcacatttagctatggaaacaagtggccatggagcactgaaagagaatcactggctcgatgatggtgcatatcttatggttaaacttttgaataagcttgctgcagctagaatattgaatccaaacgttggtagtaaagttttgactgatttggtcgagggccttgaggaggcttctgtgacagtggagataagattgaagattgatcagaatcatgcagatttgaaaggggggtccttccgtgattacggagaagctgtcttgaaacatttggagaatgcaatcagtaaagatgaatatctgtgcaaagcaccgaagaactatgaaggcgtaagagtttcaggatatggtggctggttcttattgcggttatccctccatgacccagttcttccccttaacatcgaggcgccgagcaaggatgatgccattaagcttgggcttgcagtgcttactgccgtaagtgaatttccagcattggacataacggcattgaacaagtttttgcagcagtgatggaagtattgcggcggcgacgataatctgcagccatcacatgcctttgttgagctgggatgagagaaacgcaccacagtactatacatagacgtacttgcattcaggcttacacataatattacatggttttgacttttcggctttacttggtctttgtttggtatggaaatgtcaaacaaggaagactaattttcgtgttttaaagaaaatatacaaagtagttgtcaggaatcttatataccatcgtcaatgtgttttcggattgctt

SEQ ID NO: 14261 - DNA, 1738 bp, Oryza sativa
  ref <308>: DATABASE ACCESSION NUMBER: AK064873
  ref <309>: DATABASE ENTRY DATE: 2001-12-06
tggaatccgacgcacccacacccatccactccagagctccccgcggcacttggcaccaccaccaccaccaccggcatccggcggcgcgggcggtgatggcgaccatcaccacgcagctccggtcggccctcctctcgccggcggcctcgccgagccgccgtgccaggcgcgccccgtcgtccgtgcggtgcgactcctcggcagcgtcgtccctgtccgcctccgcgtcgctcgacgccgacttcgacaagaagcagttccgccacaacctcacccgcagcgacaactacaaccgcaagggcttcggccacaagaaggagacgctcgagctcatgagccaggagtacaccagcgacgtgatcaagacgctcaaggagaacgggaaccagcacacgtggggccccgtgacggtgaagctggcggaggcgtacggcttctgctggggcgtcgagcgcgccgtgcagatcgcctacgaggcgcgcaagcagttccccgacgatcgcatctggctcaccaacgagatcatccacaaccccaccgtcaacaagcgattggaggacatgggcgtccaaaacattcctgttgatgcaggtattaaggatttcgatgttgtcgagcaaggggatgttgtcgtattgcctgcatttggagcggccgtggaggagatgtacacgctgaatgagaagaaggtgcagatagtcgatacaacgtgcccttgggtttcaaaggtgtggaacatggttgaaaagcacaagaagggtgactacacttctattattcatggaaaatactcccatgaagaaactgttgccactgcttcctttgcagggacatacatcattgttaagaacatagcagaggctagctatgtatgtgattatatacttggtggccaacttgatggttctagctccacaaaagaggagttccttgagaaattcaaaaatgctgtttctccaggatttgatcctgatgttgacttagtgaaagttggcattgccaatcaaacaacaatgcttaaaggagaaactgaagaaattgggaagcttgttgagaagacaatgatgcgtaggtttggagttgagaatgtcaatgaccacttcattgccttcaacactatctgtgatgccacacaggaaagacaagatgcaatgtaccagctagtgaaggagaaagttgatcttattctggttgttggaggatggaactccagtaacacctctcatttgcaagaaattggagaactcagtggaattccgtcttactggattgacagtgaacaaaggattggacctggaaacaagatcagctacaagttaaatcatggcgagcttgtcgagaaagagaactggttaccagaaggccctatcacaatcggagttacttctggcgcctcaactccggacaaggttgttgaggatgcgttacagaaggtgtttgagatcaagcgccaggaagttttgcaggccgcgtaaattttcatcaggtttggtcacggtagctgatggcttggtgaaggttaatagaaccagtgcacaagcgatgtctgtacagtagtgaagaatgctacgcttttaggagcgcatactacggcatgtgctgagatttacgtagtatgttgggggcaaatgttgtaatcaattatcacacgaagaacagttgctgtatcggctgtcataactttctgaccccctcaaataacgttgcagaagtatctttcttcggtataaatatcacc

SEQ ID NO: 14262 - DNA, 1797 bp, Oryza sativa
  ref <308>: DATABASE ACCESSION NUMBER: AK064874
  ref <309>: DATABASE ENTRY DATE: 2001-12-06
gggtctccactgcgccacgctgctgccgaccacccgcaccatcgatggccaggcgcggccgccgctcccttgcttcgcccgccgttgccatcgcccttttcgtcttcctcgcctacggcggcggcggcggcggcggcggagtatgcgaggccgcgccggcgagcgcggtcgtgaagagcgtcccgggattcgacggcgccctcccgtcgaagcactacgccgggtacgtgacggtggaggagcagcacgggcggaacctgttctactacctggtggagtcggagcgcgacccggcgaaggaccccctcgtgctctggctcaacggcggccccggctgctccagcttcgacggcttcgtctacgagcacggaccattcaatttcgagtcaggagggtcagccaagagcctaccgaagcttcatctcaatccctatagctggtccaaggtatccagtgtgatctacttggattcccctgctggtgtggggctgtcatactccaagaatacttcggattataacaccggggacctcaagaccgccgcggattcgcatacttttcttctgaagtggtttcagctgtaccctgagttcctgagcaatccattttacatagctggggagtcgtatgctggggtttatgttcctactctttcgcatgaagttgtcaaaggattacatgatggagtgaagcctacaataaacttcaagggctacatggtcggaaatggtgtttgcgacactgtttttgatggtaatgctcttgtgccatttgctcatggaatggctctaatttcagacggtatataccaggaagctcagactgcatgccacggaaactactggaatactaccactgataaatgtgaaaatgcactctacaaagtcgatacgtcaattaatgacctaaatatttatgacattcttgagccatgctaccacagcaaaactatcaagaaagtgaccccagcaaataccaaattgcccaaaagtttccaacatcttggtacaactaccaagccccttgctgtaagaacaagaatgcatgggcgtgcttggcctctgagagctcctgtgagagcggggcgtgtgccatcctggcaggagtttgccagaggatctcgccccagtggagttccttgtatgagtgatgaagttgcaacagcatggctgaacaacgatgacgtcagagcagcaattcatgcccaaccagtaagctcaattggctcgtggcttatatgcaccaacgtgttggatttcatccatgatgctggaagtatgatcagttatcacaagaacctcacaggccagggttatcgtgctttcatatacagtggtgatcatgatatgtgtgtaccttataccgggactgaagcatggaccagatctttgggctacggagttattgattcatggagaccgtggcacctgaatggccaagtttctgggtacacccaaggatatgaacatggcctcacctttgctaccattaagggtgctgggcacactgttcctgaatacaaaccacaagaatcattggctttctatagccgctggcttgctggttctaaattgtaaatgcttgtgaatccgacatccaataatgggaagcatacatatccatacagccatgaatcagataaaggttgatacaaagataatataaaaaaactacaaaccaatttagaaagccacatttatttcagaatagttggtgccaacaccatgttgtatgttcttttatgcaaacagtagatcattcatcattatttgtggaagcttactgtgctgtaacatc

SEQ ID NO: 14263 - DNA, 1248 bp, Oryza sativa
  ref <308>: DATABASE ACCESSION NUMBER: AK064875
  ref <309>: DATABASE ENTRY DATE: 2001-12-06
gggagccaagccctaggctcctcctctcctcccaatccccaatccctgttcggcttctccttcctcccctccgcggccgatcgcgatggaaccctgagctacgtggttggtgcttcaccgctggagtagagttctactatagtagggtttgggggcggcggtctcggaggagggaggaagcctttggccatggcgagcgacgtgcccatgagcccggagctcgagcagatcgacggcgaggtccaggacatcttccgcgccctccaaaatggatttcaaaagatggacaagattaaagattcaagtaggcaagctaaacagctggaggatctcacagcaaaaatgaaggagtgcaagcgtttgatcaaagagtttgatcgtatattgaaagatgaggagtcaaacaaccctcctgaggtccacaagcagctaaatgacagaaagcaatatatgatcaaagagttgaattcctatgtcaccttgaggaagacatatcaaagtagcctaggtaataataataagagggttgagctctttgatatgggcgctggaagtagtgaacctgctgccgaggacaacatccaaatagcatcagctatgacaaaccaacaactgatggatgctggaagagaacaaatgactcagactgatcaagctattgaccgttcaaaaatggttgtggcacaaactattgaaactggaacacaaactgcttcagcgctatcacagcaaacagaacaaatgaagagaattggcaatgagctggatactgttcacttttcgttaaagaaggctagccagctggtgaaagagattggccgtcaggttgcaactgacaaatgcattatggcattgctttttctgattgtttgtggtgtgattgcaattattgttgttaagattgtcaacccacataacaagaacatccgcgacatcccaggacttgctccgcctgctcaaaatttccagattagtaacaggagactgctgtcggtagaaattatcagaggtctatgatgactgtgcttgcaagttccatgcaggcggagttcagttcgtttcttcagagtagcttaattgcggtcataagatactacgacatgctgtaaaattcttagtgcctgtatattttattccctggtgtattagatatgaagtcagtagattcccgcgtctgatgcttgtatactccccggccttttggttgtgtgcataaatgcattatagagatgagatcttttaccagtc

SEQ ID NO: 14264 - DNA, 1256 bp, Oryza sativa
  ref <308>: DATABASE ACCESSION NUMBER: AK064876
  ref <309>: DATABASE ENTRY DATE: 2001-12-06
gtcgcccgcatcgcactcgcagcagcagcgcctccttccttatctctctctctccccccttcctgcatccatggcggcgatggcggcggcctccctcctgtgcgcgagggcggcggcggcggcgcccacgctgcgcctacgcggcggaggcaggggagcacgcctcgtcttctcctgctccgcctcctcgtcgtcgccgtccggggaaggagggttcagtgggaaggtggggttcctcggcctcgggatcatgggcgcacccatggcctccaacctcatcaacgccgggtgcgatgtcacggtgtggaacaggaccaggagcaagtgcgacccgctcctcagcctcggcgccaagtacgagccttcaccggccgatgttgcttcgtcttgcgatgtgaccttcgcgatgcttgctgatccggagagcgcggttgaggttgcatgcggggccaatggagctgcacaggggatggccccagggaaagggtatgtggatgtgtcgacggttgacgctgctacatccaagctgattggcaagcacattacaagtactggggcatctttccttgaggctccagtttcaggctcaaaaaagccagcagaagatgggctgctcatctttcttaccgcaggtgatgagtccttgtacaatagagtggcatccctccttgatgttatgggcaagtcaagatttttcctcggtgacgttggcaaaggtgcagacatgaagctcgttgttaatatggtcatggggagcatgatggtttcgttttcagaaggactgctcctgagcgaaaaagttggcctagaccccaatactcttgtcgaggttatttcacaaggtgctatcagtgctcccatgttctccctcaagggcccttccatggttaaagctgcataccctactgcttttcctctgaagcatcagcagaaggatttgaggctcgcattggccctggcagaatcggtgtcccagtctattcctacagtcgcagctgcaaacgagctgtacaaggtcgcgaaatcgcttgggcttgcagaccaggacttctctgctgtaatcgaggcgctgaaggcaaaggagcagagcaagtgaaaactgccattgatgcataggaaacaaaatgtttgttcagctgccattgatgcagcattgtctatcaatgaactgaaaccatggcaattctcccaattttgttacagaagtaatacttgtttttcaggaataaaaaactgattgatgacagaatacctgc

SEQ ID NO: 14265 - DNA, 2410 bp, Oryza sativa
  ref <308>: DATABASE ACCESSION NUMBER: AK064877
  ref <309>: DATABASE ENTRY DATE: 2001-12-06
gactccagtaatcgccattgccgccgcggctcagtgcgccgcgcattcgctcgcgcttgctcttctgcctcctccttcctccccgcgtgagatgcaatcacgcaattctataaatatataaacgagcttctcctcctcatgagctctcgtagtatataggagtagcctttgtggagagatacagagagaggcagaggagcacaagccgtcactcacctcacctgccttcttcttcatcatcatcttcttcttcttcctcccgcttcgccgattcaggttctccttcgctgcagatgagaagcggcgcctcggcggcggcggcggcggtgtgattctcctctccagagagagaaagaagagagagagagagagagagagagagagagagagagagaggagaggagaagaagcgtgaccaccgatgggatcgctggagacgcggtaccggccggccggagcgccgtctgatgacacaactaagaggaggacccccaaaagtaggatttacaaagatgtcgaaaattttggagttcttgtccttgaaaagaactctggttgcaagttcaaaactttgagatatttgctcctagctatcacttctgcgacgttccttaccctcctaactccaaccttttacgagcatcagttacaaagttctcggtatgtggatgttggttggatatgggacaaaccaagttatgacccacgatatgtatcatctgttgatgttcagtgggaggatgtatataaggcactggaaaatctcaatgatggtagccaaaagctcaaagttggactcttgaattttaacagcactgagtatggatcttgggcacagttgctcccaggaagtgctgtttccattgtaagacttgagcatgccaaagacagtattacttgggacaccctgtatcctgaatggattgatgaggaggaagaaactgatataccggcttgtccatcacttccagatcctaatgttcgaaaaggctcacactttgatgttattgctgtgaaacttccctgcacccgggtgggcggttggtcaagagatgttgcacgactccatttgcagctctcagcagcaaaactggctgtagcctcttcgaaaggcaaccagaaggtccatgtgctatttgttactgactgcttccctattcctaatctcttcccgtgcaagaaccttgtgaaacatgaaggcaatgcttggttgtatagccctgacttaaaggctttaagagaaaagctcaggcttccagttggatcctgcgagcttgctgttccgctcaaagcaaaagactctactcagtggatcgaagaagagaagcatatgctactatcctgcactcagcaagtgaatatgtctgtggtgctatctcagcagctcaaagcattcgccaagcagggtcaactagggatctggttatccttgtcgatgacacgataagtgatcaccaccgaaaaggattggaggctgcaggctggaaggtgagggttatccaaagaatcaggaatccaaaagctgagcgcgatgcttacaatgagtggaactacagcaagttcaggttgtggcagctgaccgactatgacaagatcatattcatagatgctgatctccttatcctgaggaacgtcgacttcctgttcgcgatgccagagatcaccgcaactggcaacaatgcgacactcttcaactccggtgtgatggtcatcgagccgtcaaactgcacattccagctactgatggatcacatcaatgagataacatcgtacaacggcggtgaccaaggatatctgaatgagatattcacatggtggcaccgcatccccaagcacatgaacttcttgaagcatttctgggagggggacgacgattctgcaaaggcgaagaagactgagctgtttggcgcagacccgcctatcctctatgtcctccactacctgggcatgaagccatggctgtgcttcagagactatgactgcaactggaacatccccctgatgcgcgaattcgcaagcgatgtcgcgcacgcccggtggtggaaggtgcatgacaatatgcccgagaagcttcagtcctattgcttgctgagatcaaagctgaaggctgggctggaatgggaacggaggcaggctgagaaggcaaacctggaagatggacattggcggcgaaatatcaccgatccaagactgactatctgctacgagaagttctgctactgggagagcatgctgctgcattggggtgagaagaacccaacgaacaacaaccctgtgccagcgacaatatcaagctcatgatctgtagatagctcgagatattattagtacacaaaaatccatcctatatagcactatacatgcatagaaacagcttgtgtaggttgccatgcttaggcctttccaacac

SEQ ID NO: 14266 - DNA, 2762 bp, Oryza sativa
  ref <308>: DATABASE ACCESSION NUMBER: AK064878
  ref <309>: DATABASE ENTRY DATE: 2001-12-06
ggctcttttccccgcggccatccccgtcgccccaccgccgccgcaggagcccgccgagacgatctcctccgccgagcagcgccgatctcccctcccgcgagcagcggcggccggcgacctgctgcttctgccgaattctctccgatttgcaggccaaaggcctgatacaattaccaaacagaggctgttttgaagacactatagttaggggcttagagtaacctggttacagataatgtctgagttcctggatctcgagctgcaggatgggataaggatgccttggaatgttataccaggaactaagcaggatgctgcaaactgtgttgttcccgtttccgccatatatactcctctcagaccaaatcctgccattcctgttcttccttacggcccccttcgttgccgcatgtgccgttctattctcaaccctttctgcgttgttgactatgttgccaagatttgggtttgtccgttctgctttcagcgcaaccacttcccccagcactactcctctatttcagaaagcaatctccctgcagaactgtttcctcaatatactacagttgagttcatgtccactgccgaaactggtcctgtagtaccaccagtcttcctctttgttgttgatacttgcatgattgaggaggaaattgattatttgaagtctgctctagcgcaagcgattgagctcttgccagaccaatctcttgttggattcattacatttgggacatacgtgcaggtgcatgaattgggttttggtttgttgccgaaatcatatgtcttcaaggggacgaaggaggttacaaaggatcaaattcttgaacaaatgtgcttctttgcagggaaaacaaaacctacaacaggtgttatcgcgggctcaagggatggcctttcagcagagagcatttctaggttcctgttgcctgcttctgagtgcgagtttgtgttgaattccaattatagaagaactgcagaaggatccttggccagtttcagctgatcagcgtgcatcaagatgtactggaactgcattaagtgttgcagccagtctattgggggtctgtgtcccaggatcaggtgctagaattatggcattcatagggggtccatctacagaggggcctggttctatcgtatccaagtccttgtcagaaccaattcgttcacataaagaccttgataaaggttctgctccactttataccaaagctgttaaattctatgaggagatctcaaagcagcttgtacatcaaggccatgtgcttgatttttttgcatgtgcacttgaccaggttggtgttgctgagatgaaggttgcagtggagaggactgggggaatagttgtgcttgcagaaagttttggccattctgtttttaaagagtcactccaacgcatttttcagtccagcgacaatgatcttggcttatcattcaatggtatatttgaaattaactgctcaaaggatgtcaaaattcaaggcattattggaccttgtacttccctggagaagaaaagtcctctatcctcagatacagttgtaggccagggaagcactagcgcctggaagatgtgtggtctagacaggaaaacatcaatatgtttagtgtttgatattgcaaaaaaagatgggcccgatgcaattagtcaatcaacaagcaatcagttctacttccaattcttaacatattatcagcatcatgagggtcagatgagattacgagctactacactttccagaagatgggttgctggttctggtggtgtgcaggatctaatagatggttttgatcaagaggcagctgctgcagtcatggcacgcttggtctcatttaagatggaagctgaggctgattttgacccaataagatggcttgatcgagcattaattagtatgtgctcaaaatttggagactatcagaaggaaacaccctcatctttcagtttatctccacgtctatcaatatttccacaatttatgtttaatttaaggcgttctcagtttgttcaggtgtttaataatagtccagatgaaactgcatattttaggatgatgttaaacagagagaatgtagcgaatgcagttgtgatgatccagccttcacttatatcatattcatttcaatcaggcccagagcctgttctgttggatgtaactgcaattgctgctgacaggatccttttgttggattcttattttactatcgtcatattccatgggataaccattgcgcagtggcgaaaggctggctaccaagatcagcaagggcatgaggcatttgctcagttgttgaaagctccacgtgaggaaactgattcgataatcaaggagcgctttcctgttcctcgtttggtcgtgtgtgatcaatatggttctcaggctcggtttttactagcaaagcttaatccgtctgtcacatataactctgacaatcctccaccacctggaggagatgtcatattcacggatgatgtgagcttcgaagtcttcatggatcacctgcagcggctggcagttcagtagaacacggtcatgaagcaattttgtatgaatcttcaatagtctcgtccagtgtacagcaaagaacgacttctccgtgtaatttatgcaggttaccacattgtagtctcggatatgccattgttggctctacatctgtatatttccatggttataggctgcaaggattctgcctccactataaattcaagaaggaacattcatgattgtgtaaaatacgtttcatatctttctcct

SEQ ID NO: 14267 - DNA, 681 bp, Oryza sativa
  ref <308>: DATABASE ACCESSION NUMBER: AK064879
  ref <309>: DATABASE ENTRY DATE: 2001-12-06
gcatcgacgccggcggcgcaagaggcgagcagcgcggggggccggcggcgccagcggtgagcaggcaagcagcggagcacgggtgacggcgcgtccgcgagcaagagcagccgagcaggttgcagacaggcggccggccgccggcgacgccacgggagcgcgcgtgaccaggatctgctcctgaccaggcagagcgataggccagcagcaggccggcggctacaaaacatctaaacaaaggaatcaatctgaattaagaagattagcgtgatgtctttcctcaggctgttacctcaaaggttgccgcaactttttagatggagcaagatgttgagacagtgataaacgttctacagccaggaccgatagggattgtggagcacaaattcactgatgcagagatccgcaatgcccaagctgtagtaaggcgagcagtcgagaattggcagaagagctcgacccttgagagaaatcttggtattggttctttcgccaaatagaactaatgccaccaacacatgacttggtggatcagccgtaccgagtataaacgggttgttaacttgttacgacatcgctttcaaaacgttgatatattttcttcctgaacgaatccatgcaatcagatgcattatatgcagtctgttcactctgttgccaataaaagtactttgaactttt

SEQ ID NO: 14268 - DNA, 2040 bp, Oryza sativa
  ref <308>: DATABASE ACCESSION NUMBER: AK098856
  ref <309>: DATABASE ENTRY DATE: 2002-08-28
gatttggacgcccactcgcatcgccgacgaatttctcgctagggtttcgcggatcaaggcggcggcggcggctagggtttcgaggcgggccacatggcctcgccggcggcggagggggacgcggtgagcgcggggttcgcggagctggagcggcagcagcagctgctggcgagctgcacgaggctgtacaagcagctggaggagcacttcgcgtcgctggagcgcgggctggcggcgaggtcggactcgctccgccacaagcgccgcgcggcggaggcgcgggcctcggccgccatggactcgctccgccgccgcgaggcctccatcgatggctccgtctcccgcgcgctcgaccacctcgacgacctcgcctccgcctcgtcggtgccgtccgacgccgccgcggcggcggagggggtggccgagagcctgagggcgatgtgcgccaggatggactccgcggggttcttcgggttcgtggtcgcgcggcggaaggaggtggacgcgctgcgcgccgagatgccgtccgcgctcaagtgctgcgtggatccagccaaattcgtcatggacgcggtcgccgacgtgttccccgtggaccgccgcgaggcgaagaaccccaccgacctggcctgggcgtgcgtgctcatcctggaggcggcggtgccggcgctggccgatcctgacccggagattggggcggcaaggctactggtgccgcgtgcggcgcgcgagcgcgcgcgggggatggcgagggagtggaaggaggcggcggagcgcaagggcggggtggagtggaccaagccgcccgacgcgcacgccttcctgcagcacgtggcgacgttcgccgtggcggagagggaggaccgggggatttaccgcaggattgtggtcagcttctcgtggcgccgacaaatgccccgcctcgcgctcaccctcggccttgaagaagacatggctgatattatcgaggaactaattgctaaggggcagcagcttgatgctgtgaattttgcgtacgaggctggtcttcaggagaagttccccccagttcctctcttgaagtcctacctggcggactcgaagaagacttcatgcaccgtttcagataattcaagcaccagcagtggtcaatctgggagcaatgcaaacaagaaagagcaatccgtgctgagggctgttataaagtgcattgaggatcgcaaactggaagctgagtttccactggaggaccttcagaggcagcttgaagaactggagaaggccaagactgagaagaaaaaggcaacttcaagtgcgtccagcggcggtagcagtggccctgccactaagcgcatccgggcaagcaatggaggcccgatgcctcctgcgaaggcaggtcgtctcactaacaatgcttgtgtgtcttctaccccagctgccaccacctttgtccgctccccctcgcacacatcgtacgccatggcctccccctacccttacgataggccggttggtcatggcctctactgcaaccaaagcccaccggcgatcagggagccatatgtctacccagccaaggaggtaactaattttgcgccaggtttgccgtactcttcccctcccataagctatccccacgcctatggcgggtacaacaatggaatgggagcttacaacaatggaatggcacctgccttccaccaggcttactaccggtaggatcagtcaggaaagtcgctgatgaatgacatgacaaataactgatgatgtcgacgacaactcaatctgcacaatggctcatattttgtagtgactgactacaaacggtaggttgggtatctcatcttatctgtgcttactaagttaccactactactagatgcactctactctgcattgtgttaggttatctcatgcctagatcactactttgtactaccactaagaaacctggatgtaaattatgtacgctaccattgagactgtactgcattatgtaattctgttcagaaacaatgaaaaaaacacccaaaaaaataaactatcatgtaatccttcggc

SEQ ID NO: 14269 - DNA, 1747 bp, Oryza sativa
  ref <308>: DATABASE ACCESSION NUMBER: AK064880
  ref <309>: DATABASE ENTRY DATE: 2001-12-06
ttgaggtggccaaggccaatgccaacgccaacgccaacgccgccgacgccggtgtcaaggtggacgaggggcaggagagggagcgggacgtgacgctcccgagtgtcaaggaaggcggcgccgacgaggcgaggcggcgggaggacgaggaggccgccgagaaggagtcctcggcgaaggccgccgcggcgacggcggcgctgcggaccgtggtgagcgtgccggacacctgcgacctgtaccgcggcaactgggtgtacgacgaggtgaacgcgccggtgtacaaggagtcgcagtgcgagttcctgacggagcaggtcacctgcatgcgcaacggccgccgcgacgactcctaccagaagtggcgctggcagccgaccgactgcgacctgccccggttcgacgcgaggctgctgctggagcggctgcgcaacaagcggctgatgttcgtgggggattcgctgaaccgcaaccagtgggagtcgatggtgtgcctggtccagtccgtgatccccaagggcaagaagacgctcaccaagttcgtcaacggcggcaacagcaacatcttctacgcacacgagtacaacgcgacggtggagttctactgggcgccgttcctggtggagtcgaactcggacaacccgcaggtgcacagcgtccccgaccgcgtcatccagtggcactccatcgccaagcacgcgcacaactggctcggcgtcgactacctcatcttcaacacctacatctggtggctcaacaccctcgacatgaaagtcctgaaggggtcgttcgaccagggtgcgacggagtacgtggaggtggaccggcccgtggcgtacaaggaggtgctcaagacgtgggcgaagtgggtcgaccgcaacattgaccccaaccggacgaccgtcttcttcatgagcatgtctcccaaccacatcacgccggaggcgtggggaaactacggagggatcaagtgcgcgatggagacgctgccgatcacgaaccggacgacgtcgctggacgtgggcacggactggaggctgtacgccggggcgcaggaggtgctccagacgttccgccgggtgccggtgcacctcgtcgacatcacggcgctgtcggagctccgcaaggatgcgcacacgtcggtgcacacgctccggcaggggaagctgctcacccccgagcagcagtccgaccccaagacgtacgccgactgcatccactggtgcctcccgggcctccccgacacctggaaccagttcctctacgcccgcatcgcctccgccccatggtcatccgaccagtagaaaaagagccaaataaggctagcttccaagtgttctgcgagacaagaaaaggagccaagaacaccgttgacacaccatcgatgcccgccgcccggccgcggccacctcactttttcttactttgggttacttttttttcttctctttttttcaccatttttctttctttctctggggttgcgtaaagctgtcttgtgctgtgtttaacatgtgattcttttgttaaaaaagaaatggagggtttaggatggtgaaggaggatctgtgggcgggctgtgttgactatagctcatttcttgtcctgctgataaaggatgcatggataggagaaagcaaaaaaagggtgtgatgtgagatgtaaggggggaaagaaaaagggagggttacatgtaaagaatttttgtgtattacaccattctagtacattgatgctcaagagaggt

SEQ ID NO: 14270 - DNA, 1526 bp, Oryza sativa
  ref <308>: DATABASE ACCESSION NUMBER: AK064881
  ref <309>: DATABASE ENTRY DATE: 2001-12-06
gctttccccttctccgctcctcctccccctcgcgagctcggcggcgggcggcggcggcggcgcgatgaaggtctccatcaaaacgctcaagggctccagcttcgagatcgacgtcgagcccaccagcaaggtcagtgatgttaaaaagctcatcgaggttacgcaaggagataatgtctaccccgctgatcagcaaatgctgatccatcaagggaatgtccttaaaaacgacacaacacttgaagagaacaaagttgttgagaacaacttcattgtgataatgttatctaagaagggatcatcaagtgctgcttcaagtacagctaaggagcccacaaaacagccctcagttgaccgggcgatacccactgcgcctgcaacccaaccacctgctccaccagcacctgttagcgagcctgtgactgcaccagttccaactgcaacaactgcttcagctccagcagctgctgtcaccgctgcatccaccgaagcagataattatggtcaagctgcgtcgaaccttgttgctggaagcaatttagaagggactgttcagtcaattcttgaaatgggtggaggagcttgggaccgtgacactgttatgcgtgctctgcgagctgcatacaacaatccagaacgggctgtggagtatttgtacaccggggttcctgagcaagctgaggcccctgctgcagttcaagcacttcctgtccctgctgcagttcaagcacttcctgtccctgctgcagttcaaccagttgacccaagccaggctccccaatcagctcaactttcaattccatcatctggacccaatgccaatccattggacctgtttcctcaggtccttccaaatgcttctgcaaatgctggtggtggaaatcttgatgttctgcgaaacaattcacagttccgtggcttgctttctttggtgcaggctaaccctcaaattctgcagcctttgcttcaagagttggggaaacaaaatccacagattttgcaactgattcaggaaaaccaggctgagttcctgcgcttaatcaacgaacctgcagagggagctgaagggaacttgctagaccagtttgctgcgggaatgcctcaaacagtggctgtcacacctgaggagaacgaagccatacaacgtctggaacaaatggggtttgatcgcgatctggtcctggaggtattcttcgcgtgcaacaaggatgagctgttggccgcaaactatctcttggaccacatgaacgagttcgacgacgacgcccctgaaccaccgcaataagatgactgacccgtttttaatgatacatgccagtcacacaagagacattgggttgcaaacagtggtcaccaagactggtgattatccccgttttagaacatccaaatccacccatccatccaggcgtgagaaaaatgtttttgagcttctctcatcatcattcttttttctgctttgggatttttatgatgattagtacatactctagatgacatttacagactacatataaccaaatgtt

SEQ ID NO: 14271 - DNA, 1434 bp, Oryza sativa
  ref <308>: DATABASE ACCESSION NUMBER: AK064882
  ref <309>: DATABASE ENTRY DATE: 2001-12-06
gatgtactcctggccacacacggcctgcgcgtgacatggcagcgaccagcggcaagctccggccgcccttccggcttctcctcctgctcctggccgccgccgtcgcccgctcggtggacggcgtcgagctgaccctcctcaccggcgctcgagagaagggcgccgtgtgcttggatgggagcccgccgggctaccacctgcagagaggcttcggctctggagagcacagctggtttatccatcttcagggaggagcctggtgcaacaccatcgaagattgttccaaacgcaaaatgagcgcgtatggttcatcgaaattcatgcgagcagtagagttcaacgggatactcagcaatgaccaacaactgaattctgatttttacaactggaacagagttttcataagatactgcgatggagcatcgttttctggggatggggaggctcaagatcaggatgggagcacactccacttcagaggattgcgcatctgggaagcagttattaatgagctaatgggaaaaggacttgcaactgctaaacaggccatactctcaggttgctctgctggtggtctggctgcactactacactgcaatgatttttatgcaagattttctaaggaggtttcagctaaatgccttcctgatgctggatttttccttgatattgaggatttatccggggagaggcacatgtggtctgtattcaatggaactgttcatcttcagaatgttacacaggttttgtcaaaggactgtcttgcaaagaaggatccaacagagtgcttctttcctgctgagcttgttaagagcatcaccgctcccacgcttattctgaactctgcttatgattcttggcagatacaaaatgcccttgcgccagatggatcctttcctggacagtcatggtccagttgcaaaactgacattcgaaattgtagttccacacaaatccaagtattcaatggattcaggaataaatttgtcgatgacatagaggttgtgaaagacaaaaaggactggggtcttttcattgattcatgtttcactcactgtcaaacgccattcgacatctcatggaactcacaggcctccccagttctcggtaacaagattgtcgcggaggctattggggattggtatttcgagagaagctatgaagtgaaagaaatcgactgcgagtatccgtgtaaccccacatgtagcagccagctgcctaaatgattttacattgggctggacccagactaccacccttccctgaatatttatgcaggcttatttgatgaagcagcagctgcagatcatctttcaccatttgttctgtgaacaactaatagccatgctttgctgataatcagacgcctgtgataagtcaaacagtggccatctcgggtgaaaaggaattactacgaatactttatatttcagt

SEQ ID NO: 14272 - DNA, 2677 bp, Oryza sativa
  ref <308>: DATABASE ACCESSION NUMBER: AK064883
  ref <309>: DATABASE ENTRY DATE: 2001-12-06
gggagccccaactacgccgccagcccgccatctcatcccccggcgagcgacacggtcgcatcccacctgagctccgaccgccgcagcggcggtcgcctcgccggagcagaagccgcgcgtgggggggaaggcggaggaggggaggggttcaatggagacggaggtgttccccgtggttgacctccgcgtgctcacgcagtccgatctggacgagctcgccgccgcctccgcccacgccgtggacccgcggagcagctgccccgaccgcgccgtcttcaacgagagcgccggctcgcgtaagcagaccttctcccgcgtccgcttcgtccccgccgccgccgccgccgctgccgccgcctccgcctccgccgccgccgccgccaagctgcccaggggcaacgacaaggaggacagcttcatcgcctaccacctccgccgcctcttcgcgcccgacgacccctccctcatcgagaacccctcctttccccaaacccaaaccctagctcggtcgccgtctcccgaccccgaccagttgaccaccaactccaggggggtctccgttgatctggtgagcctctcacggcttgccgacccgtacgacgcggagctcgggaagcggactgccaggatgaccacggaggaggagctcatgggcttcatctctagcctcgcgggtcagtgggtgaaccagaggatgcggaggaagttagttgatgcgtccttcttcggggatcacctccccagcgggtggaggctgcagcttgggatcgagcggaaggaccgcaaggcctgggtgaactgcttcagttatgtgagccccaagggacagagttttgctacttgccaagaggtttctgcatacctcatgtcacttcttgggtatccggagttcaaaacggataatattgagtatggtagcacacaacaacatggcttgtgtgctgacgatggtgttaatgttttaggtgttcaacaccaaattggtacaagtatagacagtcaaagtaatttgccagttgcttctgctactttttatagtcattcaagagatcaagacgaaacggttgcagatgatataaattcttatgaatgtcaacaatgcaatttaacttttcatggtcagagtgcctatgcgcatcacctgatcacttttcacaaagtgagttctaagaggcgtaagagtaacaaggttagcaaatttggtgagccagtgataggcaaagatgggaaatttgaatgcccagtatgtaacaagacgtttgaggaacagtcacggtactttggtcacattggatcccatgcaaagtatcaggggctgactcctgaagcattcctgcaaaccttttcaggaaaggttggtaacaattcttttgcaggtttgtcatctagccttcaagtattggtcggatcaccacaactgaatgagaagactactgcttgtgaagcacgatcgcagcatcacgattgttcaactaaacatggaggcaatagtacaagaggtatagacctttttaactcaaatcatcctgctaacttcaatgggcataatcaatcttggtgtagatctggtgaaattcctcccaccacagaagctcaaagcacatggacttatagaaataatgagatgaactgtgctgatagaactgttccgagaacagtacctcagcccaatgatcacgaggattgcagggttagtggctttgctgaagcaactaattttaatgatcaagcaggaagacaccaaggttttagacctttctcctttggaactaccaaccattgtcaaggccagataattgatcatgcagtagctgcttccaagcatgctgaggttaataatagtatgaaatcaagagatgtcaacctcaattcacgcctgaacacaatatcctttcctattgcaactgcaaacaatgaaacatcgactgcccttaatgacgtgaatcggtcatgcattactggaaaaggttttagtggaagtttcagtaacaatgatggtgctgcatctatcgtgttgcccagttctggattaaacaataaaatttctagctccctcggtgtagctgacagatcatctattgctgccagatccttcaatgctggttatgtttatgaaaatggcgcttctgaagctaacaatattggcaacaaaaacaataccatggtgtatcaaacaagtttggccatgcgtccactctctcctggcaaacaaagcagcggcgttgcttcgagaaggacagccgctgtggtgtccgagcggcatggaggccaagttgtgagacacccacggactgcttcatcagtttacatgcctgagcaaggtcctggatggttgtgagctccaccagctaatcaccaaaggcagcttatgcatcatgcagctggattggagaactcctaaagctgaaggccacgatgggattggagaactcctaaatcttgttcacacagggtacctcagtactcttcttttcaaacacaggtaacggagacaaattagtttgtatgagattgggtaacgtctgttgaaatatgtggtattcttaaaagaaacgttgttgcactgtggtattgagtggagatgaaagaatcttgtggtattatttggttggtcaaatctttgtggtatagttggaattttcatataataatatatttttccttggtcaaatcttcg

SEQ ID NO: 14273 - DNA, 2017 bp, Oryza sativa
  ref <308>: DATABASE ACCESSION NUMBER: AK064884
  ref <309>: DATABASE ENTRY DATE: 2001-12-06
gtctccctccgaatcctcccccgcattccgcgccggagctgaggagggacagcgagccagcgagggaggtggggcaatccagcgagcgccagatcgtgccgccagccccgctccgtcctctctccggcgaccctccgccccgcctgatcccgtggtggatcaactacaactcatctttaggaaagcctcttgaacattagccttgtgtgcctttcaacagtatggcctcggtaggtgtggtgcgttcttccttggggtttgagaacgaaacaagtacaagtggcgatgccgaccgacttccgaatgagatgagcaatatgagtataagggatgataataaggacattgacgacatagttgtcaatggcaatgggacagaacctggtcatgttattgtgacaagcattgatggaagaaatggacaggctaaacagaccattagctacatggccgagcgtgtcgtaggtcatggatcctttggaactgttttccaggccaagtgcctggaaaccggtgagactgtggctataaagaaggttcttcaagacaagagataagaaccgtgagctgcaaacaatgcgagttcttgaccacccaaatgtggtgtcactaaagcattgttttttctcaaagactgagaaggaggagctttacctcaatttggtgcttgagtatgtgccagagactgctcaccgtgtaattaaacattacaacaagatgaaccaacgcatgccattgatatatgcaaaactatacatgtatcagatatgcagagctttggcgtacattcacaacaccattggcgtgtgtcacagggatatcaagccacaaaatcttctggtgaacccacatactcatcagctgaaattatgtgacttcggcagcgcgaaagtcttggtaaaaggagaaccaaatatttcttacatctgttcaaggtactacagagctccagagctcatatttggtgctactgaatacacaacagcgattgatgtttggtctgccggttgtgtgcttgctgaactcctcctggggcagcctctattccctggcgacagtggcgttgatcagcttgttgaaatcatcaaggttctgggtacccctacacgagaggagattaagtgcatgaacccaaattacaccgagtttaaatttccgcaaatcaaagctcacccatggcacaagatcttccataaaagaatgcctgctgaagcagtcgatctcgtctccaggcttttgcagtattcaccatacctccggtccactgctgtgagtgttgtcgttgcactatttgagccaacaccattttttagagaaagttttagttcttggcatcactattgtgttacatttttctaattacttcatcatacaaacatgcactgccttgccaagtactagtagttacagattgtgcatttctttatttgccattacagtcggaagcattgatccatcccttcttcgatgaactccgtgatccaaacacccgcttaccgaacggccgtttccttcctcctctcttcaacttcaagccccatgaactgaagggtatgccaatggaattcctggtgaagcttatccccgaacatgctcgaaagcaatgcgcgtttgtaggatggtgatttctgaggtcagcatgaaaactagttcagaatttcttcaccgtcctccattagaaagcagagatgaaccctgtgtgcagccatttgggaaagctggtgcatatggaagtggaactacatttttttgtccgagattctgacgccgcgtattcttttcccccctcacactttgctgctgccggtgtaaccaaaaaatcatccacggttctgtaaagttgatgaagaagagtgtaaaatcaggttgaaaactgaattcgatcggtttgtcaagattgtagcaacatgcaaggaaggatgttgcacactttgtatggcaatgttcgttcggtccaaatatttggacatggatcgagaggctattcatttaattgtacttgctgctacatgttctt

SEQ ID NO: 14274 - DNA, 1764 bp, Oryza sativa
  ref <308>: DATABASE ACCESSION NUMBER: AK064885
  ref <309>: DATABASE ENTRY DATE: 2001-12-06
gcttggtttggacacagattgagagcaagcagcgtggcgacgcccaaatcgcgcgattcgatcgaggcaaccctccccaattccctcaaatcccctatccgaaatccgccaattggccgcgtccgccacgccaagagaataaaggaaaacatcggcgtatcaacaagtgaagctgcattttcttagagctcagatgaagcggcctcgaaggcgtctgtggtgggatgactgatgagggatgatagtgacattgatgaacttgttacgggcatgctggagaccatcatccaaccagcatgcccgggcaggctcagatgttgccggcaggcaggatggacttctatggtacaaggacactggtcagcatgtaaatggggaattctctatggctgtggtccaggccaacaacttacttgaggatcagtgccagattgaatcgggtccattgagctttcttgactctggtccatacggaactttcgtcggggtttatgatggacatggtggcccagagacggcttgctatatcaacgatcacctattccaccatctgaaaaggtttgcatctgaacagaattcgatatctgctgatgtgctgaagaaagcatatgaagctacagaagatgggttcttctctgttgtcaccaagcaatggcctgtgaagcctcaaatagctgctgttggctcgtgctgcctggttggtgtaatctgtggtggcattctttatgttgctaatgttggggattcccgtgttgttttaggcagacatgtcaaagccacgggagaagttctggctgtccaactctcagcagagcataacgtaagcattgagtcagtgagaaaagaattgcagtcaatgcacccggaagataggcatattgttgttctcaagcacaacgtttggcgtgtaaaaggtctaattcaggtctgcagatcaattggtgatgcctatctcaaaagatcagagttcaaccgggaacctttgtatgcaaaattccgcctccgggaaccttttcacaagcccatactaagttcagaaccatcgattagtgtgcaacccctacaaccacatgatcaatttctcatatttgcatctgatggtctatgggagcacttaaccaatcaagaggccgttgacattgttcacagtagccctcgcaatggaagtgctaggaggctcataaaggcagctttgcaagaagcagccaagaaaagagaaatgaggtactcagatctcaagaagattgaccgtggtgttcgccgccacttccatgatgacataaccgtcatagtagtcttcctcgactccagccttgtcagcagggcgagcacctacaggggcccttctgtttctttaagaggcggcggcgtgaatctgcgcagcaacacacttgcaccttatgcatctcaaatgtgaccctgaatgcatggtggaggcaacacacctgactgaagaaggttttcttcccctgtggtaaagtaaaagccggtcatttcggccaagatcattccctcaatgatgtaaaaaaaaatggagagacacagaagctcttctccagctctttaatcccagcatcatagtaatgtatgtttcaagatcgacttaaaaagaatagctagctgttcaattgtgttgtgctgctgatgctccatggaaagctcaatctttccagccgaaaaagcaaaagtcttgttccgccgcaggaattataacaccagtgcatatgaaataataagccaaaaaaggagtaacttaattagctg

SEQ ID NO: 14275 - DNA, 1403 bp, Oryza sativa
  ref <308>: DATABASE ACCESSION NUMBER: AK064886
  ref <309>: DATABASE ENTRY DATE: 2001-12-06
gaccgaaaattcgaagcaaaaaaaaaggagaagaaaagaaaaggaaaaaaagaaaagaaaaacaaaccctagccgcaccgatcgaagccagtgagacgccgccgacggctatgcgtgaggcgatcgtcggtgaccacgatcgccgccgccgccgcacccgcatccagtgaaaccctgcactgtcgtctcgttcggttgtgaggagatgagggcggcggcggcggcggcggggcagatcgatccgtcccctggggcgccggcgaagtcgcggctgaagaggctgttcgagaggcagctgctgcgggtgtcgccggcggagaggctcccgtcggtcgcgggtgtcggggagaaggatgagtcgtcggagccgagctccgtgtgcctggacggcatggtgcggagcttcttggaggacggcgtcggcgtcgagcggccggcgggcgccgcgcgctgctgcaattgcttccacggcggggaggcgtctgacgacgacgacgacggccccgctgctgccgaggcggcggccacctccgacgccgcagagaccatcaagggcctcgtccactgcgccagcctccgggaacgcaacctcctcgccgacgtctccacgctcgtcgagcgccaccgcgccgcgggggcgcgcaagcgcgacctcctccgcctcctcgccgactcgctccgcgcggcggggcacgacgccgcggtctgcatctcccgctgggacaagtcctcctcccacccaaaaggcgagcacgcctacctcgacgtcctcctccctcccgcctccgaccgcgccgagcgcgagcgcatcctcgtcgacgtcgacttccggtcggagttcgaggtcgcgcggcccaccaaggcgtaccgcgccgtgctccagcgcctgccgtcggtgttcgtcgggaaggaggaccgcctccgcctcctcgtggccgcggccgccgacgccgcgcgcgccagcctcaagaagcgcggcctccacctcccgccatggcgcaagcccgagtacatgcgcgccaagtggctttcaccctacgagcgcgacgttccttcaccgcagcagccagatgcctccgccggtgagctcgccgtcgacggcgagggaggtggagcgtggactcaatgattgatgatcaaggactcgtcttttgttgattcttttttcttcgggaatttgcatttgcagcgtcatcttgggctggatgcaaatgttttattctttcttttcctttcctttttcccccttcatttttaccctttaatgggtttcattttggccatggagtagtagtaactgtagtagtaagcacggataagacgaacgggaacaaaaaaaatgtagtgttagttgaacagaaaaaaaagagagataatggattacggcaatatctacttctttc

SEQ ID NO: 14276 - DNA, 917 bp, Oryza sativa
  ref <308>: DATABASE ACCESSION NUMBER: AK064887
  ref <309>: DATABASE ENTRY DATE: 2001-12-06
gagatcgtcttcctcctccgtctccccacttgcgggagagaagagaaggttcagagtagcacacgctgcaccgcgcgcagcctcgagctcgaggagagggagatttggccccccgatggcgaggccgagggcgccgctgctgcggcggatgctgctgctgtgcgcggtggcggcctcctgctcctactacctcctcgtcctccacgcgcaggcctccgtgccgccgcgctacgacgggttcgcctacggggacgccgccaccgccgcctggaaggacaccatcctcgtcgaggccttcctcgacccgctctgccccgacagccgcgacgcctgggcgcccctcaggctcgccgtcgaccgctacgcccccagggtctccctcatcgtccaccccttccccctcccgtaccacaccaattcattccttgcctgccgtgcactttacatagctaacaaattgaactcatcatcgacctatcctttgctggagctgttcttcaagagccagggtaagttctacaatgctgcaacatcctcactatcgagcactgttataagtggcgagatgtcaaagctggcagcacgggttgtcggtaattcggtgtctgagttccagtcaggcttcagcgatataaggactgacctagcagcgagggtttccttcaagtatgggtgcacgagaggagtagccggtgcaccgttcttctttgtgaacggattccttcagcctggtggtggatcgcctattgactacagcacatgggtcagcatcctggatcccctcgctgggcagcatggcgatagattagagatgttcacctctatgtaagtatttgaagcgtgttgtaaacttgtaataatgattttgggaatactaacagttcgtctatttgatgcaataaatattgatcttaatt

SEQ ID NO: 14277 - DNA, 737 bp, Oryza sativa
  ref <308>: DATABASE ACCESSION NUMBER: AK064888
  ref <309>: DATABASE ENTRY DATE: 2001-12-06
ggcccagcatcttcctatttataccctccacccatcgaccgacgatccatcaccggcgacgaggagacactcactgatataatcaagctagctagcttaatcacctagctatccgtcagtttagctagatatggctgcagttaactgcaaggtggtggtcgccgtgattgtggtggcgatggtggttgcggcgccgggggcgtcggcggcgataacgtgcgggcaggtgggatcggcgatcgcgccgtgcatctcgtacgtgacggggaggagcggcctcacgcagggatgctgcaacggagtgaaggggctgaacaacgccgcccgcaccaccgccgaccgccaggcggcctgccgctgcctcaagagcctcgccggcagcatcaagtcgctcaacctcggcaccgtcgccggcgtccccggcaagtgcggcgtcaacgtcggcttccccatcagcctctccaccgactgcaacaaggtcagctagatcaattaatcctgcttggatcgatcgatcgagcttaacacgctagctcgatcggagttgatcagctagtaattaagcacgtatttgctacagcatatatgaacaaagtaattaaaataacacctgcggcagacatgcagcgctccattctctctctgtatcagctgtatactttatgttgcacgctccctgtgtgcatgttctatcttaattttcttcagtatgtacacgatctgtgtgtactacgtgt

SEQ ID NO: 14278 - DNA, 3165 bp, Oryza sativa
  ref <308>: DATABASE ACCESSION NUMBER: AK064889
  ref <309>: DATABASE ENTRY DATE: 2001-12-06
gggagggttgatcggtccgtgttctcttccacacaaatcttcttaatcatcttctttcctagctgttgatattgttcttcctgttgagaaattgacaggaattcatggcgggtgcactggtgagcgcctctacgggggtcatggagtctctccttggcaagctatccagtatgttggagaaagagtacgccaagaagaaagcggtagagaaggatgtgctgttcctgcgaaacgagctgagcagcatgaacaccgtgatgcagaagtacgcgatgttgagtgagcccgacttgcaagtgaaggcttggatgaaagaggtaagggagctggcctacgacatcgaggacaccattgacgctttcatggctcggagtgaaaaatccaatgagcctacaggtatcagaggatttatcatcaacaatatcctgaaactgagagagctgctctcaagctgtactatttctcaagagattgaaaaactcaagaaccaagttctcgaggtgaacgatcgtagaaaaaggtataagcttgatgtatcggtgtccatgggtaccggctgtgaatcaattgaccctcgcctgccagcgttttattccgaggtaggtggacttgtcgggatcgatgggccgagggacaaaattatcaagttgctaagggagaatgcagctgatgaagattgtggatttgtgaatcgacttaagatggtgtctatcgcagggtttggaggtttggggaaaactactcttgccaaacaagtttatgagaaaatcaaatggcagtttgattgtgctgctttcgtgtttgtatctcaaatcccagatatgaagagggttcttttggatttgctttgtggacttggggcttctggtaatacatgggatgatgagaagcaactcattgacaagatcagagaatttcttcatgacaagaggtatataattgtcattgatgatatctggagcatatcttcttgggagatcttgaagtgtgtattgcctgagaacaattctggcagtagaataattacaactacacgtattcttgacgtatccatgatatgttgctctactttcaatggaagtatttaccgcatcaaaccattaagtgacgacgactccagaaggttgttttgtagaagaattttccacggtgagcattcgtgtccatcacatctagaagagctttcaaaagcaattttaagaaaatgtggtggtttgccattggccatacttcatattgctagtttgttggcaaccaaatctaacacaaaggaagagtgggagttggtgctaaattcaattggctcagcacttgaaaatagccatactctacaaggtctgaaaaagatactgttactcagtttctatgatttaccaccacaattgaagacttgcttactatatctcagtatatatccagaagattgcatgatcaactccaaagagttgataaggaaatggatagctgaaggatttatcgcggaagacagtgggaagagattggaccaagtagcagagagttatcttaatgatcttatcaacagaagcatgatcttacctttcgacattactcatgctgatggtgtacaatattatcaagtccatgacgttgtccttaacattatcatatctatgtcgaaagaagagaattttgtcacgataatagatgggcataagtgcagttctttgcaggaaaagatccgtcgagtatccctccagttcaatgattcagaagatgttgtagtgccaacaaacataacaaacagaagttgtgtccgttcactcagtatatttgggattactaagcaagtgccatattttatggatcttcaatctttgcgagtgttggacttaggttattgtacattgttacagaatcagcacattgaatgtttaggaagtatgcttcaacttaggtatctggttctccattctcaattaatcactgaactccctgatgaaattgggaacttgcaacatctagagatgttagatgtcacattatgttccatacaagctcttccagataccattgttcgattacagaaactcgtgtgtctatatgtgagtactaaagtgaaactaccagaaatgattggaactatgcaatgtttagaggagctgttccacatatcaagcaactctataagattggctggagatcttaaatgtctgaaaaaactgagagatcttgcaatagctgttgaagaccctgttgggacaaagagctctacattgagatacagggaagtagttcggtcatcccttactgaattgggcagacacaacctgcagtcactctcactgaattacaaaggtgatgagaatttcattctggattcgtcgatgggttcatgcttctcaactcagcgtctccggaaacttatcattgggaaaactctttccagggtgccagagtggatgagtatatttgacaatctcacacacttacaactgtgcatctcaaggatggaacagagtgatattaacatactcaaaggaattgactctctgatctttctccgcctcgtatttacagggcatgctcctgatggaaggatagtcatcgacaaccgaggatttcaagctctcaaggaattatatcttctatgtttcattcctgggatgtggccagtgttcgagccaggagctatgcaagaattacagaagtatcacctcactttcaagctacagaaagtacattgcaagaatagtgttttggactttggtctccagcatctttcaagcctccagcacataagtgcgataattattccatctggtgctaccagtgaggacacattggttgcagaggatgccatcaggagtgctacaagtatccatcccaaccaaccaatagctgaaatttttgtcgagtaaaaaaaatggtaaccggccagttataggttttctacgagtcaaaattctccccgaaacaagtagacctcattttcatgtgtctttgtgttatatgctcctctgttctggttgcatttgagaatgtatgcctttgttagtataaccctttcacaagtgaagaactaattacattagtcctctgatactgtagtcctaatgctctttttaggtgaggatagttgtactctaactcttgtatattactgattttatttttgtggttgtatgctaagttatttatttgccc

SEQ ID NO: 14279 - DNA, 2932 bp, Oryza sativa
  ref <308>: DATABASE ACCESSION NUMBER: AK064890
  ref <309>: DATABASE ENTRY DATE: 2001-12-06
gagggtttcgcctcccccgccccgcctcctcctcctccgcaccgcgcgaaccgacccgacccccacttcgccgccgccgccgcagccgcagccgcgatggggacggagcggaagcgcaaggtgagcctcttcgacgtggtcgacgagacctccgtctccgccaagctcggccgcgccgccaccaccaacggctcggccgccgccgccgcggccaacccgtccatcaatcggtggacggggaggccctactcggcgaggtacctcgagatcctcgagaagcgccgcacgctacccgtgtggcagcagaaggacgatttcctcgccgtcctccgcgacaaccagaccctcatcctcgtcggagaaaccggaagcggcaagaccactcagattccccaattcgtgctcgaggctgaaggcttgagcaaccgctcaatggttgcttgcacccagccgcggagggtggcagctatgtcagtttcccggcgtgttgcggaggagatggatgttactatcggggaggaagttggttacagcatccgttttgaggattgcagcagtcacaaaacagttctcaaatatttgacagatggtatgcttctgagagaagctatggcagacccacttttagagaggtacaaggtgattgttcttgatgaggcccatgagcggacattagcaacagatgttctgtttgggcttctgaaggaggttctaaagaacagacctgatttgaagcttgttgttatgagtgctacccttgaggctgagaaatttcagacctatttcagtggtgcaccgttgatgaaggtgcctgggagacttcatccggttgagatcttctatacacaagaaccagaaagggactacctggaagctgctatcaggacagttgttcagatacatatgtgtgaacctgctggagatatccttgttttccttactggagaggaggagattgaggatgcctgtcggaagataaataaggaaattaataacatgggggatcaggttggcccagttaaagttgtgcctttgtattctacgctgcctccagcaatgcagcagaagatttttgaacctgctccagccccatcaagagagggaggcccagctggaaggaaaattgttgtgtccacaaatattgctgagacatccctaaccatagatggtatagtgtatgtgatagacccagggttttccaaacagaaggtttacaatccaaggataagggtggagtcccttctggtgtcgccaatttcaaaggcaagtgcacatcagagagctggtcgtgctggaagaacgcaacctgggaagtgtttcaggttatatacagagaagagttttaacgatgatttacagccacagacatacccagaaattcttaggtcaaatctggcgaatacggttcttaccttgaagaagcttggaattgatgatttagtgcattttgactttatggatcctcctgcaccagaaactttgatgagggccttggaagttttgaactacttaggggcacttgatgatgatggaaacctcacgcctttaggtgaaacaatgagtgaatttcctctagatccccagatgtcaaagatgcttgtcatcagtccaaaatacaactgttcaaatgagatcctttcaatatctgccatgctgtcaggtatgtcaaacaaaacttcatgtcgccatatggtttgtcagctaaattatatagtgcgtaataataacacccgcacaattttgcttgcatcaattgcacattgtagaaagcttacaagcttcttatcatgagagtttgcatccactttagtgcatttgctcttccaatatgctttattaattctttcagagctgtaatcagcaactgtcgtgcacctagcttcttgagctattgatcaaaatgatcatacagtttaggctgatgcagatagttgctgtttgttgagttattctgacaaagcaaatggtatcgtctcgcctctttgcatctgctgaccaccatggacttcgtctgttattgccgtattctttctctagtacccaattgctttctccggcctagggaggcacagaaggctgctgatgaagcgaaggctcgatttggccacattgacggggaccacctgacacttctgaatgtataccatgcatacaagcagaacaatgaagatccccagtggtgttatgagaacttcatcaatgccagagctctaaagtcagctgataatgtcagacaacagcttgttcgcatcatgaccagatttaacctcaagatgtgcagcacagacttcaatagtcgggagtactacgtcaatatcaggaaagccatgcttgcagggtacttcatgcaggttgctcacctggagcgaacaggacattacctgaccgtcaaagataaccaggttgtccatcttcacccctcgaactgtctagaccataagccggagtgggtcatctacaatgagtatgttttgaccaccagaaatttcatccgcacggtcatggatatccgtggtgattggctgattgatgtggctccacactattatgatcttagtaatttcccctcgtgcgaggcaaagcgcgtccttgagaggctgtacaacaagcgggagagggaaagagctgctaataggaactgaagttgatggcgttttccccttgcgctagccttccactcgagaagattcgggtatatcagcttgtcgtgccggcgccaacaatggatgcttcctcatcctatcgtatgatttggcttgatggatgctcgtcactacgtatgacatgccaaatgctgctctctagccgtacaatctaccagcaatggcctaggatcatatttttgtttcttttagaagttgtagcctgtgacgcaggatattatgtaccggtctcccatattttgatggttctggcacccttttatttcggc

SEQ ID NO: 14280 - DNA, 1997 bp, Oryza sativa
  ref <308>: DATABASE ACCESSION NUMBER: AK064891
  ref <309>: DATABASE ENTRY DATE: 2001-12-06
tggggacaactactatcactaaatatctagcatccttatcctcttctttgtctctttcccttccttctcccttctctctctctctctgactaccagcacgaagatgacgatggtggctagctgtgcggggtggcgcgttgggcgtggaggacgctcgtcggagccagtgcccgccgttgtccccgtcgccgtcgccccaccgccgcggggtcgaggcgacgacgaggagctcggcgataggtgcggtgaataagagggagagtgggagcgggacgtggaggccgctgctggcgccggggacggcgttgccgggcgggagcttctcctgtcggctcaagacctcggccgccgaggaggacgacgacggcgcggccccggcaagggtcgccctcaagctcgcctcccttaccgcgctgctctggctccccgccctcgttggtcttctcatcggctgccccaccttgacgaccatcggattcgccgctgcctcctcctccacactccgcctcgccgaccaccagattcgccgccgcctcctcctcctgctccaccacgtggctgccttctcctctctctctctctctccttctcctcctccaagttaccaggtaccaggtatcacggataccaggtacaaggtattaggtatcatggtaccagataccaggtaccagccggtaccagatttcaggtatcaaaggtatcagtcggtaccaaaggtaccaagcaccaggtaccaactgatacccaaggtactaggtatcaagatggagtgcacgtggaagcggagaggagtcacttaaattatcccgttacaacgggatcccgttttgtagccgctctcataaatatattataattataaccagtctcttatagttggattacccaccatggattagtctcttgtagttggattattcccccaccatggattagggtgattaaaccggacctcttgttgtgcaggcagtaaaaggtggttgtgtgcttgttgtgacacaacatttacccccaaatttagctctcatttgagctcgtcagctaattgaatatgtgaagatcaagttgctgcagttgatgattttgaattatggatcattcaatcatgggaaagagacaaagaatggtacactggtaatgatcggactttgagccgatttatatatgaggatcatttaaacatgggaaagagccaaagaatggtaagctggtactaatcggattttgtgagtcaatttatatatgaaaatttctgcagtggacaaaacacttggtactgctgtcataggagtcctagaggccttcaagagcatggtttctggtcagcacggtagatttcatagagttgtggtgcagaacattctgaaaaacctatgtgcctatgccaaaccagacagtgactgccaatactccatgcagaaattttctgtagacaacatctcgatggcacttagaactatgtatcagacagacaatcttataggggaggacatggaggcctttcttggccttgttttgcagttcagcaaacttctctgtgagaccgatttcatcgaggctgtcaacggaaatggaatcggcttaaggaattttgtacagaagctgaaattaatcctgaagcaagcaaattcacatagaactgaagcaagcgtacaccctggaatcagaagatccgcaattgagcaggtcatatggatggcgcaactgaagcctgaacctcactgcatcgaccatttcatcgactgctaaatgcgggacgatctggtgatggcgcagcagacagccagaagggcatggcaagagaatttcaagctttcatctggaggcgtctctgtcctggagtacgaagagtcccttcgctctgttgcctcgagggcactgaagctgatcctcggtgtagggatgaaaacggtcggaaacggtcggaaaaaccctctaccatttccattttcattttattttctcgaaaatggaatcggaatggcatactcggc

SEQ ID NO: 14281 - DNA, 836 bp, Oryza sativa
  ref <308>: DATABASE ACCESSION NUMBER: AK064892
  ref <309>: DATABASE ENTRY DATE: 2001-12-06
gtgaagcaagcaaagccacatcttattgtcacttccatctcattctcctaattgtcatcactagcttctagctagcttaattaattaattagccatggcggaggagaagcaccaccaccacctgttccaccacaagaaggacgacgagccggccaccggagtagactcctacggcgagggcgtctacacgtcggagacggtgaccaccgaggtggtcgccggcggccaggacgagtacgagaggtacaagaaggaggagaagcagcacaagcacaagcagcacctcggcgaggccggcgccctcgccgccggcgccttcgccctgtatgagaagcacgaggcgaagaaggacccggagaacgcgcacaggcacaagatcacggaggagatcgcggccacggcggcggtcggcgccggcggctacgccttccacgagcaccacgagaagaagaaggaccacaagagcgccgaggagtccaccggcgagaagaagcaccacctcttcggctgatcgacctcatcacaacgtcgccggcggcggcgacgacctcgccgtacgtcgccggccgccgtgtcgtcgatttgtgtgtgtaataatttgtcttcttctgcatgcgtggtgttgctgtttttcacaagagtctccggcctcgaccagtgagaggctgacaggtggggccgtgagttcagcttgtgttgcttgattttctctgcagccttgccctctgtgtgtccaaataagtggtgtgcatggctctctccgtgtcatgtatcaatgtatttttatctgtactttgtacaagtgaagcaatatttatcgaaccttgactttctcc

SEQ ID NO: 14282 - DNA, 2132 bp, Oryza sativa
  ref <308>: DATABASE ACCESSION NUMBER: AK064893
  ref <309>: DATABASE ENTRY DATE: 2001-12-06
tggcggtgcaagcgcaacaccacctcacctcactccccttctcacctcttctccccttctccacctcctcttctctccgcgtggcggtggcattgccggccgccgcatcgtctcgggatggcctcgcacgcgctccgcctccacccgctgctcttctccgccgccgccgcgcgcccggctccgctcgcggcgcggcccggtggtggtgcccgccgggtccaccgccgccactctctcgccgtcgtccggtgctcctcctccgccgcccaggcgctcaagatcaagtcgattccgaccaagcccgttgaggggcagaagaccgggaccagtgggttgaggaagaaggtgaaagtgttccagcaggagaattacctcgctaattggattcaggctctgttcaattcattgcccccggaggattatgttggtggaacccttgtgcttggtggtgatggccgatactttaacaaggatgctgctcagattatcactaaaattgcagctgggaatggtgttgggaagatcctagttggcaggaacggtctgctgtcaacgcctgctgtatctgcagtaattcgtaaaagacaagccaatggtggcttcatcatgagtgcaagccataatccaggtgggccagataatgattggggtatcaagttcaactatagcagtgggcagccagcaccagagacaattaccgaccaaatatatggaaacacactttcgatttctgaaataaaaacggcagatattcctgatgttgatttgtcctctctaggagttgtaagctatggtgatttcaccgttgaagtgatagaccctgtcttggactaccttgagctaatggagaatgtgtttgacttccaacttatcaagggcttgttgtctcggccagatttcaggtttgtatttgatgccatgcatgctgtgactggtgcatatgcggatcctatttttgttgagaaacttggagctgatccggactatatattaaatggtgttccacttgaagattttggcaatggtcaccctgatcctaatttaacttatgccaaagagcttgtgtttaccatgtttggaagcggagcacctgactttggtgcagcaagtgatggtgatggtgatcgaaacatgattcttggaagaaggttctttgttacaccatcagactctgttgcaataattgcagcgaatgcacaggcagcaattccttatttccaatctggtccaaaaggtcttgctagatcaatgccaacgagtggtgctcttgatcgtgtagctgataaattgaatgttccgttctttgaggtaccaacaggatggaaattttttggaaacctaatggatgcaggtaaattgtctatatgtggagaggaaagttttgggacaggatctgatcacatcagggagaaggatggcatatgggctgttctagcttggctgtccatacttgcacaccggaacaaggataagaaggccggggagagattagtgtcagtggaagatgtagctagggaacactgggcaacctatggaaggaatttcttctccagatatgattatgaggagtgtgaatctgagagtgcaaataagatgatggagcatcttagagatgtgatcgcaaaaagcaagcctggagagaaatatggaaactatacccttcagtttgccgatgatttcagttacactgatccggtggatggtagcactgtatctaaacaagggcttcgatttgtattcaccgatggatctaggattatcttccgcctttcgggaaccggatctgctggagcaacaatccgtatatacattgagcaattcgagtctgatgcctcaaagcatgatctggatgcacaaatagctttgaagcctttaatagacctagctctatctgtttcaaagttgaaggacttcactggaagagataagcctactgtcataacataaacataccggtgacattagcaatgttaccacctgtgtattcttttatttctttgtttttatagccccttccaaccgatgaaccaataatgtaatcttaggccaagttttgtactgagttgatggcaaactgtatcttggaggtacctttcattgaacatagtatgcaggaatgaataagcttttag

SEQ ID NO: 14283 - DNA, 781 bp, Oryza sativa
  ref <308>: DATABASE ACCESSION NUMBER: AK064894
  ref <309>: DATABASE ENTRY DATE: 2001-12-06
tatctcctcctcctcctcctcctaagctcaagcaaagattcatccatcgatccaactgatccaatccaaactccaaaggcaaagcaaagaaggtcgcattcgattcgattccagcgatggcggcggtgatggtggcgaggcaggggagggagctgcagaggtacagcgacaacacgggggggaggatggtggtggggtgcatcccgtacagggtgaggggcgacggcggcggggtggaggtgctcgtgatcagctcgcagaagaagggcgccgccgccggcgacgtggtgatgttccccaagggcgggtgggagctggacgagtccgtggacgaggcggcgcggcgggaggccctggaggaggccggggtgctcggcgagatcggcgcctcgctggggcggtggtgctaccggagccgccgctacgacgccacctacgagggcttcgtcttcccgctccgggtcaccgacgagctcgaccggtggccggagatggcggccaggcgccgcagctgggtctccccgcagcaggccatggaccggtgcccgcactggtggatgcgcgaggccctccagcgattcgccgacctcttcccccaacacacgccgttgtccctcttgtaggcggcggcgccggcggcgagttcgccggagttgagagcgatgtaattaatttgcaacctcacgggtcacaagagattcggccatgtaaatctcacccttagttaacacataattttttttcgtgacaagcagagaaattcagaattccattcggagcc

SEQ ID NO: 14284 - DNA, 2008 bp, Oryza sativa
  ref <308>: DATABASE ACCESSION NUMBER: AK098857
  ref <309>: DATABASE ENTRY DATE: 2002-08-28
gattccctcggcgtgaaagaaagagagaaatcttccccatctcgtcgtctcctccgctccttgcgcccaagacgagccgcggctgagcaggggaggggcgcgccgatctccatccggcgagcagagcagggtaggggatcctggaggcaacatcagtttcgctgcaatctgacaaagtggagggtctaaaagttgaagcttcttttatgtctgaacaagacttgctttacttgggatcagttggattgcttggagaatattctcggacaacgagaaaaaggcacaagctctcgcttggaaggccctgctgcgcactggtttctgctgattcatttcaaggatacaagactactgttccttttggctcttggtgcttctgatattatctcagcgaaagaaaattaatccaagatggctctgcaaaacattggtgcttcaaaccgtgatgatgccttctacaggtataagatgcccaggatgatcaccaaaatagaaggccgtggcaatggcatcaagactaacattgtgaacatggtggatatagcaaaagccctagccaggcctgcttcctacacaacaaagtactttggatgtgagcttggtgcacagtctaaatttgatgagaagactggtatttccttggttaatggggcacatgatactgctaagctggctggtctccttgagaacttcatcaagaagtatgtccaatgctatggatgtggcaaccctgagactgaggtcctaatctccaagacccagatgattacactgaagtgtgctgcctgtggttttgtgtcagatgttgacatgagggacaagctcacaacttttatcctgaagaatccacctgaacagaagaagggtgctgggaaagacaagaaggcaatgaggagagctgagaaggagcgtctaaaggaaggtgaggctgctgatgaggagatgaagaagctaaagaaggaagcaaagaagaaaggtgcatccaaggaaagtacctcctctaaaagtggtgctgggaagaagaaggctgctgctggctctgatgaggatcattcaaattcaccaactcgcagccatgatggtgacaatgtggctgcagatgaggatgatgatgatgatgtccagtggcagactgacacttcgttggaggctgcaaaacagcgcatgcaggaacaactgagcgctgcaactgctgagatggtaatgctgtccactgaagaacctgagaagaagaagaagcatgaggcctcacacaaggagggtgcctccaacggaagtacaaaacatgtggttgaagaggctaaaagcagtccttatgatgatctggtcaaggagatgaaggataacttgagcaagggtgccaatgctgttcagctcaagggtctgatgacttcctcagcgctgccaccccaggatgctatgaatgctctttttgatgcactctttggcggcctcggcaaaggattcgccaaggaggttgtgaagaagaagaaattcctcgctgctgctgtgcctgatgaagcctcccagatggtcctgctgcaagcgctggtggccttcggcgccaagtcaagccccgaagctgtgaaggaggtgccgattgttctcaaggccctgtatgatggggacgtcctggatgaagaagtgataactcagtggtataatgaatctgttgctggtggcaaggagtcccaggtggtgaagaatgccaagccgttcgtggagtggctccagagcgcggattctgaatctgaggaagagtgatgcgccgaatctcctcccaatcatcgcctacttcgccttatcgtcttttcagtatttcgttcgtcatgagtatttccagttcgcgtcatgagtgcttcgagtttgtttgtgctgtgcgctttcttatctgtaatgttggtcaataaataaacccagagtcccagacagtcctcagagactatgtggtgtcacactccagctggagatctttttatttatcaaaccttaatgtgtttcacgtgtc

SEQ ID NO: 14285 - DNA, 1964 bp, Oryza sativa
  ref <308>: DATABASE ACCESSION NUMBER: AK064895
  ref <309>: DATABASE ENTRY DATE: 2001-12-06
ggtttttcccactcccctctatccactgtttccgccgccgccgccgccgccgccgccgcccgccgcgccggcgttctccccccgccgacgaagcacggcgtggagtgtagacgcagcctcctcgctctctctcacgccggcgagcagggtctggagccaggagcgacgcggcggccggggccggggcctccatctcggttcgaaccgcactgaaggtccctccctgcattagggcgcacaatggcactgacccttctcagagggatgcgaacgccggttgtagctagaaggaatgctggcttgttcttcaccacattgcagtctccgttgttgtcccgcttcacgatgagagcggagagcgcgcgggccgcagcgcccaagtcgattcagctggcgaccaaggaggcggcggagcagaaggcgcagggcttcgaggcggtcatcgggatcgagacccatgtccagctctcgacggtcacaaaggcgttctgctcgtgcccgtacagctacgggtcgcagccgaacagcaccgtctgccccacctgcatggggcaccccggaacgctgcccgttcttaacgcaaaggttgtcgaatgcgccgtgaggttgggcctcgctctcaattgcgagatcgcgatgacgtccaagtttgatcggaagcagtacttctacccggacctgcccaaggggtatcagatttcgcagtttgacattcccattgccaaggagggttaccttgatttggatcttccggtggagttcggcggtgggcataggagatttggggtcacaagggtgcatatggaagaagatgctggcaagctgcttcactctgaatccgggagttactctcaggttgacttaaatagggctggcgttcctttacttgaaattgtctcagagccagatatgagaacagggatagaggctgccgagtatggtgctgagctacagaggcttgttaggtacctgggcgtgagtaatggtaacatgcaggaaggttcccttcgctgtgatgtgaatgtttctgttcggccaattggacaatcaaattttggtacaaaggttgaaataaagaatatgaattcattttctgcaataagtagggcaatagattatgagatctcccggcagattcttcttcataaagaaggtcaggctgatcaaattgtacaagaaacccggctgtgggatgaatcttctcagaaaacttttacaatgcgaaaaaaggagggacttgctgattatagatattttcctgagcctgatcttcctgaagttgttcttactagtgagtacattgatgaaattcaaaactcaatgccagagcttcctgaagcaaagcgtaggcgcttcgagaatatgggactcagcatgcaagatgttcttttccttgctaatgacgataatgttgctcggttcttcgattctacccttgagcacggcgcggatgcaaagctggctgccaactggatcatgggtgacattgctgcttatttgaaaaatgaaaaactttccattgatgaaattaaattaacacctctggagctttctgaattgattgcatctataaggaatggaactatcagtgggaagattggaaaggagattctgattgaactcattgcgaaaggtggaactgtcaagtctgtgatagaggagaaagatttggttcagatagcagatcctgcagcaattgaggcaatggtagatcaagtattagctgataatccaaagcaacttgagcagtatcggtccgggaaaactaaattgcaaggattttttgctggccaggtgatgaaagcatcaaagggtaaagctaatcctgttttgttgaacaaaatcctcggggagaaattgaaggccaatagttgagggggtttgtcgacaaacggagactcatgttgtagtccacgagtggacaatcgaactaaaccctgcaatttggggtctatttttcaatg

SEQ ID NO: 14286 - DNA, 753 bp, Oryza sativa
  ref <308>: DATABASE ACCESSION NUMBER: AK064896
  ref <309>: DATABASE ENTRY DATE: 2001-12-06
gggtggtctactttatccagcgttggaaacccgctcctacacacacacacacccactaccgctctccgcaattcagccagactgcagttgcagcaacagcaaggatggctggtggagtcggggaggcgctcgtgtccgccgtgctgaaggaggtgctgggaaagcttggctccgccgtcggggaacagatcgtgatgcgatggaacctgaagcaagatctggagagcatcaagagcaccctgggtatgcttcaagcggtgctcagggatgccgagaggcgctccgtgagtgacgaaggcgccagcctctggctgaagaggctcaagaacgcggcctacgacatctccgacatgctcgatgaattcgaagccaagttatcggaggtaaaaaagtgtcctcccgctaggatgtcgtccttcacttcagttttatgcttatctatgctcctcccgtcaaaaaagatttgacatttaggacaatatttagtagtctcagctagattccctaaggctttgttcggtttagaggggattgaagaggattggaggggattgatggggaataattccacaccataataggtgtggaataaatcccctccaatccctctctcatggggttaaccgaataaggcctaactggtttatagtgcccaacaagcaaatagaggttttgcagcgtgttccaatggggcaactgctcatttgcctttgtactgttacagtcatgttcaagagcaagtttttcctttcc

SEQ ID NO: 14287 - DNA, 2314 bp, Oryza sativa
  ref <308>: DATABASE ACCESSION NUMBER: AK064897
  ref <309>: DATABASE ENTRY DATE: 2001-12-06
gcctctccttctctcgctctctcctctttccttgcgacgggcgacagccgccgcccggtctttccctccacctggcttgcttctcctcgtcggcgatgatctctcccacaccacaacacgccatcctctgcttcctgctgtctcatcgcccctctcccactccgtcgcagcgtcgctgccccgacccgaggatgcaccaccttcagatctggcggtggctagggtttggcttggagtggtggcttgcagcaggccggacgcgggtgcgcagcggcggtgcagcagctggcgcagtcgcagcatgcgcaaggcagcaggtcgccggtgcggacgcgcggaggcagcgtcgacgcgcagcgtgcgggcgcagcagcagctagcaacagcccagtgcacgggcgcatggtcgcgtcctggtctgctactgctactctactcaagtgctcacatgctatttctaatcagctaatggcactaataagtgagtattccctatttctctgtagcatttaggtagactctggactctaatctatttatcttttgaatgagaaacagagccttctatttaatagttttttatttactgataaacttgcaagagagaagaaaacaacattgtttaactactttacaaacccaattgatgagagcacaaaccaaccaacaagattcgaatagattttgatcctaatgaaattcttttcagcacgatgaatgacaatggaggatatgttggtggatgcagttacatttgtttctttggtttaagatttgtttccgttgatttgtcactaatttgctactttgcatatatagctggctgctcacttgacttttggctaaggcctaaaagaatgcactttgtgctggcaaagtactccttttttttttcttttctatcatgtgaacatttaatttgacttgtaagaggaaggggaaaagaagggagtaagaggcagtttggtctcagaagaatgcacttttttctttaccctgcctcttacggtttgtggctgcaatggctagcagtgtatctggttcaagaagtcttatcgacgttgttccattcttctgatgaccacactggatctggtcatttgttgcatgatagaggatccatcatggtgtattcatgtagtcattatctccatgctttccttcatgctcagtgaatggagactgaagactgaaaactggttggtgctcttgcaggtgagattgaagatataaaattggtcagggctctggtaagctttgtaatggagaaattttgcagctctagctgtttgtttcatagcttctcaaattgctgggaaaaggtagagatgaaaacatgatggctagagctacagtgtggaccaatgatggcacttggagctgggtaaggaccattgatgatactagaatttagagatgtgtttgcgcatgctatactctacatgttttatatttccattgccttttttttccttttcttttttcatttcttcttgaaggtattgggtcagagagagccaacttaggttttagtgtacctttatattggtaaagtcacttggttattcaatctaggtccagagttcggaatctgaactacaccttatcttggctgtataattaatgggccccggtgagtaaatcgttgagttctgtaccgtgactaaagcgatgcagagtataagaaattcagaataaaaaattcagaaattccagtcataaattcagaatcagaaattcctaacctcgagacatggtcaaaactaattaacaagttttaaggaatcagtgttgaggttgtgttctgctcttaatgtttgttttaatccatttttgcagtacctgcgtgactattccatattttctgctactggatagaggcctttgcagagtacctccgtcggtatggaagaaaatgtattgttaccgagttatacggagtatttgttattccattggatatacggagtacaacttatctgtgactgtgaccacatgtgcataagttggtttaaaactttaaatgggcttccctgaagacatcgtgaggagtgctctgaagattgtcgacggcgacgagaacatgattcttgaaaagctctgctctgtctgaggccctatggtcgatatgaactgtaaattaaatccccatttgtaataagacaacagtgcttgctaatgctcattttctgtcttttcagtgtgccctttatgacacctgtaaaacctattagcttgaggcacacattatttttgttacaagtataatggttatgcccatgaataaatggaaatggtgtgaattgaggttaac

SEQ ID NO: 14288 - DNA, 932 bp, Oryza sativa
  ref <308>: DATABASE ACCESSION NUMBER: AK064898
  ref <309>: DATABASE ENTRY DATE: 2001-12-06
tggagccaaacgtgagcccgctacactgacaacaacaagctcatcgccaacccgctactgaagcagcagcctaccagcaatggcgttgccgctgctcaagtcgtccccccacttctctgctcttcactccgcgaacagagcccagctccatggccgctgccgtgcaacgctcggtggattccatgacccgaggtccaactccagccgttgcaagaaatcggccgggaggggttcagtgaaggcgaacgcgtccccgttggacgtggtgacgctgatggtgacgatggtggagcacgtcgacctgcagagggactacgtcgtgcacaagtcgatctggcatctcagcgacgccgccctcaagagcgtctataccttctacgccttcttcacagtctggggcatctgcttctttgcgtccatgaaggatcctttctacgacagtgaggcgtacaggggacaagggggtgacggcaccgtgcactggtactatgaccggcaagaggacctggaggcgtctgcaagagaggagctcctgagggaggagctactcgaggagatcgagcagagggtcggagggctcagagaactcgaggaagcagccaaggaggagcagcttacaaactgatggatgaatgagagattgcgcatggatggatgactgcatgatcatggcgcgatgcggctgcattctgtaataccgtacagagcggctgtgtaatagcaagatacacagttgcctgatagcgcctgtaaatgttggcatcagactcaaaaggaaagcaaataggtgctccgtctgcatgaatgcattatattgcatttgtagtgtaggctaaaagaaggaatgtactactccatgttaatcaaagaacctgtaccgttcaccatggtggatattgcttccaaaatatataaattgtgtaaatcgactg

SEQ ID NO: 14289 - DNA, 2429 bp, Oryza sativa
  ref <308>: DATABASE ACCESSION NUMBER: AK064899
  ref <309>: DATABASE ENTRY DATE: 2001-12-06
ggattagcttgtacagtttgtcctcgagctctcgaccggctccggcaatggcgtccacggacactgagcagcaggaacacgcagtggcgctgctacaacccgaggttgaagaagcatacaccactgatgggtctcttggcgtcgatggcaacccggcgctgaagcatcgcacaggcggatggatggcatgccgcccgattcttggcaccgagttctgctactgcctggcctactacggcatcacgttcaacctcgtcacctacctcaccgccgagctgcaccagagcaacgtcgccgccgccaacaacgtgtcgacgtggcaggccacctgcttcctcacgccgctggccggagccgtcgccgccgattcctactggggaaggtaccgcaccatggtcgtcagctgctgcatcggcgtcgctgttagtcccctccatttcattcgatccgggttgtgtttagttccaaattttttttttcaaacttctaactttccatcacattaaatttttcatacacacaatttttttcagtcacgtcgtcttcaatttcaaccaaaatctaaactttataccaatctaaacacagccttaattagaattagtcactgtgtccttcctgccgtgaatttatggctgatggcaagtaatcagtcactgtgtgggatgtggatttttatcccttgagagaacatttaattttatattaatattaatttatgttaatttatgttgtcatttaattttatattttatattaatttatgttgtccattttttttaatttttttatgactaattagttggcatggatgaaacgagggatatttcctggagggatgaaatcactttccccactgtgtgctgccatgaatgcaaatccaatcagcttcatggctgtacgtacctaatctgtggtgcagggcatgctcatggcggctctgtcggcgcttctgccgctgctgatcaaggacacgtcgtccatggcttcagctcaagtgatcatcctgtttcttggcctgtacatgatcgcatttggggtgggtggtctccggccgtgcctgatgtccttcggcgccgaccagttcgacgacggcgacacgtcggagcgcatcagcaagggctcctacttcaagtggtacatcttcaccatgaactgcgcgtccgtgatatccaccaccgccatggtgtgggtgcaagaccactacgggtgggcattggggttggggattccggcgatggtcctcgccgtcgggctctcctgccttgtcgccgcgtctcgggcgtacaggtttcagacaacccgcggtagcccgctcaccagagtctgccaggtcgtcgtcgccgccgtccgcaagttcaacgtcgcgccgccggccgacatggcccttctctacgacctatcggaggatgcctcctccatgaagggagttcagaggatcgagcacaccgccgatctccgattcttcgacaaggccgccgtcgtgacggcgtcggacgaggaggcggagggcgccgcgccgcgcaatccatggaggctttgcgtggtgacgcaggtggaggagctcaagattctcgtcaggatgctgcccctgtgggcgtgcgtcgccttctactacaccgcgacggcgcaggccaattcgacgttcgtcgagcagggcatggcgatggacacgcgcgtcggctccttccacgtcccgccggcatccctggccaccttccagatcatcaccacgatcgtgttgatcccgctgtacgaccgcgcgttcgtgccggcggcgaggaggctgacggggagagagaagggcatctccgaccttctcaggatcggcggcggcctcgccatggccgcgctcgccatggccgcggcggcgctggtcgagacgaggcgcgcccgcgcggcgcacgccgggatggagccgacgagcatcctgtggcaggcgccgcagtacgtgctggtgggcgtcggcgagctgctcgccaccgtggggcagctggacttcttctacagccaggcgccgccggccatgaagacggtgtgcacggcgctcgggttcatctccgtcgcggcgggggagtacctgagctcgctcgtcgtgacggccgtgtcgtgggcgacggcgaccggcggccggccggggtggatccccgacgacctcaacgaggggcacctgatcgcttcttctggatgatggctgggctcggttgcctcaatcttgtggtgtttacgagctgtgccatgaggtacaaatccaggaaggcctgttgatacttctgggcttgtttggtaggctcgaaattccggcccatgcactctgacgggccattatgtatgggaataagtccatccgacctccctcatctcttgcacttggtcgaatcgcatccctcagccgcaaaaaactgggtaaaacgcctcctgaatctccc

SEQ ID NO: 14290 - DNA, 3181 bp, Oryza sativa
  ref <308>: DATABASE ACCESSION NUMBER: AK064900
  ref <309>: DATABASE ENTRY DATE: 2001-12-06
gagattctacttggtcggagtttcagcctccggcgaactgctccgatcgatcgatcgctcgctcgcggggacgcgacgagtatcatcgcctgccattgtcatcatcgcataggagttcccaactgaagaattgctaccttcctaatttaaggaaggaggtctcgcattggacaagaccagccacgccttccttgtcgctatatagtgcaaggcttgccagcaagaggacaacttgttccgttgcaaccgagccgccgccttccacaaccgaagaaccagagatggatcttccaaaggagatattcctgaaagaatacaaaaagcctgattacttatttgactcggtcaatttggaatttcaacttggcgaagacaaaacaatagttacatctaaaatagctgtatctccaggaactgaaggtacctcctctccacttactcttcatgggcgtgatctgaagctgctatcaatcaaagtcaatggcaaggaccttaagagtgaagattatatggttgattcacgccatttgactgtttcaagaccacctggtggtacattcaacttggaaattgttacagaaatatatcctcagctaaatacatcattggagggactttacaagtcaactggcaatttttgcacccagtgtgaagcagaagggttccggaagattacatactttcaggatcgtccagatgttatggcaacatatacttgccgtatcgaagctgataagacgttgtatccagtactgttgtccaatgggaatcttatagagcagggggatcttgagggtggcaagcattatgcattgtgggaagaccccttcaagaaaccaagctacttatttgctttagttgctggtcagttggattgcagggaggactcatttactacatgttctggccgaaaagtaacacttagaatttggactcctggtcaagatttagcaaagacagcgcatgctatgtattctcttaaagcagctatgaagtgggatgaggaggtttttggccttgaatatgatcttgatttgttcaatattgttgttgttccagatttcaatatgggagcaatggagaacaagagcttaaacatatttcaatctagacttgtgctggcatcaccagagacagctactgatggggattatgctgcaattttaggtgtcgttggacatgagtatttccacaactggactggtaatagagtgacttgtcgtgattggttccagctcactctgaaagaaggattgactgtattccgggatcaggaattctcatcagatcttggttgtcgcacagtaaaacgtatagccgatgtttctaaactcaggacctatcaatttccacaggatgctggccctatggcgcatcctattcgtccgcattcgtatatcaagatggacaatttttataccgtaacggtttatgaaaagggtgctgaagttgttagaatgtacaagaccatgtttggagcttcagggtttcgaaagggcatggatctttacttccaaaggcacgacgggcaagctgtgacttgtgaagacttttatgctgcaatgtgtgatgcaaataacacccagctgccaaactttttacaatggtactctcaggcaggtactccaactgttaaagtgagctcttcatacgatgcaagttctcagacattttctctgaaatttagtcaagaagtgccacctacccctggccaaccagttaaagagccgatgttcattcctattgctgtcggacttgttgattctaccggaaaggatatgcccctaacttccatttacagtgatgggatgctccaatcactcactagtgatggccagccagtcttcactactgttcttcaatttaataagaaggaggaagaattcatatttaacaacatacctgagaaaccagtgccttccttgttgaggggatacagtgctcctgttcgtcttgattctgatctgactgagagtgacttgtttttcctacttgccaatgattcggatgaatttaacaggtgggaagctggtcaggtgctgtcacgtaaactgatgctcagtcttgtagctgacttccagcaacagaaaacactggccctgaaccctaaatttgttgatggacttagatcaatcctgcggaacacaagcttggataaagaattcattgcgaaagcgataactttgccgggtcaaggggagattatggatatgatgccagttgcagatcctgatgcagttcatgctgtccgtacctttattaagaaggagcttgcccttcaactcaaagatgaccttctttcaacagtgacaaataacagaagttctgaagcttatacatttaaccatgatagcatggcccgccgtgcattgaaaaacacatgccttgcttatcttgcatctctgaatgaaccggacaccactgaacttgcatttgttgaatacaagtctgctactaacatgacggagcagtttgctgcactagcagcattgtctcaaaatccaggccaagttcgtgatgacacccttctggacttctataacaaatggcagcatgattatttggttgtaagcaagtggtttgctcttcaagctacatcagacatccctggaaatgttgctaacgttcaaaagttacttggtcaccctgcttttgacatgaggaatccgaacaaggtgtattcgctaattggaggattttgtgggtcccctgtgaatttccatgcaaaagatggctctggttacaagttcttgggtgaagttgttttacagctagacaagataaatcctcaggtggcctcccgcatggtgtcagctttctctcggtggaggcgatatgatgagagcagacaagctcttgctaaggctcagctggagatgatcgtgtcagccaatgggctatcagagaatgtgtacgagatagcttcaaagagcctggcagcttgaataatcccgtgagtgaacaagtcagtcggtcctgcctctcatcacatgacatccacacagggtgctaaaagtgtagttaaactgaatatgtttatgtggcaagagtaaaagaaggctgcttttagactggtacaaaactctgttgcttatagtatcgcagaccccaaaagtaatgcaattctttcttacgcgatggctctatctggaataactggactgatagagtttcttgcagt

SEQ ID NO: 14291 - DNA, 2953 bp, Oryza sativa
  ref <308>: DATABASE ACCESSION NUMBER: AK064901
  ref <309>: DATABASE ENTRY DATE: 2001-12-06
gcagggacacctggccaccgccggctcccctcccactgcgccctccccaccgccagatccggcggagggaaggacaccgcccctatccgccgcctcccctcccaccggaagggtgggcgccaccgcctgccgccgcacgccacgatcaagccctcccgcggccccatggcgagggagaggaggcgaggggcagagaggctccaccgcccgtctcacggaaagagagccgctgacgccaaggattagcttgccggccgctgctcaccactgctcgccaggcagccttggcacaggatcgcatgtagaaggagagggagagaggaggcaccacggctgagtcgccggctcagggcaagggcaccgccgtctcaggggaagggtgccacggggagcgacgccgccatggggggagggacggagatggaggggagaagaagaaaaaccgagaggaggagagaaaaactgagaggagaaggaaaacgagataaggatctgcggaagactcgaggcacgcggcgctctctctccgagcggtaaaaaaaaagtcaattgtgttacttgtaataatcatagtctaagcaggggttaagataaatcaagtgtagagtgacatacaagcagggagctaatcattctcatactaaaatatctaagctaagtggaaagaaaatagaaagagaatctattcctatacttctagtatacataatatacatacattctagttatatgattaactagctaataccctctttccgatgtcctcctagtatttcgagaagccaccccttactgccgagttccttacgacagcccgtcatgaccatacaaccgaggctaaatacggaggagtaccctccccaggaaattaactaaggactatatacacgcacaaaggaatacccgtactgagctatcaccatcagcggcccatctctcatccgcagcatataacccaaataatgatatcccgtaatctagacaccacgcctaaactactatatactactctaatatcatcgtcatgacatagagtaattgcataagcaaacattatacccgtacctatgcatctcctagataagctagcagtataatcagtataacatgaacataatataaaattggcattcatatactcggaaagtatttcaataccataaatatataaagaagagtattctaataacagtacaaagcttacaaaagaggaaatgaaagctactatagccatacccgaactcttccaaaggcttccggactccaatttctattctattcctactccattagcttaagaacactaaactaaacttgagagaatatgagagagcttttcttgaggtgtgtgtatggagtaaggaggtgaagcccttttatagctgataatgacggttgtggcagttggaaatgtcctaactgccctgcaaccatcattgaggatgaatcctggacgtcgacgcaaaaccccaggatggacggcgctgatgggggttcggccgaaccatgggctgggccaaaccagcccatcctcggctggcggcctcctccactgcttctttccacaaacttgtgaattttggcccaattggtcgtgtcatttctgagttcttggcccattcatacataagtctgatccttgacatcgtctgattgatttatcgtctaatttcatgttgattctcctccactttatggttattctctgcaaaaggttagtagatctaatactagtggaatattattattctaacacaaatatgcattgcaagcataactagttctcctctattttgataatattgacggtcgaaactaatcgctaacgatcgtcaacataaatttaccactttttaatcgttattgcaaaaatgaaactacaaaattacaaaaataccactagaactgtaattcgagtggcatccttacaaaattgaaaaaaacggtggtaatttgcaaatgcccttaaaaaaccacttataacttagtgctttatttataaaaaggttatatcttattttaactacttaaaaaatagtaatttttcgttcgtcacctaattctttcatccttaaatctgttttttggccatacgcatatttgtgttggcattcatccgtcattcctttctcgcaatccgatctgagcgacgcatccagccaaggcgctactaaaatgaagggaaaagcaaggatggattcgatttagacattgaatcggacaaataaccacaataaaatccacttggagggaaccaggagattgcaatccaatgaaatcgatcaatcacctggtactttgcatcggcactgggcatcgttcccctaccggatttctgatcacgacatgcatgctcacgcacaccatgaggtgtctgacctcgtggcgcgcgacagctgccacctgctcgtcgcccacgcctcctccatgccgcctccggcccccatgtcctcgtcgtcgaggcgtgccacacacgacatcacgagcagtggcgagactcgccatcagagcacctacctcagtcgtcgctgctgccgccaccaccacgcgtcgtccgcactggtgtatctggctcaaatgttcaggcatgcagatctaaaacaagtattgcttaggctttgttttctcggaatgagatcaaattgatcgaggctttgggtcggataggatcctcgatttttccatctcctatatggcttccatgattatattctcttgtattggagatcctacatgtctctgtatgcaattatcagactaccagacagtatagctaattcttggtagcttatcatataaaaataacaataaaaaataaacatatttttaattgttattaaaagaggagtgcattgaggctctatttgtctagacttgacaatatgagacaatgtaggatttgattaatcctattattaattgcaaaaatgagactgaaagagtattttggatt

SEQ ID NO: 14292 - DNA, 2329 bp, Oryza sativa
  ref <308>: DATABASE ACCESSION NUMBER: AK064902
  ref <309>: DATABASE ENTRY DATE: 2001-12-06
gaggatcccgtcacctccaaaagcccaaaaagctcccgaaacgccaggaaagcggaaggtctcgttctcctcctctccccaaaaccaaatccccctctccgaaaatctccaaaaatccagcgaaaaccatccgatccatcgatcgatcgatcgccgcaagactgcttcgggttttttttgctcttgctccgatcgactgcgtgcgcctcgaatcgaaatctcgagtgatatcacgcgggagttgatccagacttaaaccggattgcctgagaagttgatgggatcgcgcgaattctcggcgctgacgtgagatcgtgaaagggttggacatcaaattgctaggaggttgcggcgatttggctgcacgactgcatgaactgtttcgtgaacctgggactcaactcgaactcgaaccactacgtggcctgcctcatcatcttcctgctgcatttctccccgcagtttctgttaaatccatccaattgtaattcgaattcgagtagtaatcgtgaaggagagaaacagaaccccaacaatggcgaacaacagttcatatggtgaaaatgttaggagaaagtcccacacaccttctgctattgttatcggcagtgggtttgcaggcattgctgcagccaacgctctcaggaatgcatcatttgaggttgttcttctagaatctcgtgacaggataggtggtagaattcacactgattactcttttggctttcctgttgatctgggagcatcctggcttcatggtgtttgtgaggaaaatcccctggcaccaattattggaaggcttggacttccactgtatcgcacaagtggagatggctctgtgctgtttgatcatgaccttgagagttatgctctctatgacactaagggccatcaagttccccaagagctggtagaaaagatagggaaggtttttgagactatattggaagagactggcaaactgagggaagaaactaaggaagacatttctattgcgaaggccattgcaattgttatggagagaaatccacacttgaggcaagaagggattgctcatgatgttcttcagtggtatttgtgccgcatggaaggttggtttgctactgatgcggacgcaatctctcttcagggttgggaccaggaggtactgcttcctggtggccatggtctcatggttcgtggatatcgtccagtaataaatactctggcaaaaggcctagatatacgccttggccacagggttgttgagattgttcgccacaggaatagggtggaggttactgtaagcagtggtaaaacatttgttgcggatgctgcagtcattgctgtccccttaggtgttcttaaagcaaacaccattaaatttgaacctaggctgccagagtggaaggaggaagcaataagagaactctcagttggagtcgagaacaaaataattctccacttcagcgaggttttctggcctaatgtggagttccttggagtagtttcatccaccacatatggctgcagctatttcctcaacctccacaaggctactggccatcctgttctagtttacatgcctgcgggtcggcttgcatgtgacattgaaaagctgtcagatgaggctgctgcccaatttgccttctctcagctgaagaagatcctgcccaacgctgccgagccgatacattacctagtgtcacattggggctcagacgagaatacacttggatcctacaccttcgatggggtgggcaaacctcgtgacctgtatgagaagctgcggatcccagtcgataacctattctttgctggagaagccaccagtgtccagtacactggcacggtgcatggcgccttctccactggtctgatggcagctgaggagtgccgaatgagggttcttgagcggttcagggagctggacatgctggagatgtgccaccctgcaatgggggagcagaccgccactgtctcagtcccactgctcatctcccggctgtgaacagaccaggagctgcacaaaaattatagtcttctaaggccatttggcacttggcacccggcgagcgcactaagccattcccctgattgctcgaggaaggcagcattggagcaattatcttatttgcttctccttggcatgaggagtgtgctggtgcagcttgcggtgcgctaaataaagtcactgtgaaaatggagtgtgggagtctggtgtgtattgttgagtataaaatgagggagtcaatatgtagttaagcagggattacggacaatgtgagccatcattactgaacaagatggtgtatgtgtgacgaacaattaatttaaacgatcgatattg

SEQ ID NO: 14293 - DNA, 1647 bp, Oryza sativa
  ref <308>: DATABASE ACCESSION NUMBER: AK064903
  ref <309>: DATABASE ENTRY DATE: 2001-12-06
gcccttttcccctcttccccagctcctttgttaggttttcttccagtgagctctttttgctcatattcagatcttcacttatttcctagttgttactactgcctttgagtattgacagcttcatcctgccaactcagctcaatcttcctctgaagtttcagtctttgtttctgaatctcttcagtgttcagaggggaagttctgccaaaaaatttctctggccatccattttccaaggggagattctgccaaaattttcatctctgtccatcaatattcctggggaggttctgccaaaattttctctgaaatcggttaatttataaggggaggttctgccgaaattttcgctggtcatcaatcttccctttgttgacataccctgcataagtatatacaacaaacatataactttttgcaaggtaagaaggagtttttatctgttcttgatgatagactcctagagaagttgtcctagttgtgtagatgttgttgctcatcatccctgagcacctcctctctagatttatgactggcccagccataacccagcttgttcagtccttctctgttgtcttcctctactggttctatgtcttctcagtaagctccctgtttgtagccttttgaaattacaagacttatttatacaacataattatcaaggcatccacatataaactacaaggtatatatatatatatatatatatatttacaaaaagaaaaggaataagagggagtaaaattgttgccggtgcgaaaaaaaattgttgagaggtgaccatgtcgagtgggacctcgtccgggtcgagccagggaacccggagctccaggtcggaagatgacctgaacctccaggcccagatggagaagaagaggaagaggaggaaggagtcgaaccgagagtcggctcggaggtctaggatgaggaagcaacagcacctcgacgaactcacctcgcaggtgaaccagctgaagaatcagaaccagcagctgagcatggcactgagcctgaccacacagaaccttgtggcagtgcaggcacagaactcagtgctgcaaacccaggagttggagctgcagagcaggctgtgtgccctaactgacatcctgatgtgcatgaacaacaccagtgctactcctactcctacaattccagccaccactacaagtgcttgtgatatttttggtgccagctcatggaaccagccacccatagacttgtaccagtaccagtgcttctgatctaggaataagaagagggttgttgtggtagtgtgggtaggaccagaagccatcaagtaatgtttcaatcatgtagggccattgttgtcactgttaatgtatgcaattcaatcttaattgcctgctgtaggggacagggatatttgctctttcttgtagctgttggtggtagagggattaccagatggcaaaatggtgctttggcaatgtgttaggtggggctggttttggttgttaagggtagggaggagaaaattggtaggtttttcttgagcatgcaagaggggaggcaaaggattttgtgtaatgatgctcttcaaggaaagtattcataattatgattataatgtaatatgtggatttggtggatcttcataggccaagtgcttctttgtgctcc

SEQ ID NO: 14294 - DNA, 1182 bp, Oryza sativa
  ref <308>: DATABASE ACCESSION NUMBER: AK064904
  ref <309>: DATABASE ENTRY DATE: 2001-12-06
gatgtctctggtatcttccgagcacaagaaatctggaccgtccgttccgtcaccgactcccgtctctcccctctccgtggctctctctctccacgcgacgcgctctctcgtttcgtctcgtcgtcctcccggagcgaccgcctttcgccctccctccatggcgtcgacggatgccgacgaggaccagctcctcaagagcttcctcgccgaggtcagcgaggccgaacgcgacaacgaagtgctcaggattcttggttgcttcaagttaaaccctttcgagcatcttaagttgtcatttgattcatcagcagatgaggtgaagaagcaatataggaagttgtccttgttggttcatcctgataaatgcaagcatccgaaagcacaagaagctttcgcagctctggcaaaagcacagcagctcctacttgatccacaggagagaggatatattcttgatcaagttactgctgcaaaagaagagctgagggcaaagaggaaaaaggagctgaagaaagacagcgcgtcaaagataaagtcccaagtagatgagggaaaatatgaagagcagtatgaacgatcagaagaatttcagaagcagctaataattaaagttcgtgaaattttgacagacaaagagtggcgtcgcaggaaaatgcagatgaggatatcagaggaagaaggaagactgaagaaggatgaagaggaaacaaaagaaatgtggaagaagaagcgggagcatgaagagaagtgggaagagaccagagaccaacgagtctctagctggagggattttatgaagacaggaaagaaggcaaggaaaggtgagatcaaacccccaaagctgaagaccgaggatccgaacaaatcttatgttcagaggccggtgaagcgtgcttaagaggaatgatgttagtctttgcagccaaagcatatctacagtaaccattcttcttgttacccgatctaagctttatcctatcaaagctcctggcaggctgtaaggttcggttatgccttccgtgttcccactgtagtcagggaacataacacatctttgttagcagaatggcttcatgttctctacatagagttgtattggattaatgtacctcttggatataacacattcctggaaaatgttgaaaaaaatatgtgaaaaagaaactcatcgaattgaatgcc

SEQ ID NO: 14295 - DNA, 2391 bp, Oryza sativa
  ref <308>: DATABASE ACCESSION NUMBER: AK064905
  ref <309>: DATABASE ENTRY DATE: 2001-12-06
tgtcttctacttactcctctttcttccagcttggccggcgtgtggctgattattccagaatttccattagcttaatcaccggatcaagaagaatgagagaaaggggggagaggctcttttctgtgggatgacagattgcgttttgtaggagcagcgcaccatttcagatttcttcctcctcctcttcttctttccgttgtgcttgctgcttttctctactaccttttccactgttgcgaagtcgggttggtgggtggttgattgattgttctttccttcctcgtgagggttcttgcttcttggcttcttggccgcttcttgagttggggctagctggttcttttgctgtctctgtcccgtcaaactgaagcgagcgagagattgaccgggtgggtgattcttcttcgaggagcttcttcttggagctcgtgagagtggagtgatcgaggtggtggtgtgagagcagtagacaggtttttcttggggagcttggaggtagccggagttgggggaggaggaggaggatggccgccgcgccgccgcccaaggccgacgagctgcagccgcacccgcccaaggaacagctcgccagcgtgtccttctgcatcaccagccctccgccatggcccgaggccattatattaggattccagcatttcattgttatgctgggcaccactgtcatcataccgagtgcacttgtacctcagatgggaggaggaaatgatgaaaaagctcgggtaattcagacgctgttgtttgttgccggaataaacaccttgttccaaacattcttcgggtctcgtctccccgttgtgatgggtggctcatacactttcgtcgcaccaaccatctcgatcattctggctggacgttacaacaatgaagcagaccctcgtgagaaattcttacggaccatgaggggaacacaaggtgctctcatcatcgcgtcgacgattcagatgatacttggtttcagtggtctctggcgcaatgttgttaggttgttgagtccattgtctgcggttcctcttatttcacttgttggatttgggctttatgagcttggttttccaggggtagctaagtgtgtggaaattggtcttccagaactcatcctacttgttgcattttctcagtatttgcctcaagtgttacattttgggaagcctatctttggccggtttggtgttcttttcaccgtttcgatagtgtggctttacgcgtacattctcacaattagcggtgcttacaagaatgctccaccaaagacacaggtgcattgccgtgttgatcgctcaggccttatttcaggagctccttggattagagttccttatccctttcagtggggagctccaacttttgatgctggtgaagcctttgcaatgatgatgacttcatttattgctcttgtggagacaactggagctttcattgctgcttcaaggtatgcaagcgcaactatgatacctccatcaatcattagtcggggcatcggttggcagggaatcagcatcttgattgattctttttttgggacggccaatggaacctcagtttcagtggagaatgttggtttactcgctttgacacatgttggcagcaggagagtagtgcaaatatctgctggtttcatgatcttctttgctatccttggaaaatttggagcacttttcgcatccattccattgcctatatttgcgggcatgtactgtattttcttcgcttatgtcggtgcatgtggtttgagtttccttcagttttgcaacctaaacagcttcaggaccaaattcatcttgggttttgctttcttcatggggatctcagttcctcagtacttcaatgagtacacggctgttgcaggttatggaccagtgcacactggtgccagatggttcaatgatatgataaacgtgccgttctcgtcgaagccgtttgtcgcgggtcttgtggcctacttcctcgacaacacgatcgagacgcacaataacacggtgaggaaggatagaggctaccattggtgggacaaattcaggagcttcaagaaagacgcgaggagcgaagaattctactcgttaccgttcaatctgaacaagttcttccctgctgtctgaatgatctagcaaatgtcacccaagcaaaaatggttcatgtctgaacataattctgctggccttcttcagtgttgctgtgcgtcagttttgtgtacttataataggcgaatcttactaattggacaacggagatgtgccttagaatgggaatatcatgtctatttttttgtcctacaatgatttatgtgtcattacctaggtctttctcttatcaagttgtcaatgacccaatgtacatgtggcttttctatcggatagtattagtatcacattt

SEQ ID NO: 14296 - DNA, 2433 bp, Oryza sativa
  ref <308>: DATABASE ACCESSION NUMBER: AK064906
  ref <309>: DATABASE ENTRY DATE: 2001-12-06
gcgcttcaagagagatggaggggagcacaggaggcgtagacggtctcaccggcgctgctactggcgacgtccatggaggacgacggaggcagccaggcgggcagcatcgacatatattcatccgactctcgccgagagcatcgagactcatccaccccgacccgtcgccgtcatccacattcatcaacatccatctcagagggactcatctattcatctacaatcactcaacccccgtcatagcaagaagcgacatcaaggaggatcagtccggcaagtcgacaccggccgaccgcgcgctgtgtccatctacatcaacaccttccgtcggctggggagcaggatcgcgaggaagaacagcaagctaatggccactactgtgcgtacgtgcatgcatggaggacggccgggtgtgctgccatcgccggagtcgtcgtgtcgaccgatctgttggtgctgatcgatcgcaagcctccgtcaagatcgatgccactcgtcctcaggactgagctcatctgtttttgctgccggtgatgattctactcgttgcgacgatcttgccgagacgctggacgtcgccgccttcgctaactgctgcctctactcggcaacaccaccggcccgtcgccacgcagcgaggacaacgcaccacgtcgtgctgccgggaatcgtccgagcaaccgcggacgtcaacaagccgtgccaatccacggaatctcgccggagaagacgatgacgccgctccttctaggacgatctcatctaacattgtccagttcttctcctgtttatctctctctctctgtatttcaggctttcagcaatcagcacatatatgcatcacaccatgtcatcgtggagctgcggccggagtcatgcatggcgtcactcgcgagggcagaaggcacagatgaaggtcatggaggagaaaaccatcggcgtcttgctctgacagccgccccgcctacgcaacctcgccggagccgccgtacaggatcggccctgcaataggagatctcgccagcaataggagtggtgcacgccggcaacgactcaggacgagatcgagatcaagagcggcgtgcttcatcgcggcgccgacgcagcctcgccggagcagccgggcaagaccggctcagcgggaggaggcctcaccagcgaccaggaagccggcgctaaaccacgggcatcggcaatctccgcaccatgggtatagcctcttgagtctctttgttttcttctctttcggttcaggtcgtcatgcatgcacgagatggcgacgaggcgagttgctgccggctgctgcttcctcctggagatcgtgtcgttccctctcgtcggagacgccgtccgccgatgacacgtctatctgccgccgggacgtccccgcctcgccggtcacgagacctctacctcgcgacgtctctacccggcgacgtgatgctgtcgagacatcgctttgccagttgcagtctcttcgcgacatcatcgatgctcgcttgctctcgcggacttggccattttcctcacgctcgtcctcattcctcacgctcgaggagatcgccggtcggagcgccgctacccggagcccgcacaccgtcgtcgtgtcgttcggctactacgcctctgcttcatcgcgccggactttgtgatgccatctgtccgcgatgtctattcttcaccgagtcgctgtgagacactgacttgtcatgccctctgtccgcgatgactattcttcgccgagtcgccgaggcgctaccaagcagcgctcatcttcgtcgactaatcatcatcatcagccgcccgctgaagaaggccatcgtgatgctacccagccggagtgtgccgaagatcaccggagtcgtcgaagatcgcatctacctggtgctaccactagaacgggatcgcttatctatgacgggctgaaagcatcatcattgtcgggtaaggcccccgtcactgggcaaaggtcactgatgtgaggaaaaatctcaatcgggcaaaagcccgtcatggatggatgttatctcaatcgggccaaaaacaaagcccgtcacagatgagtatgatcagtcaaaccagcgtagttaggagtccgtcacggatgactaatctcaatcgggcacaccactaagcccgtcacggatgagtagtcatctccatcgggcatttagccagagcccgtcaccgataggtttgaccccacgtgttgagtcaaactagtccaattcggacgacttatctctatcgggtgtattctaaaagcccgtcacggatgactaatctctaacgggcaggactctatagcccgtcacggatgagttatctctttcgggcattagctaaatgcccgtcagggatgagtttagaaccaaaaaaaataaaatttgtctttttggctagcctcaggcctttgctagccatgcccactgc

SEQ ID NO: 14297 - DNA, 1839 bp, Oryza sativa
  ref <308>: DATABASE ACCESSION NUMBER: AK064907
  ref <309>: DATABASE ENTRY DATE: 2001-12-06
gactttttattttccggctcaaatatccgaatctcaccattcaagattcaaccaaccgaccaatgcccctcgcgtttcgtttctcccggattctcaatccgcgcctcaacccgtccacgaatcttggcctcgcgctcgcctcctctttctcctcctcgtcccgcccagagcagccggagctgcccggggcccgcggtggcggcggtgggttcccggcgaccatcagggaaggaagggcggagatcttcgccgacgactccaactcggtgttctacaacaaggcccaggttaacaacagggatctttccattgctgtattgagatcgtttatttcgagaagacgtgaagagcatgatatccaattaagaagaggcagtcatgctgaactaccgccgaaacatcacgctgaagaattgggccacataagaggatcatctgaggacaaggcattgagtgaagaaattagctatagagcaccaaaagttcttgaggctttagctgcatcgggattaagagccattaggtatgcccttgaagtagatgggattggggaagttatagctgttgacaacaatgaagtagctatagaggctgtaaaaaaaaatatccaccacaatggcagtgtggcttcttcaaaggtggtacctcatcttgcggatgcacgtgtttacatgctcacccacccaaaagaatttgatgtggttgaccttgacccttatggatctcctgcagcatttctggattcagcagttcagtgcgttgcagatggtggtattttgatgtgctcagctacagacatggctgtgcttgctggtggcaatgcagaagtttgcttttccaagtatgggtcttatccactaaagggcaaacactgccatgagatggccctgaggattcttcttgcttgtattgagtcgcatgccatccgccacaagcgctatatagttcctataatatcagtgcacatggatttctacattagggtctttgtgcaaatcttcacttcagctagcacagtgaaaagctcacctcttaaattggcacatgtctatcaatgtaccggatgcagttcatttcacctacaaaacattggaaggattaattcaaaggacaagaggaatatcgccctaccaaatttttcccctcttgtgcctcaggaatgtgctgaatgtggccataactttgttatggggggacctatatggagtgatcctatgcatgacaaagaatgggctgcttccatcttgtcaagtatccaagctatgagttgtgcatattcagcgtatgcaaagatttcagctataatgacatcagtatcagaggaattgcctaaagcacctttatttgttagtcttcacaatttgtgtgcaacactgaagtgcaccaatccaaccattgctacgtttcaatctgctatcagaaatgctggttatcaaatatcaggcagtcatgtggatcccttggctcttaaaacggatgcccctatgtctgtaatttgggacatcatgcgatgttgggtcaagattcatgctgtaaagtatcgacctggaaatcatccaggtaccaggatactgtcccaagagcctaaattacaggcaaaattttcccatgtacctgggggtttagcagtacagaagagcccaagatttgtacctaatcctgaaaaatattggggtcctaagacaaaggctgggagacaaccaaagagattaccagtggacaatttataaatatttactgacagtatggttgcaaactaggagattgagatcagttgcattcttttgttagaaaaccgagcatatacaagctcaagttcaagctcagtttctggaggcg

SEQ ID NO: 14298 - DNA, 2699 bp, Oryza sativa
  ref <308>: DATABASE ACCESSION NUMBER: AK064908
  ref <309>: DATABASE ENTRY DATE: 2001-12-06
gaaaaggaagagtcaggagccaaaattacctcatcctgccactacacgtctcctactcctctcctccccccttctccctcgcgttcgccgaattcccccgcggtttccgccgcgatccggccgctcgccgcgcgcgagaatccgtgacctgatcggcccttcctgccgtgggagtatttctgagaatttttttttgttttctcctttgctcggcttctgctggtcctgaatttaggagctcgtttctttaatttctttacccggtttggtggaattcgtagcttgtcaaagaaaatcgtggagatctgtagggaatttgatctggtcgggcctatgatttggttatacttcagttcagagtgtctcgatattagctgtccccgctggtgttttggtttgatgtgggtttgagagtagcaagagaactcaaagattccccttgtttcctcttagattcggcaaaattactttggaattattggataaactcggctccagattgttaggtagtggtatttcgcttccatttctagttgattcagttggggaagaaggaatacttgatccttgaccatttcaactgcaaaaggattgtgtgtttggtgattctacggcaggttctcatcggcaaaaagggaaaattttggctgtcttttcaactcttgatcagcaaggtttgggatttatgatcgttgtatgataaaagatggcgcataaagcaaagctgcaaagtgtttcagaatctgcaatacggtccattggtcttggctacgacattgctaatgatatccgtctcaaaaactgcaagcagcgtggttcgcctgatccgctgctcattgagctcgaccatgacaaggttcaggatattgtgctccctggtaatctgacggttactggtgtgtctaagtcaatcaagtgcgataaaggggagcgtatgcggttccgctctgacgtcttatcatttcagcagatgtctgaacaattcaaccgggagctatcattgtctggaaaaattccatctggatttttcaatgcgatgtttgaatttactgggtgctggcagaaagatgcttctattaccaaatcacttgcttttgatggttggtgtatcacactatacactgttgcactctcaaaggcacatataatactaaaggatcatgttaagcaggctgttccatcaacatgggaacctgctgccttagcaaggtttattaaaaaatttgggactcatatagtcgttggtgtaaaaatgggaggaaaggatgtaatttatttaaagcaacagcactcgtcaagcttgcaagctgttgatgttcaaaaacgattgaaagagatgtcagaccagcgatttcttgatgcaaatgggcactctgacattagtttggcagattcatacgctaaagataataaggttgaagcaagagagcaacgactgagatttgtggagtccaatccattaaattcttactcttctaatgaggagttggtaatgatgcctaagcgaagaggtggaagggataaagatatcatttctcatagcgagtggctgaatactgttcaggcagaacctgatgttatctcaatgtccttcatacctattacttcactgttgaatggagttcctggctgtggatttttgaaccatgcaattaatctgtaccttcggtataagccgcgagttgaggaattgcaccagtttttagagtttcagcttccaaggcagtggcacctgtctacagtgacctccctctgggtcctcagaggaaaagacaaagcagtgcatctttaccagtaaatttaattggtccaaagctatacgtttgtaccaacatggttgatgtgggcaaaagacctgttacaggactccggttgtttcttgagggacagaagagcaacaaactagctatccatctccagcatctctgctctcttcctcagattattcagctcgaagacgacacttacaatccccaaactccagaagcagagatccgcaaatactacgaaccgattggttcatggaagcgtttctcccatgtctgcaccgcaccagttgattcagatgattcctccattgtcacaggggcacatctggaagtagtcagccatggtttcaagaaaatactcttccttcgccttcatttctccaaagtctgcaatgccacttctgtcaagaacccagagtgggatggatctcgaaacctgggtcagaaatcaggcctcatctcaacacttatcagcacacatttctccacagcagctctaaagcccgcgcctcgccctgccgaagtgaacatcaattcggcggtgtaccctggtggcccgcctgttccagtgcagaccccaaagttgctcaggtttgtggatacaacggagatgttgcgtggaccgcaggacctgccaggttactgggtggtttcaggtgcaaagctgcatcttgagaggggcaagatatcgctgcgggtgaaatactcactcttgacagtaaattcgcccgacgatgagttttcacccgatgaagaattttagaatatcattctgttttatgtgcagctaactgtgagaactcaggtcaaggttgtaggattttcgtagcatttgtaagtgctctagcagcttgaagtctttctcgtgtacattatagtttgcaaacacaatgacaatttgttgaatgaagtgagataatttgttgtacc

SEQ ID NO: 14299 - DNA, 2162 bp, Oryza sativa
  ref <308>: DATABASE ACCESSION NUMBER: AK064909
  ref <309>: DATABASE ENTRY DATE: 2001-12-06
gattgattgctttgcttccccccctttctcgctagtccgattccctcgcctcgcctcgcctcactcccccctcgccgccgccgcccgctgcccgccgccgccgccgccgccgccagatgctgcttgtagggttgcagtagtaggtgggttggtagagtagaggggaggatatggggtgcgtcttcgggcgcccgtcgtcgtcgccaccggcggcggcggcgaggaaggggaggaggaagaagaggtcgtccccgatgccggcaccctccacggactctcccgcggcggaccagtccccggggaggggaaggccgcgccggaggctgggacgcaagccggggcccaggcaggggtgcgtccccgcgccagcggccgcagagcagctcgccgcggggtggccgccgtggctcgtcgccgtcgccggggaggccctccgcgggtggacgccccgccgcgccgacaccttcgagaagctcaacaagatagggtcgggcacctatagcaacgtgtaccgcgcgagggacaccgtctccggccgcatcgtggcgctgaagaaggtccggttcgacaatctcgagcccgagagcgtcaaattcatggccagggagatcctgatcctgaggaaactcgaccatcccaatgttatcaagctggaggggttggtcacgtcgaggatgtcatgcagcctgtacctggtgttcgagtatatggagcatgaccttgctggcctggcagcgagcccggacgtcaagtttactctgccgcagataaaatgctatgtgcagcagctattgtcagggcttgagcattgccacaataataatgtattgcatcgggatatcaagggatcaaacttattgttggataacaatgggattcttaagatcgccgactttggcctggcaacattctttgacccacgacataaacgaccaatgacgagccgcgtggtcacgttgtggtaccggccacctgaattgttgttgggggcgacagactatggtgttggtgtggatttgtggagtgccgggtgcattctggcagagctcttgcatgggaagcccatcatgcctgggcgtactgaggtagaacagttgcacaagattttcaagctatgtggctccccctcagaggagtattggaaaaagtccaagctgccacatgctacaatattcaaacctcagcagccctataagcgttgtatcagagaagcatttaaagattttcctccatcttccttgccgttggttgaaactctgcttgcaattgatccagctgagcgccaaactgctacatctgccttgcaaagtgaattctttgcaactgagccttatgcatgtgatccatcaagcttgccgacatatccaccaagtaaggagatggatgctaagatgagagatgaggaagctagaaggctacgagcagctgcaaaggccaaaggagagggggtaaaaaggactcgaacgcgggatcgatctcaaagggcaggaccagctccagaggctaatgcagagcttcaagcaaacctagatcataggcgacgcatgataacgcatgccaatgccaagagcaaaagtgagaagttccccccacctcatcaggatggagctatgggtaacccattgggatccagtcgtcatatggagcctatgtatgagcaccaggatgcttccttcagcacagtagtccccatccagaaggggtcctcacaaacatggtctggaccattggttgatccagcagctctagggcaatcgaggcggaagaagcaaactgccctagatgcgaaggctgcagcttattcaaagcagctccagaaggacaagggcggaacaagagcacgataagaggaactcaatacagtttcttttacatgtttttcatcgagtttaaggggaagtttttagaatggtcagtctgtagatgaattatttccttctgttttgttcctttcgtgcggaaagaaagcggtagtgcttcagtaggaagaaattcatccagcttatgtatatgtggtagtgttttctgttcatctcaggtgcttctgaacaaattggtgtccggaaccaaaggtatttaagctcaacgtgacaattcggttgcccttgtgtatatatggagtattctttcttctgtaaataaacggatggttcatgcatctc

SEQ ID NO: 14300 - DNA, 2833 bp, Oryza sativa
  ref <308>: DATABASE ACCESSION NUMBER: AK064910
  ref <309>: DATABASE ENTRY DATE: 2001-12-06
gagtttctctctccccacaaccaaaccaaaactaagaaacccctggtgctctctgcaagaactccatcaaattccccagccaaaaacactcagataattttttttattagaaaaaaagaaaggagattagccagccagtctgctgctccatctcagtgctcacgcactcactctgaggagtgaaatccaatccagcccactccggagttcctggaaaatcctcgcgaagtccaagaaaaaaaatattaccactgccatttcttggtttcttgatagcttctcctagctgctgccgcccaatcatccgagagagcgagcaagtaagaaagattgattgattgcttgattgggagtgtcctttgggcgagctgtggtgggatttagcggcatgtcagcgtcgccgtcgtcgatgagcggcgccggcgccggcgaggcgggggtgcggacggtggtgtggttcaggcgggacctgcgcgtggaggacaacccggcgctggcggcggcggcgcgggcggccggggaggtggtgccggtgtacgtgtgggcgccggaggaggacgggccgtactacccggggcgggtgtcccggtggtggctcagccagagcctcaagcacctggacgcctcgctccggcggctcggcgccagcaggctcgtcacccgccgctccgccgacgccgtcgtcgcgctcatcgagctcgtccgcagcatcggcgccacgcatctcttcttcaaccacctctacgacccgctgtcgctggtgagggaccaccgggtgaaggcgctgctgacggccgagggcatcgccgtgcagtcgttcaacgccgacctgctgtacgagccatgggaggtggtcgacgacgacggctgcccgttcaccatgttcgcgccgttctgggacaggtgcctgtgcatgcccgacccggcggcgccgctgctgccgcccaagaggatcgcgcccggcgagctgccggcgaggaggtgcccctccgacgagctggtgttcgaggacgagtccgagcgggggagcaacgcgctgctggcgagggcgtggtcgcccgggtggcagaacgccgacaaggcgctggccgcgttcctcaacgggccactcatggactactcggtgaaccggaagaaggccgacagcgccagcacgtcactgctgtcgccgtacctgcacttcggcgagctcagcgtacgcaaggtgttccaccaggtgaggatgaagcagctcatgtggagcaacgaggggaaccacgccggcgacgagagctgcgtcctcttcctccggtccatcggcctcagggagtactcgaggtacctcacgttcaaccacccgtgcagcctggagaagccactcctggcgcacctcaggttcttcccctgggtggtcgacgaggtgtacttcaaggtgtggaggcaggggaggacagggtaccctctcgtcgacgccgggatgcgcgagctctgggccaccggctggctgcacgaccggatacgcgtcgtcgtctccagcttcttcgtcaaggtgctccagcttccatggcgctgggggatgaagtacttctgggacaccctgctcgacgccgacctcgagagcgacgcgctcggctggcagtacatctccggctctctccccgatggccgtgagctcgaccgcatcgacaaccctcagcttgaaggatacaagtttgatccgcacggggagtatgtccggcgatggctgccggagctggcaaggctgccgacggagtggatacaccacccatgggacgcaccggagtcggtgctccaggctgcagggattgagctaggctccaactatcctctccccatcgtggagctggacgcggcgaagaccaggctgcaggatgcactgtcagagatgtgggagctcgagggccgcgtcacgcgcagcgatggagaacggaatggaggagggcctcggcgactcctccgacgtgccgccgatcgccttcccaccggagctgcagatggaagttgaccgagcaccggcccagcctactgttcacggaccgacaacggctggccggcgacgagaggatcagatggttcccagcatgacctcctcgctggtcagagctgaaacagaactttcagcggattttgacaacagcatggacagtaggccggaggtgccgtcgcaggtgctcttccagcctcggatggaaagggaagaaacagtggacggcggcggtggcggcggaatggtcggcaggagcaacggcggcggccaccaaggccaacaccagcagcaacagcacaactttcagactacaattcaccgggcacggggcgttgcgccgtctacgtcagaggcatcaagcaactggactgggagagaaggcggcgtggtgcccgtctggtcgcctccggcagcgtcaggcccctcagatcactacgctgccgatgaagctgacattaccagtagaagttatttggacaggcatccacagtcgcatacgttgatgaactggagtcagctctcgcagtcattgacaacaggctgggaagtggaaaattaatgctgattgtcagaattaatcattaggaaggtcgacattgagaagaattcatatgtaaattatcaccttttgtttgtctatagccttggtgtgcatgaatcaagtgatgaagcttccttgatgcaataatgattatgtaaagctagttttacagaacatttgtggtataggtttgctagttgtcaaaaggatatgtactatttgttagataagaggttattctagcattatgtcttagacttgtacattctccctttggttattgtaatcttggtggaatagtcatc

SEQ ID NO: 14301 - DNA, 1035 bp, Oryza sativa
  ref <308>: DATABASE ACCESSION NUMBER: AK064911
  ref <309>: DATABASE ENTRY DATE: 2001-12-06
ggtccattttgtgcattttcgaaatcattttctctcctccaccggatgatgagatgaaattgcccttcctcgtgagcgcggcgagcaggggacaaaacaccatggcctcgccggcgtattgagtggcggcagtggcggcagctatggtcttctcccaactccgtcgccccatctcactctccaccctactgctgaccacatcgagagaacaagcatgggctgcctctttggtctcaatcccatcgccggacgagatgaagacgatgatcatattcaccaccaagccacggtcgtccttgtcccttttgcgttccatacttaactcatcttgccgaacaaactttcttttgacgccatcgcgtttgatccattgtagcaacgggaacaccgccgtgccatcgtcatgctggagcacgctctgaagtgccgccgcttcggcagcgtcgatgtccggttcctcatccatcctggagcaagccaccgcgccatcagctcctccttgaggtcctctttaaaacccctcaagaaccgagaagattggagcatcaaggagggagatcgacattgtcttctccaactttggctgccggcgtcaatcttcgattccctccgctccggtgaccccctcgttgattctttgcgcatgcaccatccctgggacctaaccaacctcatggatgcacatgcatggcttcacatcgaatggaatgagttgacgtcgtctcgccgaagctcggagccgccactgagacgttttcttgatcgctgccatcaaccaagccccatggcctttgctcggcctcgccctgtccaacaccgtcgtcgccaacttgttccaccgcatccccgacaggtcgacgcccttgtcagcaacgacgatgaccacctcgctgcgctcgaccatctccaccggcggcacaaaacgaagaaggagagaaagaaagagaagagatggaccttccattggccccaagggcatttatgtctaatcaccataaagaagaggcaaaatgattttggaattaagagaaaatg

SEQ ID NO: 14302 - DNA, 1096 bp, Oryza sativa
  ref <308>: DATABASE ACCESSION NUMBER: AK064912
  ref <309>: DATABASE ENTRY DATE: 2001-12-06
ggtatagaggatctcaatcccttgctggttgcaatagcacgagaaatatatataaaattaaggcaaaacggtgggagggcggaggtggttgaggtgaagcgaggcctcgccgcatctaccggagcggcgtagccggcgatcggagatgacgatcccgagaagaaggttgttcgcggcgacggacgagatattctgcctgttccaaggcacgatcgagaacatcgcggtgctgaagcagcagtacgggttgcacaacaagggctccaccgagatcaacatcatcatcgaggcttacaggacattgagagacaggggaccttaccctgcggatcaagtcgtcagagacatcaacggcaagttcgcgttcgtgctctacgattgctccaacaactccgtcttcatggccaccgatgctgatggtagcgttccattttattggggagttgatcctgacagccgtcttgtggtttctgatgatgacgaaattgtgaataaggcttgtggaaaatcctctgcaccattccctaaaggtttcttcttcaccacatccggaggactgcagagctacgaacaccctatgaatgaggtgaaaccagtgccgaggctcgacagcaagggggaggtatgcggcacaacgtacacggtcgacgcgaaggcgaagaaggatagcagcattcctagagttggcagcgctgcggattggtcctcgcaatactaaaaccgtataaatcgtcagaagcatatggtatgatgacctagaaacctttgctgcaattacatggagagcactaggcttccgggttgtccacggttacaagtgggcatttgccatctgaaatgttcatctggatggtcagccttgtgctgtgctgctgtctgaaatttctgtcctgtccaccattactgaagaatgagagcgtgtgggtcttgaatttccaataaaacgcaatgccttacagatgtgtaaatagatgtttttgcttactacaatattttctgaacaatcagcatatctataactgtggctagaatgaatcatctctaacgatgtgtgttctgttacttctgtatgtgaagtgatcttcccttctgcttg

SEQ ID NO: 14303 - DNA, 2433 bp, Oryza sativa
  ref <308>: DATABASE ACCESSION NUMBER: AK064913
  ref <309>: DATABASE ENTRY DATE: 2001-12-06
gatgggcacggaggcggccacgtcgcccccatccccctctcctcctcttcctccccaaatccccacgcaactgcgcaccggagagagagagagagaggccaagcgagcggaggaggaaaaatcaatctgccgctaccctcctcgtcggtgtcgggctatttatacactccactccctcctccctccccttcctagttcggcccaccccccccccctctcccctccacgccccgctccgatccactcagtgagcgaagatggctccaacatccatgagccttgctgcaaagacgccgcttcccttctcgacacttccttcgagtggcgttgcacagaggccagtttctgtgactgcctccctcgagcacaagactaatgatgccagaaggaagttcctaaagctcgcgcttgggaacctcggggtcgggcttcccaccttgttgggtgctaagagagctcttgctgaagagcaaggtgtctcgtcgtcgagaatgtcttactcgaggttccttgagtatctagacaaggacagagtgaagaaggttgatttgtttgagaatggcacgattgccattgtagaggctatttctcctgagctcggcaaccgtgtgcagagagttcgtgtgcagcttcctggtctaagccaggagcttctccagaagttgagggaaaagaatatcgattttgctgcacacagcaaccaggaggactctggttctctctgttcaacctgatcggaaacttggctttcccacttatccttattggtggtctatttttgctgtcaagaagagcacaaggtggccttggtggacctaacggtcctggctttccccttggttttggtcaatctagggccaagtttcagatggaacccaacactggtgttacatttgatgatgttgctggtgtcgatgaagcaaagcaagacttcatggaagtggttgagttcttgaagaaaccagaaaggttcaccgctgttggtgctcgcatccctaagggtgttctgcttgttggtcctcctggaactggtaagactttgcttgccaaggctattgcaggggaagctggtgtgccgtttttctcgatatcaggatctgagtttgtggagatgtttgtcggagttggtgcctcccgggttcgtgatctcttcaagaaggcaaaggagaatgctccttgcatagtatttgttgatgaaattgatgctgttgggaggcaaagagggacaggtattggtggtggaaatgatgaaagggagcagactttgaatcagttgctgactgagatggatggttttgaggggaacactggaatcattgttattgctgccaccaacagggctgatatcctggattctgctttactcagacctggacgttttgacagacaggtaagtgttgatgttcctgatgtacgcggaaggacagagattcttaaggtgcacggtagcaacaagaagttcgatactgatgtctctcttgaagtcatagcaatgagaacacctggctttagtggagcagacttggcaaatcttctaaatgaagcagccatattagcgggccgacgtggtcggacagcaatttcctcaaaggagattgatgattcaattgacagaatagtggctggtatggaaggaactgtgatgacagatgggaagagcaaaagtcttgttgcttaccatgaagttgggcatgcaatttgtggaactttgacgcctggccacgaccctgtccaaaaggttactttgatcccgaggggtcaagctcgtggtctcacatggttcattccaatggacgacccaacgctcatctccaggcaacaactgttcgccagaattgttggtggccttggcggtcgtgctgctgaggagatcatttttggggagcctgaggtgaccacaggagctgctggtgacttgcagcaaattactggcctagccaagcagatggtggttacattcggtatgtcggacattggtccgtggtcgctaatggactcaggagctcagagcggcgatgtcatcatgaggatgatggcaaggaactccatgtcggagaagctcgcggaggacatcgataccgctgtgaagcggttgtccgatgaggcctacgagatcgctttgagccagatcaggagcaaccgggaggccatggacaagatcgtggaggtgctccttgagaaggagacattgagtggtgacgagttcagggcgattctctccgagttcacggagatccctgtcgagaaccgggttcccccagccacgccggcagctctccctgcctaaatcccactagttttgtaggaatggaacatgctgtaagatgttcatattttcgattcttggtgtacactaactttactttgccggccggattttttggcatactacatgtaacttactcttggttaattataaaatgtaattagctg

SEQ ID NO: 14304 - DNA, 1152 bp, Oryza sativa
  ref <308>: DATABASE ACCESSION NUMBER: AK064914
  ref <309>: DATABASE ENTRY DATE: 2001-12-06
gacgcgcctttttgcgcctaatttaccgttttacccctcgccggcggccgccgcactccggcgagagaatcggcagcaggtgggcgggggactccacgatggcggccatatcttcgcttcccttcgcggcactgcgccgggccgccgactgcaggccgtcgacggcggcggcggcggcgggggcgggggcgggggccgtcgtgctcagcgtgaggccccggcgggggtcgcgctcggtggtgcgctgcgtcgccacggcgggcgatgttccacccactgtcgcagaaacaaagatgaattttctcaagtcatacaagcgtcctatcctaagcatttacagtacagttctacaagaacttttggtacagcaacatctgatgagatacaaaacaacatatcaatatgatgcggtgtttgctcttggttttgtgaccgtctatgaccaactcatggaagggtaccctagcaatgaggatagggatgcaatcttcaaagcatatataacagcgttaaacgaagaccctgagcaatacagagctgacgcacaaaagatggaagagtgggctcgttcccagaatggtaattctttagttgagttttcatccaaagatggagaaatagaggccattctgaaagatatttcagaaagggcccagggtaagggaagcttcagctacagccggttctttgcagttggcttgttccgtttgcttgagcttgcaaatgcaacagagccaaccatactagacaagctttgcgctgctctaaacatcaacaaaagaagtgtcgacagggatctcgatgtttaccggaacatactctccaaattggtccaggctaaggaacttctcaaggaatacgtggaaagggaaaagaagaagagagaggaaagatcagagaccccaaaatcgaatgaagctgttacgaaatttgacgggagtctcaattccatgaggcattaactcaagccttcataaggggagtgagtgctaccgtggataacagattttaacagagttctggatcacgttgagaaactatcaaggtcacctttcactgcacggacactttggctgctctcgtgtggttttgtattctgccgtataaaaggatccagattgttcttactactgagcattatattttttttgt

SEQ ID NO: 14305 - DNA, 3486 bp, Oryza sativa
  ref <308>: DATABASE ACCESSION NUMBER: AK064915
  ref <309>: DATABASE ENTRY DATE: 2001-12-06
gatacgttggggttttctccggctgctcctccgtgtggccagttgtcctcatcttcctcctcctctctccttgttgccgcgaagaggatagataacccatagtcccgtacgcttctctttctctctctctctctctctctttcctctccactttgaatcaatcaaaacggagaagaagaagaagaagaagaagaagaagaagaagaagacatcaagaacacgtggagcagaagcttctctgccggcttctatcgtagctctcagggataaagaaaatctgctgcagaggtacaagatctagtggcagaacatgatgagcaatcttaagcttggggtggaggttaccagtgctcatgacctcctaccaaaagagcagggcacatgcaacccctatgtcgagatcgaattcgatgaccagaagttccgcacagccatcaaagagagggatatcaaccctgtctggaacgagcagttctacttcaacatatctgatccatcccgcctcagtgagaaagacctcgaggcgtatgtgtaccacgcaaaccgcgccagcaattccaagacttgccttggcaaggttcggatctccggtacatcctttgtcagccactcagatgccacacctcttcactaccccctggagaagcgcacgatcttatcccgtgctcgtggtgagctcggtctcagggtgttccttacagatgatccatcagtcagagtgtccgctcctggtcaggagttcgacttcataagcacgcctacgactgcccaagagcaggtagccgccaatgccattccaaatcctttccaggagaccagagcagatcaagtgaggcaattccaacacttaccaaaagaacagcaccagcaccgtccgcagccaatgactgcgcagccatactaccctgaaagttcatacggacaacagcaacagaaaacctactctgctgtcgggaacaaagctgaaggtcctccacctccagtcatgaggatgtatgctcaaggtccacagcagcagcctgtagaattccagctgaaggaaacaagcccaacacttggtggcggacgtgttattggcggccgggtgatccccggtgaaaaggcaggggcatacgaccttgttgagaagatgcagtacctatttgtgcgtgtggttaaggcccgtgatctgccccacatggacatcactgggagtcttgatccttatgttgaggtgcacctcggaaactacaaaatgaagacaaggcactttgagaagaaccagaggcctgagtgggatgaggtgtttgctttccctagggaagtaatgcagtcaacgtcacttgaagttattgtgaaggataaggacttcattcgggatgattatgttggccgggtgtcaatagatctaaatgaggtaccactaagggtccctcctgacagcccattggcaccagagtggtatcgacttgtggggaaggaagggcacagggataaaggggagctgatgctcgctgtctggtatggaactcaagcagatgagtgcttcccaagtgccatccacgcaggatcagaaccaattgattcccatcttcacaactacatccgtgggaaggtctaccctgtacccagaatgtggtatgtgagggtcaatgtaattggggcacaggatatatttccaatggagaaccacatacctgatgtatttgttaaggtgaggctgggccaccaaatgctgaagacaaggccagctcgctcaccaaccagaaacttcatgtggaatgaggagatgatgtttgtcgcggcagagcctttcgaggaggacttgatcatacaaatagaggatcgagttgctcagaacaaggatgaagtgattggtgaaactatgatacctctcgcaaggcttccaaggagggctgaccataagccagtgctgccagcatggtttgatctcagaaggccaggactgattgatctgaaccaactaaaggaagataaattctatgcaaaggtgcaacttcgtatttgccttgaaggtggttaccatgtgctcgatgagtccacacagtactgtagcgatctccggccaacaatgaagcagctgtggaaaccaccaatcggtctgcttgaagttggcattctaagtgcaaatgggctcaatccaacaaagaccaagcatgagcgggggtcatgcgatgcatattgtgttgccaagtatggtcagaaatgggtgcggacacgtactattgttgacaacttgaaccctagattcaatgaacagtacacatgggatgtcttcgaccatggaacagtgctcaccattggtttatttgacaactgccacatatctgcagacagcaaccacagtagttcccccggccatatggacaagcccatcgggaaagtgcgaattcggctttcaactcttgagactgggagggtgtacacacacacgtatccattacttgtcctccacccatcaggagttaagaaaatgggagaactccacctggccatcaggttcacagccacatcccttctcaatgtgctcttcacatattctcggcccctcttgcccaagatgcattacgcgcaaccactgtcaatagtgcagcaggaaatgctccgccaccaagctgtgcaacttgtcgcacagcgtctagggcgcatggagccaccagttcgcagggaagttgttgagttcatgtcagatgcccgctcacacctgtggagcatgcggcgaagcaaggctaacttcttccgtcttatgcaagtcttctccggattcattgctgcaggaaagtggtttggcgacgtttgtcagtggaaaaacccagtcacaacagttttagttcatgtgctatttatcatgcttgtcttctacccagaccttatcctcccaacaatcttcctctacatgttcttgataggattgtggaattaccggttccagccgcgtttcccacctcatatgaacacaaggatatctcatgccgatatgacaaacccagatgagcttgatgaagaatttgatacattcccaacatcaaagagtccagatctggttaggatgaggtatgacaggctacggcatgttgctgggaggatacagacagttgttggggacattgcaactcaaggagagaggctgcagtcgctgctcagctggagggatccaagggcaacatctatgttcctattgttttgcctgcttactgcagttatcttgtatgtgacaccattccaagtgattgcactctgccttggtttcttctggatgaggcacccacggtttcgtcataaggttccatcggcacctgtgaacttcttcaggaggctacctgcaaagacagattctttgctataaatattttcagagatcaatatccaattgtgtatttattttttgtttttcagtatattgttgtatgatagcattaagggaaatacattaatatttgtaattgttgcttcatctgagaggataaaataagtccagttcaacag

SEQ ID NO: 14306 - DNA, 1492 bp, Oryza sativa
  ref <308>: DATABASE ACCESSION NUMBER: AK064916
  ref <309>: DATABASE ENTRY DATE: 2001-12-06
gactcacacacactctcctcatcccagagcaagaagctcagctcctcctcctctcgcatggcagccatggccaccaccgcgtccagcctcctcaagacctccttcgctggcgcgcgcctccccgccgccgcccgcaaccccaccgtctccgtcgcgccgcgcaccggcggcgccatctgcaactccatctcgtcgtcgtcgtccactcccccctacgacctcaacgccatcaggttcagccccatcaaggagtccatcgtgtctcgcgagatgacccggcggtacatgaccgacatgatcacctacgccgacacggacgtcgtcgtcgtcggcgccggctccgcggggctctcctgcgcgtacgagctctccaaggacccctccgtcagcgtcgccgtcatcgagcagtcggtgtcccccggcggcggcgcgtggctcggcgggcagctgttctccgccatggtggtgcgcaagccggcgcacctgttcctcgacgagctcggcgtcgcgtacgacgagcaggaggactacgtcgtcatcaagcacgccgcgctcttcacctccaccgtcatgagccgcctcctggcgcgccccaacgtgaagctgttcaacgccgtcgccgtcgaggacctcatcgtcaaggagggccgcgtcggcggcgtggtcaccaactgggcgctggtgtcgatgaaccacgacacgcagtcgtgcatggaccccaacgtgatggagtccagggtggtggtgagctcctgcggccacgacgggccgttcggcgccacgggcgtcaagcggctgcaggacatcggcatgatcgacgccgtgcccggcatgcgcgccctcgacatgaacaccgccgaggacgagatcgtccgcctcacccgcgaggtcgtccccggcatgatcgtcaccggcatggaggtcgccgagatcgacggcgccccgagaatggtacgcaccaaaaaaacatcaaactcttcaccataatctctcccccgttcttggatttgaacaaattcgttgttgcagggcccgacgttcggagccatgatgatctccggccagaaggcggcgcacctggcgctgaaggcgctcggccggccgaacgccatcgacggcacgatcaagaaggcggcggcggcggcggcgcacccggagctgatcctggcgtcgaaggacgacggcgagatcgtggacgcctgagcgaatagaacagggtaaaaaaaaatccgcaagacgtggtggtgacacggaggagttggggacgagaagaagatgtggactttcccctgtgtttttttttttcgggatttgcattgatccccttgtttgttttagctctggatgttgattagcgtcttgttcatagcacttccactgccaccgtgtgtgtgtgctctgcttgcctgatgagggcaagaaaacttccatggatccgtctctctgggaggaatgaataaaaaggatgaggaaataaaaatgattcagtgcc

SEQ ID NO: 14307 - DNA, 2096 bp, Oryza sativa
  ref <308>: DATABASE ACCESSION NUMBER: AK064917
  ref <309>: DATABASE ENTRY DATE: 2001-12-06
gggtcttatcctcctccttgttgttgcgggaagaggcaggaaggaggaggttttgtggtgcgatcttgttggggtttcaggtcagaagggagaaggggagaggtcagccatggcattgcctgtttccctcctccgcatcgcggcggttctgctcgccatcttgccattctgcgccacgcatccaagccccgggttccatgctcctcgcgagtttcacaaggcactcgtcccagatagatatggatttgtggcaagaagatcaattgctgaagctcctgttgacgtaaatgtcactacaaacagttcctttgtcttggcgcaagagcgaacatatagaaaagaccccttgaatggattcaggaaatatactggcggttggaatattagcgaagtgcactatatggcttcagttggatacacagcttttccactgttcatcattgccttggtgtggtttgtgctgttttttctggttatgcttggaatttgctgcaagcattgctgttgtccacatcgcagttacacatactctcgggtagcatatgccctatctctgatacttctaatattgttcacttgtgctgcaattgttggatgtgtcatgctgtatgatggtcaaggaaagttccataaaagcacaacgactaccttgaattttgtcgttagccaggccaattttactgtcgaaaaccttaataacttatccgatagtttatctgctgcaaaaaaggttgacatagggcgatcctttttgcctaacgatgtgcaaaatcagatcaatgaaattcaaggaaagttgaactcatcagctactgagcttgctactagaactactgacaattccgagaagatacaaaaattgctaaatcaagtgcggattgctttgattatcattgcggcagtaatgcttcttctggcatttattggcttcttactatctatctttggcctggaattcattgtctctattttggtgattatcgggtggatactagtcaccgggacgtttatcctgtgtggtgtcttccttcttctgcataatgtcgtcgcagatacttgtgtctcgatggaggagtgggttgctcatccaacagagcacacagctctggatgacattattccctgtgttgaacctgccaccgcgaatgaatccctgtatagaagtaggcaagtcacttaccaactggtgaatctggtaaaccaagtaatcaccaacgtgtccaatggaaacttccctccgcaaactcctttcttctacttcaatcagtcggggccactgatgcctacactctgcaacccgttcacagccgatctgaataaccgtacttgcaccagaggagaggttaccttggacaatgcaacccgggtttggaagaattttgagtgccagactaccactgtctcaggaactgagatatgcactaccgtgggccgtgttaccccaacgattctcggtcagatggcagcgggcgtgaatgtgagccaggggctgtatcagtatgggcccttcctgatccagctggaggactgcactttcgtccgcgataccttcaccaacatcaaccagaaccactgccctggcctggagaggtacagcaaatgggtttacgtcggcctggtgatggtttcgtcggccgttatgctctccctcgtcttctgggtgatctacgccagggagcggcgccaccgtgcgtacagcaaacagcacaactacgctgacaagccgcatccgactggcccggacgcttgatgcatatggccgatgctgtgctgcagaagaatctccatgtccatactcttcgtgcctgtcatcatcatgtagatcaccgtgccttctgattgttcgttggttacaccgatcctgtcctcttctttttttttcttttttttttgttgtagcattgttgtgaattattattgtagcttgatctttttcatcttgtttgctcttcttggtgaactgaaactttgttaagaggtgctgtttgtgaacttgagatagatttctgactttgtgccattagagtttcagtttgtgtacctgctgctgttgatgtacagtcatcatggtccagaagaattgttgcattgtcatt

SEQ ID NO: 14308 - DNA, 1475 bp, Oryza sativa
  ref <308>: DATABASE ACCESSION NUMBER: AK098858
  ref <309>: DATABASE ENTRY DATE: 2002-08-28
gaagttctcatcgagggttttcctctctctctctcgcatcgcatccatcccctcgtgtcgccgccggcggaggctgcggcgagccttcaccccccacccgcccaccgccggcgagccacggcgtgggcgacctcctctcctctcccgatcccctctcgcccttaggtaggggcttctccccagtccccaccacacgcgcgtgcgtggccgacgagcaccccaggttcggatcggatggaagaccagaagaaaaatgcaaaaccagaggggtcttctggctcgcaaaggggagctcccccggcacctgatgcaggccttcccaatccttttgatttttctcagtttagcaacttgctcaatgatccatctataaaggagatggcagagcagattgcaagcgaccctgtgttcacccagatggcagagcagctgcagaagagtgctcatgtgaccggggaacagggtggccctgcattggatcctcagcagtacatggaaacaatgacacaagtcatgcaaaaccctcaattcatgtcaatggcagaacgtcttgggaatactcttatgcaggatcctggaatgtccagtatgctcgagagtttgactagtccttctcataaggagctgcttgaagagcggatgtcccgtattaaagaagatccctctttgaaggggattcttgatgagatagagagtggtggtccatctgctatggtgaagtactggaatgaccctgaagttcttcaaaagattggtcaggctatgtcaattaattttccaggagatgctgctacttccactacattgtctggacctgaagaaactgaagaggatggtggagatgatgatgagtccattgtccatcatactgccagtgttggcgatgcggagggtctgaagaaagctttagaggatggagcagacatggatgaagaagacgctgagggaagaagggccttacattttgcgtgtggttacggtgagttgaaatgcgcagagatccttctggaggcaggtgctgctgtaaacgcactggataagaacaagaacaccccactgcattacgctgctggatatggtcggaaagaatgtgtggatcttctgctgaagcatggcgctgctgtcacgccccagaatctggacgggaagacccccatcgaggtggccaagctgaacaaccaggatgaggtcctcaaggtgctcgagatggacgctttcctataaagaaaccaatgccaaatctcacgctcatcatcaccggctcgtcgctttacagttcagatttttactgcatacccaaatcatcatcgactcttttagctttggttttggtgtggtggtggtacattcgttgaatcgttgctatgtttggtgctccgatttgtaatctgtttcacttccccgttacactgcatcactccgtttcatcctttgtattcctatgttgctgagtctggtgttgcagacgttgctcc

SEQ ID NO: 14309 - DNA, 1618 bp, Oryza sativa
  ref <308>: DATABASE ACCESSION NUMBER: AK064918
  ref <309>: DATABASE ENTRY DATE: 2001-12-06
gaccgagctttagcgttggcaaggagagagagagaagagagagagagagagagagagagagtaattaaggctgggaggataggcagcagcagcagcgagagggaaacgagcgagcgagcttagctggtgcttgcctataggtagctaagcaaaatggggcagaggaggaggtcggggccgcggcgtcagagccagagcgtggtggtggtggtggtcgccgtgttgctggcgacggcgtcctgcgcggcggcgcagctgagccagagctactacgcgtcgacgtgccccaacgtggagacgctcgtccgcggcgccgtcacgcagaagctcaaggagaccttcaacgccgcgcctgggacgctccgcctcttcttccacgactgcttcgtcagggggtgcgacgcgtcggtgctgatcgcggggccggacgacgagcacagcgcgggcgcggacacgacgctgtcgccggacgcgctggacctcatcacccgcgccaaggccgccgtcgacgccgacgcccagtgcgccaacaaggtctcctgcgccgacatcctcgccctcgccgcccgcgacgtcgtctcccaggcaggaggaccctactaccaggtggagctggggcggcttgacggcaaggtcgggacgcgcgccgtggtgaagcacagcctccccggcgccgccttcgacctcgaccagctcaacaagctcttcgccaccaacggcctcacccagaccgacatgatcgccctctcaggagggcacacgataggggtgacgcactgcgacaagttcgtgcggcggctgtaccagttcaagggggcggcgccgcagtacagcccgccgatgaacctggcgttcctgcggcagatgaggcagacgtgcccgctcagctacagcccgaccaccgtcgccatgctcgacgccgtctcgcccaacaagttcgacaatggctacttccagacgctgcagcagctcaagggcctcctcgcctccgaccaggtgctcttcgccgaccgccgctcgcgcgccaccgtcaactacttcgccgccaaccagaccgccttcttcgacgccttcgtcgccgccatcaccaagctcggccgcgtcggcgtcaagacggccgccggctccgacgccgagatccggcgagtctgcaccaaggtcaactaataacgtagagcagtatagctcacatttgggtggtagagagggtaaattggtgaattcttctctgtgtctctcttcttcttcttcctcttcttctccatgatgatcttcgattctcactgtccatgttcacaagtccaccgcgcacagttgttgtatttgttcccgccaattcttttcttgattcttataatcataaaaagtgtcatacattaattaggatatattttcagggcccctacccatgtgatatgatagaaggtacacttacaatgatgtaaactagcgtggtggcccacgcagattgcgcggctaacattattatattttctctcatataatagcatatatgttttctcattatattatttaaatatattaaaataacaatataattttaaattttgtaataactttacaaaactattaatgtgtaatattcatattatatttt

SEQ ID NO: 14310 - DNA, 1199 bp, Oryza sativa
  ref <308>: DATABASE ACCESSION NUMBER: AK098859
  ref <309>: DATABASE ENTRY DATE: 2002-08-28
agtgggacgagcagcgggccgcgtggcaccgccgccacccggagacgccgcccttcgtcaacgacgtcaagccgcgggtgctgctcgtcacgggctcctcgcccaagccgtgcgagaaccccgtcggcgaccactacctcctcaagtccatcaagaacaagatggactactgccgcgtccacggcctcgagatcttctacaacatggcgctgctcgacgccgagatggccggattctgggccaagctcccgctcctccgcgcgctgctcctcgcgcacccggagatcgagttcctctggtggatggactccgacgccatgttctccgacatggcattcgagctgccatgggagcggtacggcccctacaacctcatcatgcacggctgggatgagatggtctacgacgacaagaactggattggcctcaacacaggcagcttcttgctgcgcaactgccaatggtcgcttgatttccttgatacatgggcaccaatgggaccaaagggccctgtccgtattgaggccgggaaggttttgaccaagtacttgaaggatcggccggtgtttgaggctgatgatcagtcggccatggtatacatccttgctacagagcgtgagaaatggggtgacaaggtgtaccttgagaatgggtattacctccatggatattggggtatcttggttgataggtatgaggaaatgcttgagaattaccatccaggacttggtgatcaccggtggccactggtcactcactttgtcggatgcaagccgtgtgggaagtttggggattaccctgtggagaggtgcctcaagcagatggagcgtgctttcaattttggggataatcagatcttgcaaatgtatgggtttacacacaagtcgcttggcagcaggaaggtgaagaggatcaggaatgagactagcaacccacttgatgtcaaggatgaactagggttgctccacccagcattcaaggccatgaagactacttctacgtgataagtgataattagagtacaatgccacgcgttatttcgttcattgtagatccttttgggtctaaaatcttaaaaaggtgttctttttgtagacttgggttgacaagggagtttgggttgggatcaaacatcaaaggatggatatctatgttgtaatgtgaaattttaggagaacaatggtatgtttattgctggc

SEQ ID NO: 14311 - DNA, 2238 bp, Oryza sativa
  ref <308>: DATABASE ACCESSION NUMBER: AK064919
  ref <309>: DATABASE ENTRY DATE: 2001-12-06
tggtgggtggtgtcccagaagcacatcctgacatgggcgcacatggcggcgagcggcggcaccgagaggctggccttcctggtcgaccggcattggcccgccgtgtcccgggcctgcgtgagctccggccgcctcgcgctcgccgcgctgcggcaatggcgcggctgcgcggcgcgcgggatcctggagatggctagcctgggccctgcgtccgtgttcgtcatcctctggagcttcttcgtgtgcatcacctcgccggcgtgcgccctctacgcgctcctgggcatgggagctgctggggcagtcattcattacatgggctatacgcctggtcttttcattgtaggattatttggaatattgattatgtggatgtatggctatttctggattacaggaatgcttctgattgctggaggctgtatgtgctctttgaaacatgcacgatttgtgatacctgtgttggctatgtatgctgtttattgtgtggctgttcgtgttggatcgcttggtgtcttcttgacattgaatctttctttcctgacaaatgatcttctgaataagttgctgcaaggatacgagggaagcacagaagaaagacagtttgaagagccaaaacattctgatcctgtcatggatgagttctatcgcagttgtgaatttccctctgctcctgatagtgaacctgagactgtttcttctgcaaagcccttttgctcaacacccgtccaggatgtgttgcatgtacagaaagaggcatctcctagcaaagtagtgaaatcggattctgtttcattggatgagatgaagaggatcatggatggtttgacccattatgaagttttgggtattcctcggaatagaagtattgatcaaaagattctgaaaaaggagtaccacagaatggtcctgcttgtacatcctgataaaaatatgggaaatccactggcctgtgaatcattcaaaaagcttcagtcagcttatgaggtactctcagatttcacaaagaaaaacacttacgacgaccaactgaggaaagaagaatcacgtaaaatgactcagagatcacgtgttgtctctcaacagactggggtagagtttctctccgaagagtccaggcgtatacagtgcacaaaatgtggtaattttcatctgtggatatgtaccaagaaaagcaaagcaaaagcaagatggtgtcaggattgctctgattttcatccagctaaggatggagatggatgggtggaaaataaattttcgtcatccttcaaggaaatacctcgagcttttgtttgtgcggagagtaaggtatttgatgtgtctgaatgggctacttgccagggcatggagtgcaaacctaacactcacggcccatcttttatggtaaacatggttggcgcagataggatgtctcagagatcctacagttctcgctatccctttagtttgaatgctgagatgatccctgaagatgaatttgagctatggcttcaacaagcattggcatcaggtgtcttctctgacagcccgaaacgcaggaaaagctggagccccttcaaactacctcaaaaagggataaaaagttggcggcgatcctcataagggcatagcattgaacagcatggatctcacctgagtacaacactgaaaaaggctatactctttgtgaatgtaaatagactgaccaacaatttgcctggatgagcaactaattttgtccaaaaagagactgaaacaaggggggtaaaaggaacaaacgcttaagacatgactgcaataaatctgactgttgaaattagtgttctctgcaatgagatcccgcgagttttatccgaaaaggtcagacactgggatggtgtgtcattcatcagttcatcctaagctcggaagggtatctctgtagcatgttaacttcagtagttttaggggatcggcatctgagagaatttcaaaacttcatacctggttgccagcataagttctgcaggtgttgaaaagttgttgatcagagtagcaatttaaggtctgatgtttctggggaacagtaggagagaaaaaaatgacaaaaaaagagagagtaggttgtaaatacatgaaaagttttcatcagaaattagtgttgtaacattgtacactgtgattacatcctgtgcaatactcccataattcagatctgtgttgtaatacactacatacatcctacaattttctggtgataatagagatctaattctcacc

SEQ ID NO: 14312 - DNA, 1943 bp, Oryza sativa
  ref <308>: DATABASE ACCESSION NUMBER: AK064920
  ref <309>: DATABASE ENTRY DATE: 2001-12-06
gactccggcgagctataccaagctacgaggtgaagaagctgagagtgatcgatcgatcgagtgttcgacggcggcggcgaggtcgaagatggtggacatgaacgacgtgctgctggtggtgtcggcggcggtgctggcggcgatgtggtggcggcggtgttccaggaccggcggcgccgacggcctcccgccggggccgccggggtggccggtggtcggcaacctgttccaggtgatcctccagcggcggcccttcatgtacgtggtgcgcgacctccgcgagaagtacgggcccatcttcaccatgcggatggggcagcgcacgctcatcgtcgtcaccgacgccgacctcatccacgacgcgctcgtcaagcagggcgcggcgtttcgccagccgccccgaggacagcccgacgcggctgctcttcagcgtcggcaagtgcaccgtcaactcggcgccgtacggcccgctctggcgcgcgctccgccgcaacttcgtcgccgagatcgtgtcgccgccgcgggtgaagggattctcgtggatccgcgagtgggccgtcgggagccacctccggcggctccgcgccgagttcgccgccaccggcgccgtcaggatgatggccaactgccgcctctccatctgcagcatcctcatctgcatctgcttcggcgccaagatccccgacgagctcatccgcgagatcgaggaggtgctcaaggacgtgatgatgatgaccatgcccaagctcccggacttcctcccgctcctcacgccgctcttcaccaagcagctcgccgcggcgcgcgaactccggcggcgccagctcggctgcctggcgccgctggtgcgcgcgcgccgggagttcatcaggggcggcggcgagaggaacgccgacgggaacacggtggtcggcggcgtggagatggtgagcgcgcccggcgaggcgtacgtggactcgctgttcgacctggagccgccggggcgggggaagaggctcggcgaggacgagctggtgacgctctgctccgaggtgatgagcgccggcacggacaccagcgccaccgcgctggagtgggccatgatgcacctcgtcctcgacgccggcgtccaggacaagctctacggcgaggtcgtctccaaggtcggcaccaccgcgcgcatcaccgaggccgacgtcgaggccatgccctacttgcaggcggtggtgaaggagacattccggcgacacccgccgagccacttcgtgctgtcgcacgcggcgacgagggacacggagctcggcgggtaccgcgtgccggcggacgccagcgtggagttctacacggcgtgggtgacggagaacccggcgacgtggccggacccggaggcgtggcgccccgagcggttcctcgagggcggcgagggcttcgacaccgacatcaccgccacccgcgccctccgcatgatgccgttcggcgccggccgccgcatctgccccgccgccaccctcggcgtcctccacatccagctcatgctcgccaacatggtccgcgagttccgctgggtcccgcccgccggcgagggcccccccgaccccaccgagaccttcgccttcaccgtcgtcatgaagaacccgctccgcgccgccctcgtcgagcgccgcgtcggcggcgagctcgccaccggcggcggaggcggcgccgccgcgtccgcctaattaagtactacgatataaatacttcggtagctgctgtccgttggatggcggatggacggacggatggatggatatgcagatgatgtcttaaatttttacttaaatagagtgttctcttgatatcttcttcttctttgatttttttttgttttattagtggatctcttttttcttttctctcttgtttttatccaggattaagtgtacctactgctgcttgatctgctcatatatatattggtttcc

SEQ ID NO: 14313 - DNA, 2413 bp, Oryza sativa
  ref <308>: DATABASE ACCESSION NUMBER: AK064921
  ref <309>: DATABASE ENTRY DATE: 2001-12-06
gaggcggcaatggccaccgagccttccacctccgcaccagcctcccccgccgccgtcgccggcggcgacgactccctcgagccatggagcgcgcgggtgcgcaccctgacgcgcctcggccggcacagggaggcccttgccctcctccgccacggcgacccctcgccgccgccgcacgccctggcgctcccggcggcggtgatctcctgcgccaagctgcatctcgcctcgggcgtcgcccagatacacgcgctcgcggccaagcgcggcctcctcccgtcctccgacgcctacctcctctccgcgctgctctcctcctactcccgcctccgcctcctcccgctcgcccgccagctcctcgacgaattgcccctcgcgtccacgccgcccgccacggcgcgcaccgcgttcaactccctcatctccgggtgcgcgctccacggggtcccggccggctgcttctccctcttccgccgcatgcgcgtggccgccggcgtccgcttcgacgccgtcacgctgctggcgctcgtccccgttgctcccctgggcatcgtgccgcagctccacgccctcgcggcgcgatcggggctcgccgcgaacacttccgtggccaactgcctcgtgtctgtctacgcgcgcggcggcggcggcggcgcctcccttgcccgccagggttttcgaggagatgccgcgggcctcccgcgacctcgtgtcgtggaacgcggtgatctccgcccacgcgcagaacggcctcgccgtggaggccgtcgagctgtaccggcgcatgcgtggcccggaaggcggcggggtggaaccggacgccgtgacgctcgtcggcgtcctctcctcctgcgcgcacaccggcgcgcgccgcgtgggccttgacgtcgagcggtacgtgcgggatacaatcccgggcttccgcgacaacctgccgctctgcaacgcgctcatcaacttccacgcgcgctgcggcagcttggcccaggcgcaggagctgttcgacgaaatgcccgagaggagcgtcgtctcgtggacgacgctgatcatcgggtacggcatgcacggacagggcgacatcgccgtcgacctcttcgagacgatggtgtcggaagcaaccgcgccggacagcgtggccatggtcggccttctgtcggcgtgcagccacgccggcatgtacgacgaagggcgcaagtacttctcaacaatggagcgcgattactgcctccggcccaaactggagcactacacctgcatggtggacctcctcggacgagccggccgtctcgacgaagcacgggagctcatcgcgtcgatgccgatggcggccgacggcgcggtctggggcgcgctgctcggagcctgcaagatacacaagaacgtggagatgggagaagaggccttcgagcgcgtcgtcagcctcgagccggccaacgtggggtactacgtgctcatggcgaacatctacgccgacgccgggcagctcgacggcgtggcgaaggtgcgggcggcgatgaggcggcgcgggctcaggaaggagcccgggtgtagctacgtcgagcacaaggggaaggtccacctgttcatggccgacgaccactcgcacccgcaggcgaggaggatctacgagctcgtggtcgagctggagcggatggtgaaggagaagacgggtggcgatgtggttgaggagcgcgctgagaaggcggtagcggaggcggcggccgtgccattggtggggttccacagcgagaagctggcggtggcgttcgggttgctgaacacggaggcgggaagtgagatcgtggtgatcaagaacctgcgggtgtgcggggactgccactcgtttctgaagacgatctcggagttgacaaatagagcgtttctcgtcagggacgcgagccggttccatcgcttcgagaatggggcctgctcctgcagagactactggtgaagaatttggtgtgcctggtgaaggaaacacaaatgggaactcaaactttggtgtgcctggtgaaggaaagacaaatgggaatacaagctggttgagatctgccgcggaacgtgatgttggctaccggcaaaccgttggacagcaagacagagaagccgtcgaaccagtgccgtccgatctcgagagtgagcaggaagacgttcggcgaactgtcactcagaaccggagtttaggctggaagcgcaagccgatggaacaattccgatcggtagaggagacaaaaaaaaaaatcaaaacaaaggcctgaaattttgcattttttacacgccccctgatctaacaatgatctcgtgcagtcgtgtgccgttagctaagtgttgtcaggttctttgtgcaggatggacatgggcacatggctgccgatagcataaacatttgataaagaatgactttaagctcgat

SEQ ID NO: 14314 - DNA, 3232 bp, Oryza sativa
  ref <308>: DATABASE ACCESSION NUMBER: AK064922
  ref <309>: DATABASE ENTRY DATE: 2001-12-06
ggatgactccgccctcctcccatccccgcgctatacctcgctccgcactgctcgcttcttcccgtcgccgccgcacaccaccacgccctgccccaccagcgccaggtggatctcctttccgccggagcccccgccagcgccgggtggttcccctttccgccggagccctgcctgggattacccgtcctccgccctcctcgcttcttcccgtcgccgtgcacaccaccgcggcctgcccccgccggcgccggggtggttcccctttccgccggagtcctgcctgggtctacccgacggcgccgaggtggtatgccctttcccaggacccgctgcggcacacgccactctggtttgcgactctcctcccctgacgacattttgatccccttcgcatgcctaagcaacccatgtgaaggacaacgcctccagctgcatcgcctccaagccatcgactgcggccggtataatggaggtgataaggagaggttcgcggtgatttcttccctcctttctttcgcccagcacctacttttggttcgactggatgaggcaattagccaaacaatagcagtggcaggatgcaagccatgacagccatggagactatttcattgctgcagcccactgctcttccagctctgccgacaaccacacctacaagagctacagctgaagcatcacatagggcagaggaggcatcacagtccgctcttgacggctctgaaggacaccaaggtcccaagccttaggttctgtaaatgatcctgactagggtgaccagtaaaagcgaggattgtggtttggaattatgaagagcgcatgacgatttgcaggtgattgtgagcatatcacgcgcacctagcaaagtgtgagtactgattacaaacttgattttttttttaattttacgaaccaattggattcaattttctctgctaaatcacctcatcatcatcggtgagatgtatgtgcacttccaatttgttttgctattacactttgttccaaaatagctataggttttgcaggtctgttgaaatagatttggaataccagaacacctacctctaaaacacaataaaattacctttcactttggaatcttaaggtgcagaacaaaggttttttactgcaatacaaattttgtgcaattccaaatgttctccttgatgtactaggtgagatttttaatcacagtggcctaattgatatatgtatctgagctggcaaggatgtggaaagcaagcatattcttgaagctatctgggcttgaccacttaaatcaaaatgatttcttgctattccatttaactaatgttaaagtcgcgtgaaagttctcttagattagatatccttatgcatgcttctacaaaagagtccttttcatcttgttgggatggcctatttgttgcgaatcacattgttgggttatcctgtataataattacccaaaagtatttgggagagagaagtttctttgccacaaagaatttgaattttgataatgtaaataactgactccttaattaaaggtcttcttctccctaattaaagttttgtttattctgtatcaggcttgtgtagaggagaaagggaagctagcaaaatttgtgggtgaagaaactaacagattgaagtccagtcccttgttagtgtgatttttttttttttttttttttgcgattgcattcattagttccatcactgacaatctgcctgccatactacccaactgtagtaaaagatattgatagatgacatgatgtttcaaatagtggttagcaagtaaatcaatgttatattaaaaaaatatttaccttgctacccaactaagggcctgtttagatcccctggcaagttttttcatcctgtcacatcgaatgtttggacacatgcataaaatattaaatatagacaaaaaaactaattacacagattatgtctaaattgcgagatgaatcttttaagcctaattgctccatgatttgacaatgtggtgctacagtaaacatttgctaatgatggattaattaggcttaataaatttgtctcgcagtttacaggcggaatctatgatttgttttattattagactacgtttagtacttcaaatgtgtgtccgtatatccgatgtgtcacgacaaaaattttcacccctggatctaaacacagcctaaagcaatttgccttgcaggttcatgaatagattgatgttttgatgatatgaccaatctgctgctaaaaatgtgctacaggtacccaaatctcaagccttattatggcactgaataacttgaaccgaaaatttgatgttatataaattaagtagatctcatctactataaagatcttcagtagccatgtttaatgaaatcatgaggtaagtacatattcatgttttttagaaaactagagcttcacatagacacatatctaatttgctgtcactaggaagcttgttgttagaggattttacagttttctgaagtttgaaattaattcagttcctttttaatggaggtagtcttggtacattggctcatatatatacgtgtttcaaattagtgtattacttgagttcattttttgagtggattattcagtgataatgtactctaccattttttcttttcttcttcttttatcacagattgagccattggattgtttttcaatcgttcactatcttactatggtagaaaacgaaactttaatctgttttcatatcatttgtccttactaactatccttttatgtagtccagaaaattaggtcgcaggtaccaaggtatcattagtatggtctccatttatatgcaagcactaggtttagtgtcggaatggtttgttttgggttcttggtcttttatggttgtgtgtttgtgtccgctgcaggtagaggggagttggaggggaatggcagctcgctgcaggtagaggagagttggagtggaatggcaagtgcgagtgaggcgaatggattgtgctgccattcaagattgactttagaagttctcttctttttttcatcttaccgataattcaagattgtgctaccatatgtttatcttttgagttaacaccaaatgtctggtggttgccgattgccgtgtggatttcgaagcttgacaattgcttatttctttagagtgaatctatttctaacatttcatattactaaaccatataagtttgattcatgaggtaaagtttgtaatatatatgaagttcct

SEQ ID NO: 14315 - DNA, 1069 bp, Oryza sativa
  ref <308>: DATABASE ACCESSION NUMBER: AK064923
  ref <309>: DATABASE ENTRY DATE: 2001-12-06
ccccccccctcgccgccgccttctccatcgtaaaccctcgtcagtttggaacaatggcgttggctaataagattggtaatctgctcaagagagccacgagctcaagtccagctctctatcaatcaatcagatgcatgtcatcctcaaagctttttgttggaggcctttcgtacggcacagatgagcagagcctcagagatacttttgccaattatggtcaagttattgaagctaagatcatcaatgaccgtgaaactgggaggtctagaggttttggcttcataacttacgcatcaagtgaagaggcttcagctgcaatcacagccttggatggaaaggatctcgatgggcgtaacatcagggttaacactgccaatgagagaactggtggcttccgtagtgggggtggtggctatggaggcggtggctatggcggcggcggtggcggctatggtggtggtggctacagtggtggtggtggctatggcggtggtggctacagtggtggtggtggtggcggcggcggctaccaaggaggcggcggtggttatggtggcaacaatggagggtatggcaacaggggtggtggtggaggtggttatggagttgcagaaggatctgcagatgccttctctggaatcaacttaggtggtgatggtagttttggtggaaacccagctggaagctttggtgatgctggaggttccactggcggtggtgatttctccggtgccggtggtgacagctttggaagccgcaagaacgatgagctcatggatgacctcttcaaggatgacgagcctgacaactatgccaacaagcagggctaattaatctacgtccttcgagcctcagtttgcagtctcttagtgatgaaccggctcacctgaatggtcatcacctgctcaagcatcaaattccagaacaatacacaatgactgggttttctttttcttctgttctttttcatagatgtggtgtaataacgtaaacatcactcaaggtactacttctagttatgttatgttgagatgacaatggaggtgttttaaatgtctgtttttattcc

SEQ ID NO: 14316 - DNA, 2218 bp, Oryza sativa
  ref <308>: DATABASE ACCESSION NUMBER: AK064924
  ref <309>: DATABASE ENTRY DATE: 2001-12-06
gggtcatcacggatcaagaagaagattagcttagctagctaaaaagtaagtagccgtgcgaagtcgccggcggtgatcagccggcgatgacgacgtacagggtgtgctgcttcctgcggcggttcagggcggcgtcgaacgagccgtcggaggagctcggcgacgtgttccaggcgtacgccgacggcggcggcggcgtgatgggggaggaggcgctgaggcggttcctccgggaggtgcagggggaggccgccggcggcggcgacgacgagctggaggcgacggcgagggaggtgatggccttcgcggcggagcagaggctgctcaggaagggcggcgccgctgccgccggcggcgggctcaccgtcgagggcttccaccgccggctgtgcagcgacgccaacgctgcactggatcctcagaaacgggtatatcaagacatgggattgcctctgtcacactacttcatctacacggggcacaactcatacctgacggggaaccagctgagcagcgggtgcagcgaggtgcccatcgtgaaggccctccacgacggcgtccgtgtcatcgagctcgacctctggcccaacgctgccaaggacgccgtcgaggtcctccacggcaggacgctgacatcgccagtgggtctgatgaaatgccttgaggccatcagggagtacgcgttcgtcgcctccccttaccccgtcatcctcaccctcgaagatcacctcactcccgacctccaatccaaagtcgccaagatgatcaaggagacgttcggtgacatgctctacgtctctgaaactgagaacatggcggaattcccttcgccggacgagctcaaggggaagatcatcgtgtcgacgaagccgcccaaggagtacctccagaccaagaacgacgccgacgccgacgaggccggcgtctggggcgaggagatcaccgacgacaaggtggcggcgacggcgatgacgacagaagagaaatgcgcggcggcggaggaagcagtcgccgccgccgccgtcgacgaggagatgcaggaggccgagacggacaagaagacgcagcacggggtggacaacgagtacaggcgcctcatcgccatccctctgacaagaagaaagcacgacatggatcaggacctcaaggtcgatcccgacatggtgacgcgcctcagcctcggggagaaggcctacgagaaggccattgtcacccatggagctcacattatcaggtttacgcagaggaaattgctgaggatattccctcggtcgacgcgcattacgtcttcgaattataatcctttgatgggttggaggtatggagttcagatggttgcagcaaacatgcagggccatggaagaaagctgtggctgactcaggggatgttccgagcaaacggcggttgcggttacgtcaaaaagcctgatattctgatgaacaacgatccagataaactgtttgatcctacatccaaactaccagtaaagacaagactaaaggtgacggtgtacatgggagacggatggcgattcgacttccgcaagacacatttcgacaaatgctcacccccagacttctatgcaagggtgggtatagccggagtagaagcagacacgaggatggagcagacgaaggtgaagatggacacgtggattccggcatgggatcacgagttcgagttcccgttgagcgtgccggagctggcgctgctccgggtggaggtgcacgagtccgacaaccaccagaaggacgacttcggcgggcagacctgcctgccggtgtgggagctccggcgaggcatccgctccgtcaggctctgcgaccaccgcggcgagcccctccgctccgtcaagctcctcatgcgcttcgacttcacctgactactccatcttcttcttcatcatcgtcatcgtcttagtagtagtagttccatgtatgatatcatgagggatgaagcattgatcgtactttctccgtcccgaaatatagcaatgtaggattagatggaaacatcttaatactacgaatctggatatgtcctatctggttctggtttgctatgttttaggacgaatatagtacataaaattttagaagttttgttttaaaaaagaataaattttgtgcgaaacggaaggtgtgattgtacattttgtacgtacattgtttgttgttgattaataaacgtgttaataaaagagggaaggattctttt

SEQ ID NO: 14317 - DNA, 2973 bp, Oryza sativa
  ref <308>: DATABASE ACCESSION NUMBER: AK064925
  ref <309>: DATABASE ENTRY DATE: 2001-12-06
ggttcaaaagcctcaaagcccaagagaccagggcggctacctcctcctcctaccaccaccgccaccactagtccccccccctcccccttcagccaaagcctgcgactatccgcaacctcaacctcaacctcacgcagctcccgcgccaaccgcgacctcccggatccggccacgccgcccttttccggcgagatccacctgcgggaattccgtggttgttggaggcgccgcggccgatacagggcggggtgcggttagatccatggagatatggagatggagctgagctgagctagcagcggtagtacagatcgtggctcgcgcgtggcgtccctgtccgttggttcccggcgggtggtgcttttgggaggagtcgaggaggaggaggaggaggcatggccgccgcgatggagatggcggcgaatccaggtggttcaggaacctgcagcgatgcactattccgggagctatggcatgcttgtgctggtccgttggtcacggtcccgaagcgcggcgagcgcgtctactactttccccagggtcatatggaacagcttgaggcgtctacaaaccagcagcttgaccagtacctgccgatgttcaatctaccatccaagatcctatgcagcgtggtcaacgtagaactccgggcggaggctgattcagatgaagtttatgctcaaattatgctgcaaccagaagctgatcaaagtgaactcaccagtctggatcctgagcttcaagatcttgagaaatgcacagctcattccttttgcaagacattaacagcttcagatacaagcacacatggcggtttctctgttcttaggaggcatgctgaagaatgctttcctcagctggacatgtctcagaatccaccatgtcaagaactggttgccaaagatctccatggaactgagtggcatttccgtcacatctttcgtggacaacctaggaggcatctgcttacaaccggttggagtgtctttgttagctcaaaaagattggttgctggcgatgcatttatcttcctgaggggcgaaagtggtgagctacgggttggagtaaggagacttatgagacaagtaaataacatgccatcatctgtcatatcaagccacagcatgcatcttggagtccttgcaacagcttcccatgctatctccactggaaccctcttttctgttttctacaaacccagaacaagccggtctgagtttgttgtgagcgttaacaagtaccttgaagctaagaagcagaacttgtctgttggaatgaggtttaagatgagatttgaaggtgatgaagctcctgaaagaaggtttagtggaacaattattggtattgggagtgtgccagcaatgtcaaaatctccatgggcagattctgactggaaatctctgaaggtccaatgggatgaaccttcggctattgtccgtccagatagagtttcaccatgggaactggaaccattggatgcgagtaatccacaaccacctcagcctccattgaggaataagcgtgcaaggcctccagcttcaccttctgtggttgcggaacttcctccaagtttcggactatggaaacccccatctgaagcagcccaaactctctcattttcggaaccacaacgggctcgagagatatttccttcaattcctgcatcaatcttctcagcatcatcacatgttgaattcaattcaaagaacgagccatccatactaagcaatcagttctactggtcaatgagggattcaaaaactgattctttttctgctagcactaacaaaacaagagttgaaagaaagcaagaaccaactactatgggttgcagattatttggaattgaaataagctcagctgtagaagaagccctgcctgcagctactgtttcaggtgtcggttatgatcaaactgttctctctgtagatgtggactctgatcagatctcacagccatctaatggcaataaatccgatgcccctggaacaagcagtgaacgttctcctcttgagtcccaaagtcgtcaagtgaggagctgcacaaaggtaattatgcaaggtatggcagttgggagggctgtggacttgacaaaactaaatggttatggtgatcttcgcagcaagttggaggagatgtttgatatacagggggacttgtgtcccaccctgaagagatggcaagttgtttacaccgatgatgaggatgacatgatgcttgtcggggatgatccttgggatgaattttgtagcatggtgaaacggatttatatttactcctacgaggaggccaagctgctggctccaaagtctaagctgccagtcataggtgacaccatcaaattgagcagtatgaactcatcacatgaatccgtcgacctggacaatcatgcctcagttactaacagggactgctaaccattgactttgccctaattctgatatgatcatttgaggaaattccaatgtttcttcattactgcttcctgtgctgaagacgcaacgcccttttgtcttgaattgtggtggtatttgaactgcaagtgccaggaagttcccaagactggcaagaccgcctggaagaggcattctggcaaatgcatgccgttccaaattgttttgtgttttggtaggagccttggcgttcttgtctggtgcccagatttaggtaagaagtcctgaacaccaagattgatgacgcttcggccctctccccgttgcttaggagtaaataggatttgcatatgtatatatagtatcattaggattcctgattgcctgctattgtgattccaagtaatttggatgcattaatgcaattattattcagtaattgttatttttagcagcaaacctgtgagtgatggtggtggatgtgttgatcttgcagcatttgctacctttctctccattgtggaagccatctgtacataaacaaactactatcaaataagtaatgttgtgctttctaacc

SEQ ID NO: 14318 - DNA, 2333 bp, Oryza sativa
  ref <308>: DATABASE ACCESSION NUMBER: AK064926
  ref <309>: DATABASE ENTRY DATE: 2001-12-06
gagggttccagaaccttctcgatccctcctccccctctccgcctccgcctccgccctcctccgctccgatcgccgccggctcgtcgccggtttcataagccatgttcaagaagcatgttgatgtaaaggctctacagcgtttgtcgggagctgacaaaaagaagctcagaagaactgccaaggaaaggttcccacaagcatctgatgctgaccttgatgccatccttcctcccaaggttgaggtaacagttgctaagtacccaaatagggttcttgtatatggcatagagggagagttcccaatgcttttcgacattgatggaagaggccatgagctgtttccaacagtttatgcactctggaaggttcccgatctgttgcctgcttttacacttaagggtggtgaagtctcacgcttcatactggggggtgccgatctgatgtttcctggtattagcatacccccagaagggcttccttcctttcaacctggccagccatggtcagtaaaggttcctggtaatcctgctccaattgctgttggggccacaactatgagcagtaatgaagccttaaaggcagggttacgtggcaaggctttgcggattactcactactttaaggattcattatgggattctgctgatggtcgctatgttccaaatgaaggattttatgaggacattgttgttgaagatcgtaattatgcttcaccgtctcaacctgctgattcttctgaagatcatgtagaaggcatgcatgacagtaccattgaaggtgaagaagctgcagttgatgtttctgagagccataccacagatcatgacatccacgttgaggccatagaagatttaactgctggtgtgagtgaggtgaaattgcctgaagataatgctactgaggaaccaactgaggaaagggaacatcagaatttgtctacggaagaaattgactctcttttagataaatgtcttctgcaagctttacacacgagtgtaaaagataaagaccttcctattcctggaagtacattgtggtcaaatcacatactcccctgcagacctacaggtgttactctggatattaagaagtcatcacacaaaaagctatccaagtggttgcaatcaaaatcttccgctggccttatttcatcaaaagaagacaagcataaaaaggaagtcatgttgcttcgtatcaatcgtgggcatccagattacatggcctttaaaccagaaaagagggtacaggagcctgttgtacagcatgataatgttgttgctgaaggtagcagcacgaagcaactggaagtagcagaaacttataagccaagctctcatgttaaccccatatttatggctgttggagcggacacgagcaagtactatagtgcatcagaggcatctgacatagtcttcaggtacgttgaaaaggaaaatttggttaaacaaacagacaaggccaaagtagttttggatgttgcattatgcgacgctctctacaaaggagccatcaaaaagggttcagcatacccaaccgagatccacaagagggacctggggtcaacatttttaaaccgaatgcagattcaccatagagtagcaagagggagcgaggtggtcattcgcaagggcgccatacgaaccattcagatcatgacagagagaaggcaaggaaacaagaagatgacccggctatctggattggaatgcttcttaatggatcctgactcgttagcttctgagctgcagaagaagtttgcttgcagcaccaccacagctgagcttccaggtaagaaagggcaacacgaggtcttggttcaaggtggagtcatcgatgaccttgcaaagcaccttgttgatcattacggtgttccgaagaggtttattgaggttcttgacaaaacaaagcgttaggggacaggacagaagcaggcagactctcagtgccggaggagcctgaagtatcttcagggacagcgcaggaagagaatgcagaccaatgcttaacgatatcaggattgtattctgtgactgccatcatcagaagaaattatgagaagatacctcttctcaccacctctggtttttatgcttggaaaatacttttatccttttttgtgtttacagaaaaatgagtagggctgttctgacttctgtctgaaattttggtgtgtacccgttccttttttgtaacgttcttttggtgccgtgttcattctcctgaaaaagcaccttttttgtgtgagatacgtgttacgtttcgttagtgacagacagggtttgacgctttttaacatggcatagtgctatggttaattcaatacatgctttcat

SEQ ID NO: 14319 - DNA, 1251 bp, Oryza sativa
  ref <308>: DATABASE ACCESSION NUMBER: AK064927
  ref <309>: DATABASE ENTRY DATE: 2001-12-06
ctcctccctctttctccgcgagagagaggccgagcagcgaccgcggcggcgctctcccccctcccgccgcctccacccaccccgtgctcgccggcggggcgaagcctccggtgacaatccccgatccgatcgccgcgctcctctcctctacccccatcccctcctcctccgacgcctccgcccgcccgccgccgtacccgtaccaaccggaaagcgcagctgatccgatggatctcaaggatagcctctccaaatttaagcagcagcaagagaggtgccaatcatctttggccagcatagctgcatcgacctcaaaaccaaagcacagggcccaaccggttaatgctccatccgctccagcaaggccactacaacctattaagttttcaaatgatacagaaaggctacaacacatcaattcagttaggaaatctcctattggagcacagatcaaacttgtcattgaattgctgtacaagacaagacaagcttttactgcggagcaaataaatgaaacaacttatgttgatatccatgggaataagtctgtctttgacagtctgaggaacaatcctaaagtacattatgatgggagacgtttctcttacaagtccaagcatgatttgaagggaaaagatcaactacttgttttggtaagaaagtatccggagggtcttgctgtggtggaagtcaaggatgcgtacccaactgtaatggaagatttgcaggcactgaaggcagcaggtgaagtttggctgttatcgaacatggattccctggaggacattgtgtatcctaacgacccaaaggcaaagatcaaggtcgacggtgacctgaagcagctcttccgggagatggagttaccgcgggacatggtggatatcgagaaggagctccagaagaatggcatcaagcccatgaccaacacagctaaacggcgggctgcagcacagatcaatggggtgcagcccaaggctaagcctaagaagaagcagcgtgagatcacacgccggaccaagctcacgaacgcccatctgcctgagctgttccagaacctcaacacttgattgctctacgcttattcgacgtcaagtggagatatttatttctgtcctcactctacctactgcaatgctttatatacctgctacccttattgtgtatgttataaatgtaattccggcctccgggagcataatctgagacggtcagctttgtaaaacataaatcaattcaagagcttgagatggc

SEQ ID NO: 14320 - DNA, 2372 bp, Oryza sativa
  ref <308>: DATABASE ACCESSION NUMBER: AK098860
  ref <309>: DATABASE ENTRY DATE: 2002-08-28
ggagattcgcgcccgccacttccgactagctcttcgcggcaaaagagatcgccggctcgccggccggcccggagcgcgggggttccgcttccgcggcggagcagccgtcggctggggaggggagatggacgccggcgagctgcccatcgtgtaccacatcggcatcgtgctggccgcgctgtgggccgcgggctccctcggcttccgccactccgtcctcttcctcctcgccttcctctacctctacatggtaaatgctcgctgtgcaatgaaattgcggaagagaatacaacatgaagaaatgaaatctgcctaccaacgaagactgctatctgatgcagaatcagtacgctggttaaattatgcaataaaaaagatgtggcctatctgtatggagaagatcgtctcacaacttctacgacccataataccatggttcttggataagttcaaaccttggacagttagtaaagcaggagttcaggagctttatatgggcaggaattcaccactgtttacttcaatgagagttttacctgagacatcagatgatgaccatttggttctggagatagggatgaattttctatctgctgaagatatgagtgctgtactttctatgcagctgcataagagtgtcggacttggaatgactgcaaacatgcatctgactagcatgcatgttgagggaaagattctagtcggtgtgaagtttgtccggagttggccatttcttggccgtgtaagactatgttttgtggagcctccttattttcagatgactgtaaagccactcattggtcatgggcttgatgtcactgagtttccaggaatttcaggatggctggataagttgatggatactgcatttgggcagacattagttgagcccaatatgcttgttatcgatgtggaaaaatttgtatcgactccctcagacaatgactggttcagcattgaggagagacctcctgttgcatatgtgaaacttgagattttagaaggatccgacatgaaaccatctgatatgaatgggctctccgacccttatgtgaaaggtcgtcttggtccttttaaattccaaactcagatacagaagaaaacactatcccctaagtggtttgaagaattcaaaatacccattacatcgtgggagtcattaaatgaacttgccatggaagtgtgtgataaggaccacatgtttgatgactcgcttggaacatgtactatagatatccatgagctgaggggtggtcagagacatgacaaatggatatcactcaagaatgtcaagaaaggaaggattcacttggcaataacagttgaagatatatcagaggagaaggggttggaagaatcatcaaggaaagttgatgctgaactaccaatatcaacatccgtcaacaagtttaatgctgatgaactgcctgatgaaaagcaagtcttagtagatgaagtggagcacattaacattgatgggcaagaacaacctggaggattatatgtgcatcgccctggcactggagttcccaagacatgggaatcacggaaagggcgagcacgtaatcctgacacggagatttacaaagaagttgacaaatcaaaggatgcgcctaccccaaaaagcagtggacaagggggtttttttggctcctttttccggaagagcttgaagaagggaagtttccatgatattgatcccggtattcctacaacgccagggcctcagagtgcaacagagcttgatccgaagatcccacaaactccacgtccaaaccttaaggaggccggtgaaaaacggacatcgataaagatagtagtcgatgaagatgcgaaaccgacaaggagtgcgggagatgcagagaacttgacagaagatgtagccaaggtgatggagaaaaacgcaggtgagccaggtagatcactgacaagcatactgagtagaaagatttccaggaagaaaccagaggacaagctgtctgatatcccagagcagactgaagctcaagcatctgagttggtgaaagaagggcctgttccagttgagggtaaacctattgatggtcatccgacaactgaaaatggccatggagatggtgcttcaggagaagcagctgaaacgcaaactagtgctcagacttcacaatgattacaagatcagccgctgctgttgttgctggtagttgtaggtttgctttgttgtgcttgtagaacaaaattactttagagattgtgttacttgtaaaatacaacaaaacatgatcatgttgtaaagttacctgctcaggtttatacacgtccatgtaaatcaaagttcatactgtaataacttgtaagtatgtaaacatgactacacgagaggtttgagggtt

SEQ ID NO: 14321 - DNA, 912 bp, Oryza sativa
  ref <308>: DATABASE ACCESSION NUMBER: AK098861
  ref <309>: DATABASE ENTRY DATE: 2002-08-28
gcccctgcacctgcgaactctccacgcctccacaaataaagctcgtcccgaggaagggcggcgacccaccccccccaatcgccaaaaccctaactccgatccgatcgagctctgcttcccatggcgactgccgcgagccaggcgagcctcctgctccagaagcagctcaaagatctcgcgaagaaccccgtggatgggttctcggcggggcttgtggacgatagcaacgtgttcgagtggcaggtcaccatcatcggcccgcccgataccctgtatgatggaggctacttcaatgcaataatgaccttcccccagaattatccgaatagtcccccatcagtaaggtttacctctgagatgtggcatccaaatgtttatcctgatgggcgcgtatgcatttctatccttcatccacctggcgaagatcccaacggttatgagcttgcgagcgaacgttggacacctgtgcatacagttgaaagtatagttctgagcatcatttcgatgctctctagtccaaatgatgagtctccagcaaatattgaagcggctaaggattggagagaaaagagggacgatttcaagaaaaaggttagacgcattgttcgtaaatcacaggaaatgctctgaaagataaggagcacaagggggagtaagcgagtgctacaacaggtgcactacacttaactgtctgtcgtcaaacgactacctaaagatagcatttttgcttcttcccctgtatatttccccctcagtgtcattcgagtggtgatgttggtcttgtctccgagatgctcggaaatgttgcctattctagaaatttcgattgtattgtgtggcatggagtgtcaacgttgaggaatattttggaatgctgccaattagtcataattgtcgtaatgaacttttcat

SEQ ID NO: 14322 - DNA, 859 bp, Oryza sativa
  ref <308>: DATABASE ACCESSION NUMBER: AK064928
  ref <309>: DATABASE ENTRY DATE: 2001-12-06
gtctcctctccacgccattccagaaccaaccctcgccgccgcgtcgctcctctccccgccgacgaatccaggcccccggattcccccgcgctatggccttcgccagctcgctcctcccggcgccgccggccagcgtcgccccggagctcgcctccttcctcccgccccaggccaagaggggcgccgtctccctcgccgccacgcggcgccggggagcccggattggagttagagccgaagtgaatgaatctggaagtgctttggctgctgacgccttcgcccaagtcaagcatgttctacttcctgtcaccgaccgcaacccttacctctcagagggcactagacaggctgcagcaacatccgcttctctagcaaagaagtatggagcaaacataactgtagttgtgattgatgataagcccaaggaagagttcccagagcatgatactcagatgtcaagcattagatggcatctctcagaaggtggatttacggagtttgggttgatggagcgccttggggaagggaagaaaccgacggctatcattggagaagtcgcggatgagttggagttagacctggttgtcctaagcatggaagcaatacattccaagcacgttgatgggaatttgctggctgaattcatcccgtgccccgttttactgctcccgctctgaaatgaccttagagcttttctttcacctgtcatgacttgaatggaaggcaaataatctgtttcacctctttccagatgtaatttctacagatgtcttctgggtcattttatggatgtaccttctgaatgattttctgttggattccataattttgattatgtgaatatcaataaaaacatgtt

SEQ ID NO: 14323 - DNA, 1483 bp, Oryza sativa
  ref <308>: DATABASE ACCESSION NUMBER: AK064929
  ref <309>: DATABASE ENTRY DATE: 2001-12-06
ggctcgtcacttcgtctcctcctctccaccactcatcgtcgtcggcggcgtggccatggcgacacccgcgccgctctccggcctccgcccgcgcgctcccgctcccgctcccgcggcgcgcagtcgcctgtgcggccagtcgccgccggtcgtggccccgcggctcggggcgttcccgcggcggcgtggtggggcggcacggtgctcgccgcgcgccgaggccggggacgtggaggcgcttagggcgggggtgtcggtgtacaagccgcggtcctacgacgtgctcgtctccgacgccgcccgctccctcgcctgcgccatggacgagggcaagacccgcctcgagatcgagttcccgcctctgccgagcaacatctcttcttacaagggttcctcggacgagttcatcgacgccaacatccagcttgctcttgctgttgccagaaaacttaaggaactcaaggggacctagatctcgtattgtgtttcctgacctaccagaaaagcgcagggcatcccagttgttcgggactgctctagactcgattgagactgcaactatcagttccctggatgaggtatctaccggacctgttaataccttcttcagatcaatgagagataccctggattttgactttgctgacgatgttgaagatcgatggaaatctgatgaaccaccatcgctatatatcttcatcaattgcagcacacgtgacctttcaactatagagaagtatgtggaacaatttgcctcatctgtcccagcccttctctttaatcttgaactagataccttgcgctctgacttggggcttctgggattcccaccaaaagatttgcattacagatttctttctcagtttaccccagtattttatatcaggcagcgtgactactctaagacaattgcagtcactccatatatcgtgaactacagtggtgctgtattccgtcaatacccagggccctggcaggtcatgcttaagcaagccgatggttcttatgcatgtgttgcagagagtgcagctcggttcactttgggacaggctaaggaagaactgttaagagttcttggtttgcaagaagaacaaggaagctcactagaatttctcagaagaggatacaagaatgctacttggtgggaagagaatgttgatcaggagaaatcgtcagcatggcgaacttgaggttgaggccctgctgctgccttgtctgggtgctgatctgattggcggcgagtgcagacaggaacagaagaaaaaaatggttgtctgaaattgcagagcccaggcgacaaggatgcaaattgcctgtgctgcaattgtacattttgtgattgtaacatgttactgtgtgagtaacaggcattagagttttgagaggattttcctttctttttcgatgattatatatgtgttggactctgcttctttgaagcatgaagcaacttcacattttaaatggaaattcgtgttcatcc

SEQ ID NO: 14324 - DNA, 2412 bp, Oryza sativa
  ref <308>: DATABASE ACCESSION NUMBER: AK064930
  ref <309>: DATABASE ENTRY DATE: 2001-12-06
gacttctgctcattccgaagccttcgccgcgtctcgccggcgtacgccgcaggcgccccacctcctccggcgagccagctcggagctagacgcctgccctccccactctcgccggcggtgggcgcgcgggtggagcccctgcgttggccggacggcgggaggagatgacggtggcggcggggttagggtacgcgctggtcgcgctgggccccgccttctccctcttcgccggcgtcgtcgccaggaagcccttcctcgtcctcacccttctcaccagcactttattctggcttataagtttgataattctctcgggaatatggagggtatttctccctataagatcaggagcttggtggccgtatgcaattcttatccttacatctgttgcatttcaagaaggcattcgtcttgtcttttggaggctttacaagtaggaaaatggaagagatgctggattcctttgctgatagaatatctaaaccgcgcctctgtttgacagacaagatgctaatatcgttgggtaagttcttgcatcactagatcaatatgtccttatttcaagattggcttaatatttctccatccatcgtttatatagaaattatttctctatttggcttgtgtttgccttgaatttttatttaaaataggtacccactgatatctttaccgtcatttcatttctgtgaagaaatacatatttcatttggatatgggatgaatggtacctccatttttttaggtggtctacagttgcaacttttttccacaaaaggaattaaactttaactttgtattattcacaactcacaaatatcccgtaggtttctattttcctgatgtgtcatgggcttgggcccatttcaaggcaggatggcctgtgtggctgtatcacgcgatcaatatacttatttactattcacatggcaacaaacgacttcacatcagttgccttagagataagattagatttgctaatctgtttcatagtagtgaagtcatccaatctttataaggattgattctctctctaatattcaagcaaggaataatcaaggtctttagtctccttccctttctctctcttctcaaccaagtcttagtgccttggtggcagcaatggccaaccaatcaagggtgtctcctaccttgctcctcatacgttcatacttatatccaaccaatgtcttcaacatggagtaataattgcaagctgacgttctaaattttttagttagactatcaaattgacattgactttgatacagataaacaaaaccgtacttgtcctgattttcgttaaaaactactgagtgtaagttttcaacacactcttcatgttcttgttacatggtgcacttaacattttgacatactcttcatattcttgttacacagtgcacctaacagtggacataattataactgcaaacgataggctttgcagtacatatataggtcatcttggaccatccagttttaagttcttatttcatagattacataaaaaagtgcaatatgtggtaggcattaaggattcttagtaaaacaattgcagtgctgagttggtaaggttggaagattcactgcaaaactaccaagcattcttttaaatggagtatagaacagagccaaggcacacatatgtggttcttcatcttgtgattcgaaactagaaaataatcaaaacacaaacttggtctacggtattggctcagctgaatattctaaatgcaaactgtgcattcacttattggttagtgtgagcgtttgtccttcatatcactgtaagtcaaaaatgataactgctattgtttgaactttgaaatgtctttgcagctggtggtttaggccatggagtggctcatgccgtctttttctgcctcagccttttaactccagcattcggcagagctacattttatgttgaaaagtgctcaaggatgccatttttccttgtgtcagccattatttctcttggattcttggtcatccacacattctcaatgattattgcttttaatgggtacgacgagagaaagagaagtgatcaagtatttgtcccagttgttcatctgattgcttctgtaatgacactaatcaatcttgcacctgggggctgcgtaattggtacaccactattatgcgtcatgggtgcagtgacgttgcaatactgctggcaaatggtatggcggagattatctgagcagcagcatcggcagtttagcagctagtgcctggcaatgctccttacatgtatcttctcatgtccaattttaataatcttttgtttggggtactagggcaagaagttgtaaacgtagcgaattagcgattataccactagtgggattcacatcttatgaaaattgcatgcaattcaacgtcatgactgagacattgaagccc

SEQ ID NO: 14325 - DNA, 1245 bp, Oryza sativa
  ref <308>: DATABASE ACCESSION NUMBER: AK098862
  ref <309>: DATABASE ENTRY DATE: 2002-08-28
tcggcagtcgcagtggggatcagcggcgccgccgtgcgaagaagccggcggagatgccgatctgcccgccgtcgtcggaatcctcgccggcgccggggttgggggggcgcgcgttgatcttccacgggttggccctcggcgcggcggcggcggctgcggcggccgcggcctacttgtacaggcggccgggcgggttccgcggccgcgcggtgggcatcataccggcgcgcttcgcctcctcccgcttcgaggggaagccgctcgcccccatcctcggcaagcccatgatacagagaacatgggaaagagttatgttagcctcctctttggaccatgttgtcgtggcaacggacgatgaaagaatagctgaatgttgtagaggattcggagctgatgtaataatgacatcagaatcatgcagaaatggatctgagcgttgctgtgaggctcttcaaaagctaaacaagcattatgatattgttgtcaatattcaaggagacgagcctcttattgaaccagagataatagatggtgtagttatggcactacagcgagctcctgatgcagtctttagcacagctgtcactgcactgaaacctgaagatgcatctgatacaaatcgagtgaagtgtgttttagataaccagggttatgcaatatacttctcaagagggctgattccatttaataaatcagggaaagtcaatactcagtttccatatcttcttcatctgggcattgcgggctttgattccaagtttttgaagatctatccagagcttccaccaactccattacagctagaagaggatctcgagcaacttaaagttcttgaaaatggatacaggatgaaggtaatcaaagttgatcatgatgcccatggtgtggatgcgcctgaagatgttgagaaaatagaagcattgatgcgtgcaaggaacatccagtagcatgaaaatgatcgattttgtacgttgtgtggttacatgtttgattcgactgttcgtgttctagtatagcctttctgaagagcacatgaggttaatttgagtttgtaaattagaagctgtttgaaagttgaattactgttttgagtgtgcatagcgttgcacttctttcttacaacgttgaaggaacatagcgcatctccatttactgaaatggcagtgcacctacttgtatttactgtaattaccaggccatacagttcgtttcgagtttgttcttgttaattaagctgttaatgtt

SEQ ID NO: 14326 - DNA, 1045 bp, Oryza sativa
  ref <308>: DATABASE ACCESSION NUMBER: AK064931
  ref <309>: DATABASE ENTRY DATE: 2001-12-06
ggcacgtcgcagcacggcacaggcagccgagcacgtgtcgcgcgcgcgcgcatggcggctccggtggcctccgcctccgcctcctgcttcgcgccgcgcgcgaccatggcggcggctggtcctacggcgggacgagaggggtgccgtcgccgcggcgtggcgcggcgaggcggcttcggcgcgtcctggcgcgaagcggcggcggcggaggaggaggaggaggaggagaggggagggggatactggacccgctcgctacgcctttgcagattctgggactcgacgcctcggcctcctacaccgccgcgcagctcaaggcggccttccgcgcccgggtaaaggaattccatccagatgtttgcaaggacacagagaatgcagatctaataatgagaagagttcttgaggcctatgagatattatctggaataatgttgatccatttgatgaacctgagtgcgcatcttgtgacatatttgtgaatgaacttctatgcattggcactggatgcccgtattcttgtgttaaaagggcacctcacgcgtttgcatttgccgatgacactggtacagcacatgcatcatctcaaggtcactatgatgactacaatgtccaacttgctgttgggcagtgtccaagaaagtgcatatactatgtcacgccctgccaacgtactattttggaggaaattcttgcaagtgtgttgatgactccatacgacctctctgaagcagcagttctggattctctcttatcaaaagcaatgtttgagaataacaggtacaagaagccgaaaagagaaacaaaatcgtcttctgattatgttgactggatgtgatccactctatagcacagttagagggtttaagatgtattatgtaaatattattgtagggcaaaccgtgagtggtagttgtttgcttcaactattaagggcttgtttggataggtggaataacatcaaccccttcagaatgggatcgaaattgactaaatgcctgccaatccgaagggaaccaaacaaaccattaaatttgcccctacc

SEQ ID NO: 14327 - DNA, 2345 bp, Oryza sativa
  ref <308>: DATABASE ACCESSION NUMBER: AK064932
  ref <309>: DATABASE ENTRY DATE: 2001-12-06
gggctgctcttccgttttttttcccctctctctcctcttcgccgcccgcggcgcgccttccagaaccttccagaagcttcctcccgccccgatgtctctccggaggcgggagcgccgggtcatcgccgcggccggcgcggcggcgctcgtcgccgtcggcctcaacctcgccttctccgccgtcgccgcccaccgccgcaggaagcggcgagagctcccagggtttactgcgcaagtcaacctctcagctgctgacatcaagagattagctgatcgcgtcgtttctaagtcgaaggaaacatacgacgctgtggctgcggttcccctagataaagtcagcttctctaatgtcattgcacctctggcggaattagatgctcagcagttcccactggttcaagcctgtgtgcttcctagaatggtctcaccgtctgatgatgtacgaagggccagtgcagaagcagagaaacgattggattctcacttccagcagtgcaggcagcgtgaagatgtgtatcgtgtcataaaggcattcacacagaaaggtgaaagaataggccttgaagcaacaagatttgtccagtgcatggtaagagagtttgaacgcaatggtgctaaactaactcaaagcaagaaaacggagatggagaaactgaaatctcacattgatgacttaagtttgaagtatattcaaagcttaaatgattccacaaaatttcttctattgaacgaggaagacctggctgggatgccactagagttcttaaaggaactggaaaatacaaatgggaagtggaaggttctgctgaccagttatcatgttactccaattcttgagcattgcgaggttggctctaccaggaaactgattgctgttgcttatggccagaaaggtggaaaagagaatatagccatcctggaaaaattggtccagctaagacaccggcttgctagattgctggggtatcccaattatgctgattatgctattgaacctagaatgccgaggacgtcaaggaaggtcttggagtttttggaggagatgtcagaacaattaaatggcctagctaatagggagctcagcgtactcaaagatctgaagatggaggaggagggtgatgctcaatttagcgtggaagacctgttatactacatgaaaagagctgaggagctcaaggttgatcttgatattggtgaaattaaacaatttttccctgttgacctggtcatatcaggaatattgaagatgtttcaagatctgtttgcactgcgatttgaggaaatgaaggatgctgagacttggcacgatacagttcgtctcttttctgtctgggatgcaagttcaagtgatcttttgggttacttttttctggatatcttttccagggaaggaaaatatgcacatacctgcgtcgtggcacttcagaatagatgcctgtgttctaatggcacaagaaaggttccagttgcagttctattgtctcaatgcccgaaagagtttgatgggaattcagcactgctgaggttcccagaagttgtaaggatattccatgaattcagtcatgtggtccatcatatctccaacagagccaccttttctagattttcgggtcttcaactggagggggattttgctgaaattccaagtctgttacttgagaattggtgctatgagaacatttctctaaaaatgatgtctggcttccatcaggacattacgaagtctatcactagtgaggcttgccaatcactgaaaagaaggcgtgacatatttgctggcctgaaactgaaacaagagatccttttgtgccttgttgatcagataatacatacaggcgaaaatgtgaacattgatgacttaatcaaggatcttcatccaaaggtaatgctaggtatacctttgttggaagggaatagcccagcttcatgttttccacgtattgctattggctatgatgctgtgtgctacagttacatatggagtgaggtgtttgcggctgatctgtttgcatcaaaatttaaagacgacttgctaaatcagcatgcggggttgcggtttagaaataaggtattggctccaggaggctcgaaaaatccccttgatatcatatctgactaccttggacgagaaccatcattgcaagctttcattcagagccgaacgaggaacagtctgtgaaagatcgtgtaacccttgaaggtttaattagtgttgaattatttttttttctctgagggaatagttagtgctgagatctgattatgatctgttcgtttgttcaaccttttactgcaacgagaatgcttttgcagtgacaaggtatctaggagcagtcatttttctc

SEQ ID NO: 14328 - DNA, 2137 bp, Oryza sativa
  ref <308>: DATABASE ACCESSION NUMBER: AK064933
  ref <309>: DATABASE ENTRY DATE: 2001-12-06
gatcgaagagaaaatttccaacaccccaccctcccccatcgcctcctcctcccgtctcggccggggcggacataaatacgagccgctcgacggggaaccgccgcgccgcgtccaccacccaccacaagctcgccgccggcgtcgcggacggcggctcatcccggtccggcgtgcgatccggctgactggccggagacctaggagcttcgaccccccccccccccccgcgatctgggcggcccatggtggggtcggtaccgcagggcggcagccgcggcagcgagatctagggttttcggcgcctcgggggtggggagggagcgatggggcgtcggaaggtcgccgcggcggcggctgcgacgccgccgcgtggctcgtcgaaggccgggggcggcgtcatatccgaaatccgtgagaaacacaaattggaactggagaatttgacactaacaaagcatccattcaggacattacgttttttcatgttagctatgttgcaatacttgaaaagattagcaacatatatcctgagtaagggtgctttgtttgttgtcctcattgtgttggtgctagctcctggaattttacttgcggttacagatggtctgcataaaaagcatgtgcaggagttcctgaattatgctagatttgtgttgtggtgggtttcactaggcgtggcttcgtcaattggactaggttcaggtttgcatacatttgttctgtatctgggccctcatattgccctcttcactattaaggctgttcaatgtggtcggattgatttgaaaactgctccatacgataccatacagcttaagcaagggccatcatggctggacaagaagtgttcagattttggaccaccagtgtaccaagcatcggctcattctgtccggatcccagtctttgaattactccctcaggttcagctggaagctgttctttggggcattggcacagcgcttggggagctccctccttattttatatcacgagctgctcgtttgtcaggaagtgaaccagaagctgtgaaggagctggatgctgctgcttcggatgaacatggtccaatagcatccactctcaatcgaacaaaacgctggctcctttcccactctcagcatctcaacttcattactatcttgattcttgcttcggttccaaacccactgtttgaccttgctggtataatgtgtgggcaatttggcattcccttctgggagttcttctttgctactttgattgggaaggccatcatcaagacccatattcagacattatttattatctccttgtgcaacaatcaactcttgtatcttatggaaaaggaattaatctggatatttggtcacattcctgggttttctgcctccttgccatctgtgattgcaaagctccacagtgcgaaggataagtatttatcaacaccaacatcggccacatcatcctcaaaaatggaggatacacagtggaatttctcttttacattggtctggaacactgtggtgtggcttgtgcttgtgaacttcttcattaagatcgtcacatcaacagctcaagaatatctcaaaaaacagcaggatatagagatggagcttattactgattcctcgccccagagtcagtctaaaactaactaaatattgcaacttgtggtgtttattcagctgcaagttgcaaatattctcctcatgagattatactcctggccaaagcccttgcagatgatatcaagtaccggtactaagttggtatttgtagttattcatctgttcagtgagcaaatatacgggcttcattaacttgcccaagtgatggctgcaaccttttgccattgagccctggattggctgttcctcgaggagaacaagttaggctgctattctttagacgtcaacacggatgaaccttttaggaattgtttatgaagaacggttgcattagtgaggtgtatcactggtgcctttttctttctgttttggaaatactttagaaagcttgagaggattcgacagctatactttcattgttcaattcactgtaaaatgcagatttgcaactggtgccggctagaatataatggaatagtagactatttcggctacgcatactctgcgaatgaaacttttgagttttg

SEQ ID NO: 14329 - DNA, 2477 bp, Oryza sativa
  ref <308>: DATABASE ACCESSION NUMBER: AK064934
  ref <309>: DATABASE ENTRY DATE: 2001-12-06
gagctgctcttccgttttttttcccctctctctcctcttcgccgcccgcggcgcgccttccagaaccttccagaagcttcctcccgccccgatgtctctccggaggcgggagcgccgggtcatcgccgcggccggcgcggcggcgctcgtcgccgtcggcctcaacctcgccttctccgccgtcgccgcccaccgccgcaggaagcggcgagagctcccagggtttactgcgcaagtcaacctctcagctgctgacatcaagagattagctgatcgcgtcgtttctaagtcgaaggaaacatacgacgctgtggctgcggttcccctagataaagtcagcttctctaatgtcattgcacctctggcggaattagatgctcagcagttcccactggttcaagcctgtgtgcttcctagaatggtctcaccgtctgatgatgtacgaagggccagtgcagaagcagagaaacgattggattctcacttccagcagtgcaggcagcgtgaagatgtgtatcgtgtcataaaggcattcacacagaaaggtgaaagaataggccttgaagcaacaagatttgtccagtgcatggtaagagagtttgaacgcaatggtgctaaactaactcaaagcaagaaaacggagatggagaaactgaaatctcacattgatgacttaagtttgaagtatattcaaagcttaaatgattccacaaaatttcttctattgaacgaggaagacctggctgggatgccactagagttcttaaaggaactggaaaatacaaatgggaagtggaaggttctgctgaccagttatcatgttactccaattcttgagcattgcgaggttggctctaccaggaaactgattgctgttgcttatggccagaaaggtggaaaagagaatatagccatcctggaaaaattggtccagctaagacaccggcttgctagattgctggggtatcccaattatgctgattatgctattgaacctagaatgccgaggacgtcaaggaaggtcttggagtttttggaggagatgtcagaacaattaaatggcctagctaatagggagctcagcgtactcaaagatctgaagatggaggaggagggtgatgctcaatttagcgtggaagacctgttatactacatgaaaagagctgaggagctcaaggttgatcttgatattggtgaaattaaacaatttttccctgttgacctggtcatatcaggaatattgaagatgtttcaagatctgtttgcactgcgatttgaggaaatgaaggatgctgagacttggcacgatacagttcgtctcttttctgtctgggatgcaagttcaagtgatcttttgggttacttttttctggatatcttttccagggaaggaaaatatgcacatacctgcgtcgtggcacttcagaatagatgcctgtgttctaatggcacaagaaaggttccagttgcagttctattgtctcaatgcccgaaagagtttgatgggaattcagcactgctgaggttcccagaagttgtaaggatattccatgaattcagtcatgtggtccatcatatctccaacagagccaccttttctagattttcgggtcttcaactggagggggattttgctgaaattccaagtctgttacttgagaattggtgctatgagaacatttctctaaaaatgatgtctggcttccatcaggacattacgaagtctatcactagtgaggcttgccaatcactgaaaagaaggcgtgacatatttgctggcctgaaactgaaacaagagatccttttgtgccttgttgatcagataatacatacaggcgaaaatgtgaacattgatgacttaatcaaggatcttcatccaaaggtaatgctaggtatacctttgttggaagggaatagcccagcttcatgttttccacgtattgctattggctatgatgctgtgtgctacagttacatatggagtgaggtgtttgcggctgatctgtttgcatcaaaatttaaagacgacttgctaaatcagcatgcggggttgcggtttagaaataaggtattggctccaggaggctcgaaaaatccccttgatatcatatctgactaccttggacgagaaccatcattgcaagctttcattcagagccgaacgaggaacagtctgtgaaagatcgtgtaacccttgaaggtttaattagtgttgaattatttttttttctctgagggaatagttagtgctgagatctgattatgatctgttcgtttgttcaaccttttactgcaacgagaatgcttttgcagtgacaaggtatctaggagcagtcatttttctcacatcggagctgccctcaagtttcagccatgtagtgcaatgtccgtttattgtacaattagcaactgggaaaagggggtgaagttgacttcacttcattgacgatgctgaaacttgaaaagatcatacgagc

SEQ ID NO: 14330 - DNA, 2427 bp, Oryza sativa
  ref <308>: DATABASE ACCESSION NUMBER: AK064935
  ref <309>: DATABASE ENTRY DATE: 2001-12-06
ggcgaaccaatggccgcctcctcgctcctcccctccaccaccacctccccgcgccgccgcctccccttcccccccacccgcaaaccccactccgccgccgccgccgcagccaagcccccgacgacgctgaccaccaagccactccgcctcgcgcgcccgctcgcctcctcatcctcctccccgcctccgccgccgccgcccgaggaggccgagccgaaggaccccatcgcgctcgccttcgcccgcgccgccgcctacaagaaggagagggacagccccccgccccctccgccgccgcctacccctgcgccgccgccgcagcccccggcggctacggaggaggactcgaggtccagcaaggagtccttcgcgcgggcggtggagtacaggaacggcaacgggggagggctgggcagcggcggcggctccccgctgctcggggcatcgcctagatttggtcaaagtacattttctactgaagatggtgcatttggtaaattcacaaataagaaagaagagtatgagtacgatgagactgactttttgggcctagactttttcgagaaaaagagttataaggggcctccaccaggtttagctccagcagctgatccttttccagataaagattttcctgaagtggagataataataggggaccctagtaaatttgggaagactcatcgttcgacagaggttcaaccagcagatgatagtgagcctgaggaaacctcacgctcaacaacagaagaaaagaaggaagaaaacaagcctgatgaaacaccaccttcaactgttactgagccagaagaggatgaagacgagtacaaaccgacagttagatcatggggaatgtttccacggccacaaaatatttctaaggcggtgatataccatattttctgtatctcttaaagcgttccatgtatatctgctttcagttattagaatctttttcatgtttgcatggtcattttattgttatatgttgaactgtgttcggaggacaatgattttttaaaatgaaactctaatatcctttttgcatacttctgttaaaaaaacaaaagattattgtgcaatcctctctttatatttagtaacttctcctttttgaattcccgtatgattgtaatgctacatttaattctgcaaattatacaacctagtggcaccaggctacttatctatagggaatcaatcaccacaagcttgtctatttgtactgcagagatccagcacaatccttcagaaaaatgtttcagttaaaagtttgccttaacaagggacaatattgacatatccaacatggctgcagaagctacctgcatatgatttataggccattatccaagaatgactgcatgtagactgtagagcgtaggagtgagtacataatatgtatgtgtttttttttaggttaatatgtatgtggtttttatatggactagcacaacctttgggacatacatgaagataatctgtgaaacaatacatttctgacgataaaaaacaatgaagattattcaagaagatgatatttggaactgcatttctttcccttgtttgattgagacaatgtatgtcgaccattgctgatgctatcataatgtatttgatttgataaaattagattagaatgcaaatatgcttacggtagtgccatgtttacccagttctgaattttcctctatttcttcgttattagtatggtggcggaagaaatatacgccttggtggagagactcgaagtgctgaagagaaggcagccaaggataaacgtaccaaagagctaatagctgcatataggaatagtcagaacatgatagttgatgcaaagacaaaggcagagtgcactgaggccttgaaggaaggtgatgagctgatgaatactggaagacttaaacaagcattgccttattatgaaaaagtgatgcaggctgtggacttcaagactgaacttcatggaatggctgctttgcagtggtccatctgtctagattcactctgcaggtccaaggaagccatgagcatgtacagcaaactcaaaaatcatccaaattctgaaatcagtaagaaagcaaacatgttcatgttcagctttcaggcgatggacttcatgaaggtgaacagctcccctttgccccgtaacacgggctacgagaagtacttcgacaagtttgggggccagaagaactactacgctgccctagacgaacctgagatgggcatcgatcagatcatcccgtacatgctcttccttgtttccccaatattcttggttgcttttgttgctttgagaaaatccttccagttataaaagtcaggaagcatatgcttgaatgcttcaatctttgctccactgacgaattgattagtatgttcctcgaaacaaaaggctgaagaattgatatttgactagtatgc

SEQ ID NO: 14331 - DNA, 886 bp, Oryza sativa
  ref <308>: DATABASE ACCESSION NUMBER: AK064936
  ref <309>: DATABASE ENTRY DATE: 2001-12-06
ccctctcgagcaagcacccaaaccctcccctctaccccgccgccgccgccgaggaaggggcaagaggaagccggcgaagatgaagaccatcctggcgcccgagacgatggagatcccggagggggtgacggtgcaggtcgccgcgaaggtggtgacggtggagggcccccgcgggaagctgacccgcaacttcaagcacctcaacctcgacttccagctgctggagggcggccgcaagctgcaggtggacgcgtggttcggcacccgccgcaccatggccgccatccgcaccgccatctcccacgtccagaacctcatcaccggcgtcaccaagggctaccgctacaagatgcgcttcgtctacgctcacttccccatcaacgcctccatcaccaactccaacaccgccatcgagatcaggaacttcttgggcgagaagaaggtgaggaaggttgacatgctcgagggggtgaccatcttgcggtcggagaaggtgaaggacgagctcgtcctcgacggcaacgacatcgagctcgtctctcgctcagcagccctcatcaaccagaaatgccacgtgaagaacaaggatatcaggaagttcttggatggtatctacgtgagcgacaagggtaccatcacagaggatgcgtaaactcctatcttcacctagtatcatgaagtgctgtttcttgtctcccgtgtctgatcatcctctgagttgcaattttctgagagactgaattttgtaatggtgggttatttaggatgtaatggagcatggtatcttatcctacatattgtttctgtttgcgattatgaagtctatttatcatcccctaaagacagtttactggaagcattcgtggttagataaacagcataatgc

SEQ ID NO: 14332 - DNA, 1700 bp, Oryza sativa
  ref <308>: DATABASE ACCESSION NUMBER: AK064937
  ref <309>: DATABASE ENTRY DATE: 2001-12-06
gctctgcgcctccctcctccgcgcctccgccatggcctccctcgcctccgcctccgcatccacctccctggtcttctccacctcctcctccaagccgcgcctcggctcctccgtcggattctcctcgcccgcgcggttccggcgcacggcggcggcggcggcgtccaggggcacggggcggcgcgcggggctgctggtagtgcgcgcggcgagggggaagttcgagcggaccaagccgcacgtcaacatcggcaccatcggccacgtcgaccacgggaagactacgctgacggcggcgctcaccatggtgctcgcctccgtgggcgggagcgcccccaagaagtacgacgagatcgacgcggcgcccgaggagcgcgcccgcggcatcaccatcaacaccgccaccgtcgagtacgagaccgagacccgccactacgcccacgtcgactgccccggccacgccgactacgtcaagaacatgattaccggcgccgcgcagatggacggcgccatcctcgtcgtctccggcgccgacgggcccatgccgcagaccaaggagcacatcctgctcgccaagcaggtcggtgtccccaagattgttgtcttcctcaacaagaaggaccaggtcgacgacgaggagctgctccagctcgtcgagctcgaggtccgcgaattgctctcctcctacgagtacgatggcgacgaagtgcccatcgtcgctggctccgcgctcaaggcgctcgagaacctcatggccaaccctgccattaagcgcggcgatgatgagtgggtggacgggatcttctcgttgattgattccgtggataactacatccctgtcccacagcgccagaccgacctcccgttcttgcttgctgttgaggatgtgttctccatcaccggtcgtggtaccgttgccactggccgtattgagcgtggcaccgtcaaggttggggacacggtcgatatcgtcggtatccgggagactcgcaactgcacggtgactggtgttgagatgttccagaagaccatggatgatgcgatggctggggacaatgtcggcctgcttctccgaggtatgcagaaggatgatatcgagagaggcatggtgcttgcgaagcctgcttccatcacgccacacaccaagtttgatgcggttgtgtatgtcctgaagaaggacgagggtggacggcactcaccgtttttccctggttaccgccctcagttctacatgcggactaccgatgtgacggggaatgtcacaaagattatgaacgacaaggacgaggaggcgaagatgtgcatgcctggtgaccgtgtcaagatggttgtggagctcatccagcccgtcgcttgtgagcagggaatgaggtttgccatccgtgagggtggaaagaccgtcggtgccggcgtcatcaatacgatcttgaagtaaactggatggagcatatccaccgtgagaattttccttgtttactctttgcgaaatgctctgtagttgttattacgcgttgagttttaggggttgctcatgtgaaattgtagtatggcacttttctcttcaagtgaatttgcatactttgtgatattcacgacaaagatacatctgtttgcaactaatttggctatgcagtgccatctactgtcatgtgttcaattgttcatctattgagcttgatgccacatggaattgtagagtt

SEQ ID NO: 14333 - DNA, 1819 bp, Oryza sativa
  ref <308>: DATABASE ACCESSION NUMBER: AK064938
  ref <309>: DATABASE ENTRY DATE: 2001-12-06
ggcagtggcccagtggccgacggtgaggtcattggagacaccccgagacaggaaagcaatggagacgggacgacataggtcacagagcctgggatctgcagggctcgcgttccacgcactcctctgctcgtcgttgctgctcaacgccgtcttcttcgcgcaccacctcctcaggtcctcgccgacggcaacgccggagcggctcggcgacgggctgagctgggcgctgcaggcggccagggaggccgaggccgtggccgccgccgactgctccggccacggcaacgtgttcctggatggcgtcaccggcgaggatgggcggcccgggtgcgagtgcaaccgctgcttctccgggccggactgctccgtccggacgcccaactgcaccgccgacgccgacagcgggaacccgttgttcctggagccgtactggagacggcacgcggcagccagcgccgtggtgttctccgggtggcaccgcttgagctacatcaccaccggcggccgcttccattccgtcgagctcgatcgccacatccggctgctgcacagggccgtcggcaacgcggtcgtcgacgacaagtacttggtcttcggggccggctccatgcagctcatcaacgcgttggtgtacgcgctctcccccgacggcaacgccgactcgccgccggcaagcgtcgtcgccaccgtgccgtattacccggcgtacaagtcacaaaccgacatgtttgacggccgggagtacagatgggacggcaccaccgctacgtggtcaaacaacggctcgcgaaactccaccaaaggcttcatcgagttcgtcacctcgccgaacaaccccgacaccgcgttgcgcaagcccgtcctcgccggctcgtcggcgatcgtcgaccacgcgtactactggcctcacctgacgcacatcccggcgcccgccgacgaggacgtcatgctcttcaccgcttccaagctctccggccacgccggcagcagattcggatgggcgctgataagggacgagaaggtggcgaaaagagcactttcgtacgtagagcagagcatcatgggcgcgtcccgggacacccagctccggatgctgaagatcctaaaggtgatactggccaacctgcacggcaaggaggacatcttcgccttcggctatgacgtgatgaggagccgatggcgaaggctcaacgccgtcgtgtcgcggtccacccggatctcgctgcagaagataccgccccagtactgcacttacttcaaccggatcaaagagccatcgccagcctacgcgtgggtgaaatgcgagtgggaggaagacgtcgactgctacgagacgctgctggcggcggggatcatctcgcggtccggcactttatccgaggccgaagctcggtacacgcggatgagcctcctcaaggcgcaggacgacttcgacgtgctcctggagaggatcaccgaattcgtcgatgccgaggagcacggcagagctcccggtggctccagctccatgtgagaaatcgtgaattgagagggtgccaagcttcgtctagctggcttcgatgggcgctgtgccggaacgatcagctctactatctgattgttcttgggtaagttcatgggtacaataatcaaggggaatgatcagctagacgttgattgttccccgtcaatatttggacgaacaggtagatattgatttgtgtgtattgacgaatgatgtagatatacacaagcaattatgtgtttcagtgatcaacaattgaatatgtaattaaatgaatatcatacatgttacatttactacttaaggcagaacact

SEQ ID NO: 14334 - DNA, 2058 bp, Oryza sativa
  ref <308>: DATABASE ACCESSION NUMBER: AK098863
  ref <309>: DATABASE ENTRY DATE: 2002-08-28
agaaccagaaccacggcggcggcggcgaacgatccatcagttcatcggcatggacaagaacggcagcagctacggcgagagctcgtcggacgacgtggaggcgccgctgctgctgccggcggcgaggggcgggacgatggcgaagggtgatcgtcgacgtccggcgtcgtcggcggcggcggcgtgggtgcgcgctctgctcgcgcacaagtacccggcgatcgcggcggggccggcggcgtgcgcggcggtgtgcgccgccgtggacctcggggacgggcacggcgaggcgcggaacatgctgggcgtgctggcgtgggtgttcctctggtgggtcaccggcgccgtgccgctcgccgtcgcgtccatggcgccgctgttcctcttcccggccctggggatctcctcctccgacgacgtcgccagggcgtacatgggcgacgtcatctccctcgtcctcggcagcttcatcctcgccctcgccgtcgaccaccaccgcatccaccgccgcctcgccctcaacgtgctgtccctcttctgcggcgacccggtgcggccgtcgctgctgctcctcggcgtcaccggcacgaccgcgctcgtcagcatgtggatccacaacacggcgtgcacggtcatgatgatgccggtggcgacggggatcctgcagaggttcccccgcggcgacatcgacgacggcggcgggcaggaggtgcggcgattctccaaagcggtggtgctcggcgtggtgtacgcgtcggcgatcggcggcatggcgacgctgaccggcaccggcgtgaacatcatcctggtggggatgtggtcgtcctacttcccggagcagaggcccatcaccttcagctcatggatgtccttcggcctccccatggcgatcatcctcttcctcgcgctctggctcaccctctgcctcatgtactgctccaacaacaccgccaaggccctctccgcctacctcgacagaagccatttgagacgagagctcagcttgttaggtccaatggcttttgcagagaagatggtcttggctgtgtttgggggcctagttgtgctgtggatgagtaggaacataacagacaacatccctggatggggagttcttttccacaataaagttggggatggcacagttactatcatgatggccacccttctgttcataatccccagcgggaagagggagggtgagaagctgatggactggaacaagtgcaagaagatccagtggaacatcatccttctcctcggcgcaggattcgccattgccgatggcttcaagacgagcggcctcaccgacatcctctccaacggcctcaggttcctgaaaggggcgccgacgctggtgatcgtgcctgtcgcctgcgttttcagcgggatcatgacagagttcacttctgacgactcaaccacgacgctggtgctgccattgttcgctgaacttgccaaatccattgaggtgcaccctgccttgctcatggtttccggcgcaatcggggcccagttgtcatacttgttgcccaccggatcgccgtcaaacgttgtcggcttcagcaccggctacattaccatcaaggatctggtggccactgggttgcccctgaaaattgttgccattgcagctctgacagtcttactgccaacattaggatcaacgatttttggcatggacatcaagtcataggaacataaatatgaagtttttgagaatgtacagtagtttctgtttctgtatctcatgcctgaactattgttgaggggtcagatggcatggtttgtataagagtaaccatagggatttctcagccgttctgtattactgtatctgagacgtgccccgggagatcagatttcttgtcaagacagaagcaaggaagacaagcagacaatagaagaatgatcaaaatgaaacgtattcaaacaatccatatccttcagatgagcgtacaatatgcaggtcttatcctctagaggtgctatagcttattgttcttcacaaaatatgtaaagttaaaagagtgtcggcatatatattaaattgaacgg

SEQ ID NO: 14335 - DNA, 2834 bp, Oryza sativa
  ref <308>: DATABASE ACCESSION NUMBER: AK064939
  ref <309>: DATABASE ENTRY DATE: 2001-12-06
gatttctccccacctcctctcctcctcctccttccagccgaagccacgcgcggacgggagagaggggaaggacgcggccgcggctcgcctctccccccccccctcgcttgccgccgatcggcgatcggggcggcgggacgatccccggagggagcagccggcgcggagtccggaagcagttttgtagcgttatccaattggcttccgctatctgcaacagtttccaccatttgtcaataaattactgaccttgtagttgagggaagcggttctgtaacattagccgattggcgtccgctatctgcgacggattccaccatttgtcaataaattattgaccttgtagttgaggatcgtcaacctcaagttgtaaaacattgatttttaatgggtgatgttttattacattgaactcatttaagtacctcataagttatccaaggaagacagtaaagtttcgatgcatcaacataggatcactatgctatcttcctcagaaacatgtcaccttggttctagttcgaacaaccaagccatggatcagcagaatttactgcccagcaaccccaccgcagatgaacagaatttacttccaaatactctagaggatgatgattacccacattatttacttggtagtcatgaggtggaaatgccaaatggaagcgtgattggtcagcaaaatacaagcttgaacttatgggattcagctggatctagctcgatgggctgtgtagctgatcatgatagtctttttgaggccaaaagggaacattttgctcctgctttgtctatccgagctcccttaattattggagggagaagacatgaaggcagtagttcattgccttcacagagcttaaacttagaccttaatcttaatcaggctgatcagtttgattctgaggatgttgatatgattcagagtaatggacaaccagggataaacgcttttcctctcaacaggggcctttccattcctgagcatgttctgcgccatacaaattcttccagtgctacaggaaatccttcacaggttgcaagcttttctgatggaatgacaggccaagaagttaacctgtttggtgggcatcgttcatcttgcaagagaaagaatattgatgggagtcttgcagagtcttctgccaatggtagttcacgtaataatcagcgaaataatattatactggaaccttctccatccagtcatgaaagcacttctggtttaactgcacctgcccctacaaaccatgttttttcatactctcctgtggaacagctaaaccagaataccaatatgtctgcaaatgctatgttgtctgatcattattcactatatggtgatcatgagcgtgagagatttctgaggaatacccggatgagaacaagccctaatgagtatgatcaatcatcgtccaatctcttgcctgaaggaagtctcaggtgttctgtttatcagcctactcagcaacagtctttgtttattccagtacaacctagagcatcgagctcttcaacaagttctcttagtcggccttatgtgcctgctgtcactcaattctcacaaaatttgcaccgtgctccatcaagtggcaattttggttcgagaatagggatttttcctagttctgctgatacaacaaaccagttatcttcacaagatcccaacaggagctcggtgagaggcaattttcctgagccccttctgttaggttcttctctgtttccttctgactcggcagaattgctatctatgccgggaggcagaagcaaccaacaaaattccagctccacaattcgaactgctgtaaatataggagctcaacagattgctgggttaaatgcatcccagcctacttcaagctcaaggggttcggttgatattgttaggagatccttgcaggctgctagcgttcctcagtccagaggttcaagcattacatcacagcagcaacgtgggcattcatccacatcacatgagattcgaagccatcaacctggatccagctctcgtgccaatcagcagcattatgtcagggctgttcctcactctgtagataggcaaaactcgaattacttggacctgcagtcttttatgcaaagcattgctgcttcaagagacggaattaggacagtctcagagtctgccaatcaacttgtgcatcttcgcaatgttgttgaacaaattcgtcagggaagaggtggaaggtttgaggatcctaattttgaacgtgcactttttgcaaggcgtgccagtttaattgacagacatcgtgacatgcggcttgatgtggataatatgtcatatgaggaattgttggcacttggtgaacgcattgggtatgtaaacactggacttagtgaggataaaattaggactggtttgaagcaatggaaatatgtgagcataccgattgaagaacctctaactggtgttgaaccatgctgtatttgccaggaagaatatgccgaaggtgaggacatgggcagactagactgtgggcatgacttccacaccgcatgcatcaaacaatggctggttataaaaaatctgtgccctatctgtaaaaagacaggactgggcacttaattttgcgtgcttccgcctgcgaggaaagcggataagcctctttagaccgagtggttggttataaggcatgttacaccttccaagatccaacatacaggtggaatttatactatagggtggtacatggtactttaccagaaaggcgatggttgtagacctggagtttctttttcccttttgtttaaacctagatttgaagtttaaaatttattcaataacattcaattgcaattgggcatttcct

SEQ ID NO: 14336 - DNA, 3029 bp, Oryza sativa
  ref <308>: DATABASE ACCESSION NUMBER: AK064940
  ref <309>: DATABASE ENTRY DATE: 2001-12-06
gatcccccctcctcctcccctcttcgcctccgtccacctcgcgtgcggcgggagggaacccaccgacctcgttcccctccccccacgtacacgacagcgaagagccccccccaagctagggctccccggcggatcctcggcggggtgggtctcgcgccgcccttcccccgattcggcggcggcgccggccgcgatggcgacccacgagcggaagacgatcgatctggagcaggggtgggagttcatgcagaagggcatcaccaagctgaagaacatcctcgaggggaagcccgaaccccagttcagctccgaggactacatgatgctctacacgacgatttacaacatgtgcacgcagaagccgccgcacgactactcgcagcagctctacgagaagtaccgcgagtccttcgaggagtacatcacgtccatggtcttaccttcattaagagagaaacatgatgagtttatgctgagagagctagtaaaacggtggtcaaaccataaagtgatggttcggtggctatcacgcttcttccattatcttgatcggtactttatttcaaggaggtccctaccacaactaagtgaagttgggcttagctgtttccgggatctggtatatcaagagatcaaaggaaaagtaaaaagtgcggtgatatccttgatagatcaagaacgtgagggtgaacaaattgatagggccctgttaaagaatgttctggatatatttgttgagattggcttgactagcatggactactacgaaaatgattttgaagatttcttgctcaaagatactgcagactattactctataaaagcccagacctggattcttgaggactcttgtccagattacatgttaaaggcagaggagtgtctgaaaagggagaaagagcgagttgctcattatttgcactccagtagtgaacagaagttgttggagaaagtgcaacatgagttgctaactcaatacgcaagtcagctcctggagaaggagcattctggatgccatgcattgcttcgtgatgacaaggttgatgatctctctagaatgtacaggctcttttccagaataactcgtggtttagaacctgtttctcaaatatttaagcagcatgttactaatgagggcactgccttagtgaagcaagccgaagatgctgctagtaataagaagccagagaagaaggagatagttggtttacaggaacaggtttttgtccggaaaatcattgagcttcatgacaagtatgtagcttatgttacggattgttttcaggggcacactctcttccataaggcacttaaggaggcttttgaagttttttgcaacaaaggtgtttctggcagttcaagtgctgaattactagctaccttctgtgacaatatcttaaagaaaggcggtagtgaaaagcttagtgatgaagcaattgaagatacccttgagaaggttgtaaggttacttgcctacattagtgacaaggacttgtttgctgagttctatagaaagaagcttgcaaggagattgctttttgacaagagtgctaatgatgaacatgagagaagcatccttaccaagctaaagcaacaatgtggagggcagttcacttccaaaatggagggcatggttactgatctcactgtggcaagagatcaccaggctaaatttgaagagttcataagcacacactcagagttgaatcctggaatagccttagctgttactgtcctcacaacaggattttggccaagttacaaatcttttgatataaatctacctgcagaaatggtgaaatgtgtagaggttttcaaggagttttaccaaacaagaacaaaacacaggaaacttacctggatttattcactgggaacctgtaatattaatgctaaatttgaggccaaaactattgagctcattgttacaacttatcaggctgcattgctgctgctgtttaatggagttgatagactcagctattctgagattgtgacacagttaaatctctcagatgatgatgttgttcgattgctccattctctatcttgtgcaaaatacaagattcttagcaaagaaccaaataatagatctatttcaccaaatgatgtcttcgagttcaactcaaagtttactgacaagctgcgaagattaaagatacctcttcctccagttgatgagaagaagaaagtagttgaagatgttgataaggatcgcagatacgcaattgatgcatcaattgtgcgtattatgaagagtcgcaaagtattgggtcatcagcaacttgtgatggaatgtgtggagcagcttggacgcatgtttaagcctgacttcaaggcaataaagaagcgaattgaggatcttatcacaagggattacttggagagggataaagacaacccaaatgtgtacagatacttggcttgatgggttttctgctggtggacggatacttgccggagcctgacttctgtgccctgcggtgctgcatttacgaatgggaaaatgataaaagtcgtcttgtggtacaacaccactggctgctttgagttttcaggcaatggttggtctgtcaaaaactcagcagagtccgccaggacaaagatttgctgctgggacttcgcaaggttctcctaaatgttgtaatcttatactaggtgatgccttatttgttacttttctgcatatcatatagttttgttgattttcaatatgttgtctagaatctagataaatggagggatactatgagttagcgatccaaccgtgccctactctcaagtcacaaagcagtaagatggccatctctgctgtaatatttattgtgtatgatgtcgtagatatgctggaagcactaatgataatggtgcattgcttcgccccacatcgtggtttattgtacaagttgagctactttgttaagtactatttgtgcttgtaattttgcaagtttgcggtactttttttttggcataaaatgttgattaagccgtgacccccaataaagtgttattagatcccttatttc

SEQ ID NO: 14337 - DNA, 1514 bp, Oryza sativa
  ref <308>: DATABASE ACCESSION NUMBER: AK064941
  ref <309>: DATABASE ENTRY DATE: 2001-12-06
ggtcttcgtcgtcgccattatccccatttctcccgtatcctctctctcctctcctctcttctcgagcgcggcggcggtggtggggaggaggagggccagcggcagcaagcggcggcggcgacgcgatgatgatgacgcgggcgtcgatgggggcgatggaaggcgcggcggtggacgaggtggtgcggcgcctcgtggagggcgggcgcggggggaggcaggtgcagctgtcggaggcggagatccggcagctctgcgtcgaggcgaagcgggtgctcctgtcgcagccgaacctcctgcgcatccacgcccccgtcaagatctgcggtgatatccatgggcaatttgttgatcttctgaggctgtttgatttgggcggttatcctccaacttccacttatcttttccttggagattatgtggacagaggcaaacaaagcttggaaaccatatgcttgcttctggcatacaaagtgaagtatcctgataagattttcctgttaaggggaaaccatgaagatgcgaaaattaacagagtgtatggtttctatgatgaatgtaagaggcgattcaatgttcgactgtggaagattttctgtgattgcttcaactgcttgcctatggcagcactcattgacgataagatactctgcatgcatggtggcctctcacctgaactgaatagcttggatcaaataaaggatatcgagaggcccactgagattcctgactatggtcttttgtgtgatttagtttggtctgatcctagtcctgactcagaagggtggggagagagtgacagaggtgtttcctgcacttttggtgcagataagcttgtagaatttttggagaagaatgatcttgatcttatatgccgcgctcatcaggttgttgaggatggctacgagttctttgcgcaaaggagattagtgacaatcttttcagctccaaactattgtggggaatttgataatgcgggtgctctgttgagcatagatgaaagtttaatgtgttcttttcaaatcttgaagccaaatgatacaggggctccacattcaaggaaaccaacttcaaacaagaccccaaaaactggaaacgcttaacttatattatatcaagctacaaagcataattgttgtcagcccgaagggggtgatctcttttatgtctcggatccaccagggcatggcattagtcttctccagccaatatcatttcctccttgagtggcatgctctccgctgctcgctggatatgtgttgactccacaggcggtactgcattgttgtacagcagcagtctatctgactcagcagctcattcattctgatcctcttttttttgtttatcttgccgctgcaatgtttggcggcacaatgtgttttgtcgtggatgcagtagttcctctttttgttagtttcttagtgtggtttctttgcctggttgctgtgagctgtgtttgcttatgtatcatcttaattagatcatgagatatatgcttggtggaattgtgt

SEQ ID NO: 14338 - DNA, 1176 bp, Oryza sativa
  ref <308>: DATABASE ACCESSION NUMBER: AK064942
  ref <309>: DATABASE ENTRY DATE: 2001-12-06
gttactgcacacttgaccatcttctccatgcaaattttaagatcaagtaaaagtataatgtggattatcacaattctttattagcaagaaaacaaaaacaagtcttctttaactcttgtcattgtttagttatcttttgacaatttagtgctctgatatttactcaaaccttctggaccttgttattgaactatgctcaatgataaaatactcccaagtccatcctgaaattcagaatctgctttcatataaaaaaagaagctcacagcctcctcctgcctttaaacagtaaacgatgaaaaaagcagaaggatcaaaactcacaaccactgctgtttatcttgtattttgagaaaaaagagcaataacactactactgacaggtcaatctgtcagctgctcggtactcttataacatccacagtagcagactagaagtactcttatattatatttataacagctcatgtttgatatattgatcctgcaagtatttgactatctcgatcccatttgaggagtacgggaatacctaaaaaaaaacaaagaaggttccaccgggatttgaacacaggttgccagattcaaagtctggagtgctaaccactacactatggaaccggatgttgtatgtggtcccttgcagatgatatttctgtcttatattccataaacacagtgaaaagctggaaattttgtccatgtccttttgaactctttttgtttgtttccatcagtttagtttcagtgaaactgtttcctttgagcatgcatccaattagcatacatgtaacatttggtaaaaggtaaatatttgtttggatcatttgctacaacattttagcactccgtataattattaaaagtaatttttgactgtgtatgctcagagagagagagagagagagagtcatctaatagaatttgcaaaattaaatattccaaaggttgattgcgctgatgtatgtttgtgagcagagggattatgtcatagtgggatgcagtgcatagtaatctaatggtatgttgaaataatctaatgaggtgaacacatgcacagaaaatactgtgggcatgtcatgtttaaccttcttaggtagctacttgacaagcttctccatgcaaattataagatttgagtgaaaaatataatgtggcttataactgtttgttagc

SEQ ID NO: 14339 - DNA, 2529 bp, Oryza sativa
  ref <308>: DATABASE ACCESSION NUMBER: AK064943
  ref <309>: DATABASE ENTRY DATE: 2001-12-06
atcggcccccgaaatcccctcgcgaaccagagaaacctgaggcaccaccatcaccaccaccgcctccgcctccgcctccgcctcctgcgcgcgcggcgaattcgggggaccctcgcgctcgcgtggggtgtgggtggggggagatccgggcgtcgccgtcgccgggggggggggagggtgctcggattcagccagcggcgggtgggggggcccgcctctttcttcttgggggggcgcggaggagaccccgcccgtcctggattccgtggccgcggcgccgattcgggcgcgggagccccagcacggtattatggtgatgaagatggaggctgatgaggatggtgccaatggcggaactggtgggacatggactgacgaggaccgagcgctcaccgccagtgtgcttggaacggatgcttttgcttacttgacaaaaggaggtggtgccatatccgagggccttgttgctgcatctttgccagtggacttgcaaaatagactccaggagcttgtcgaatcagatcgtcctggtgctggttggaactatgccatattctggcagctgtcgcgcacaaagtccggtgaccttgtccttggatggggggatggctcttgccgtgagcctcatgatggtgagatgggacctgctgcttctgcaggtagtgacgaggccaaacagaggatgcgcaagcgtgtgctgcagcgattgcactcagcattcggaggtgttgacgaggaggattatgccccaggcattgatcaggtgacagacacagagatgttttttctagcatctatgtactttgcatttccacgccgtgctggtggccctggtcaagtatttgcagcaggcgtgcccctgtggattcccaacactgaacgtaacgtatttcctgccaattactgttaccggggataccttgcaaatgctgcaggatttagaactattgtgctagttccatttgagaccggtgtacttgaactgggttcgatgcaacaggtagcggagagttctgacactctccagaccataagatctgtgtttgctggggcaattggcaataaagctggagttcagagacacgaggggagtggccctacagataagtcaccaggtttggcaaagatttttgggaaggaccttaaccttggccggccttcagcaggcccaggaactggcgtgtcagaggcagatgaaaggtcgtgggaacaaaggactggtggtgggagctcattgctccccaatgtccaaagaggtttgcagaatttcacttggagtcaggctcggggcctgaattctcatcagcagaagtttggcaacggtatattgattgtgagcaatgaagccacaccgcgcaacaatggaggagttgacagctctactgcaacacagtttcagcttcagaaagcaccaccacttcagaaactaccacagctccagaaatcacatcagctagtaaagccacagcaactagtgagtcagcaacagttgcagcctcaagctcccaggcaaatagatttcagtgctgggaccagttccaaacctggtgttttgactaaaaaaccagctggtattgatggggatggtgcagaggtggatggcttgtgtaaagacgaaggtccgccacctgcattagaagaccggcggcctagaaagaggggaagaaagcctgcaaacgggagggaagagccactaaatcatgttgaggccgagcgccagaggagggagaagctcaaccagcgattctatgcactgagagccgttgtacccaatatatcaaaaatggacaaggcatccctccttggtgacgccataacatacatcactgacctacagaagaagctcaaagagatggaggtagagcgagaaaggcttatcgagtctggaatgatcgatccgagggatcggacgcctcgacctgaggtggacattcaggtggttcaggatgaggttctagtccgagtgatgagccccatggaaagccaccctgtcagggccatcttccaagctttcgaagaggcagaagtccatgcaggggagtcgaagatcacaagcaacaacggcacggccgtgcattctttcatcatcaagtgccctggcgccgaacagcaaacgagggagaaggtgattgccgccatgtctcgcgtgatgaactcagggtagaatcagttggggagtgggcgccaccggtagaggcagctttacttcgttcgctggttgcagacaagcagcaagcagtcggttggacggacacccatccacccacctttcagcgctgttgatagaagaagtttgtaggcagagaaagaaagctcagattctgacttagcgatccaaggggaagacaaagctctcaagttaaaactgccattgttgtatggtaggcttttgtggtcggtgtagtttttctctttttgttgtttattggggagaataccatgttcttagtttattgcttgtggcagaaccataaacagtacatctcgtcaaatgcatgagttgggaaagaagtcacctgcttttctgct

SEQ ID NO: 14340 - DNA, 2576 bp, Oryza sativa
  ref <308>: DATABASE ACCESSION NUMBER: AK064944
  ref <309>: DATABASE ENTRY DATE: 2001-12-06
gatcttgctccactacgcggaccaccgcgcgcgagcagagcatctcctcactctctagcttgctccagtttcgcgtagctgcgtgacagttcaattgaactctctggattcgttggttacttcgtctgagctgctgcagcgttgaggaggaggaggagcaatggcgctcacgacgttctccatttcgagaggaggcttcgtcggcgcgctgccgcaggaggggcatttcgctccggcggcggcggagctcagtctccacaagctccagagcaggccacacaaggctaggcggaggtcgtcgtcgagcatctcggcgtcgctgtccacggagagggaggcggcggagtaccactcgcagcggccaccgacgccgctgctggacacggtcaactaccccatccacatgaagaacctgtccctcaaggagctccagcagctcgccgacgagctccgctccgacgtcatcttccacgtctccaagaccgggggacatctcgggtccagcctcggcgtcgtcgagctcaccgtcgcgctccactacgtgttcaacacgcctcaggacaagatcctctgggacgtcggccaccagtcgtaccctcacaagattctgaccgggcggcgcgacaagatgccgacgatgcgtcagaccaacggcttgtcgggattcaccaagcggtcggagagcgagtacgactccttcggcaccggccacagctccaccaccatctccgccgccctcgggatggcggtggggagggatctcaagggagggaagaacaacgtggtggcggtgatcggcgacggcgccatgacggccgggcaggcgtacgaggcgatgaataacgcggggtatctcgactccgatatgatcgtgattctcaacgacaacaagcaggtgtcgctgccgacggcgacgctcgacgggccggcgccgccggtgggcgcgctcagcagcgccctcagcaagctgcagtccagccgcccactcagggagctcagggaggtggcaaagggcgtgacgaagcaaatcggagggtcggtgcacgagctggcggcgaaggtggacgagtacgcccgcggcatgatcagcggctccggctcgacgctcttcgaggagctcggcctctactacatcggccccgtcgacggccacaacatcgacgacctcatcaccatcctccgcgaggtcaagagcaccaagaccacaggcccggtgctcatccacgtcgtcaccgagaaaggccgcggctacccctacgccgagcgcgccgccgacaagtaccacggcgtggcgaagttcgatccggcgacggggaagcagttcaagtcgccggcgaagacgctgtcgtacacgaactacttcgcggaggcgctcatcgccgaggcggagcaggacaacagggtcgtggccatccacgcggccatggggggaggcacggggctcaactacttcctccgccgcttcccgaaccggtgcttcgacgtcgggatcgccgagcagcacgccgtcacgttcgccgccggcctcgcctgcgagggcctcaagccgttctgcgccatctactcctccttcctgcagagaggctacgaccaggtggtgcacgacgtggacctccagaagctgccggtgaggttcgccatggacagggccgggctcgtgggcgccgacgggccgacgcactgcggcgcgttcgacgtcacctacatggcgtgcctgccgaacatggtcgtcatggccccgtccgacgaggcggagctctgccacatggtcgccaccgccgcggccatcgacgaccgcccctcctgcttccgctacccaagaggcaacggcatcggcgtcccgctaccacccaactacaaaggcgttcccctcgaggtaggcaaagggagggtactgctggagggcgagagggtggcgctgcttgggtacggttcggcggtgcagtactgcctcgccgcagcgtcgctggtggagcggcacggcctcaaggtgaccgtcgccgacgcgaggttctgcaagccgctggaccaaacgctcatcaggaggctggccagctcccacgaggtgctcctcaccgtcgaggaaggctccatcggcgggttcggctcccacgtcgcgcagttcatggccctcgacggcctcctcgacggcaaactcaagtggcggccgctggtgctacccgacaggtacatcgaccacgggtcaccggcggatcagctggcggaggcagggctgacgccgtcgcacatcgcggcgacggtgttcaacgtgctgggccaggcgagggaggcgctcgccatcatgacggtgcccaacgcgtagcagatgcgtggcgcctctggtagagacaatgctttgtacatgtagagatcagtgaattgtatattagtcggcgtcgggataaatattgattagtgatgctgaggggaacagttacagtttttttgctcttcagttgttcgtggacggagacccggctgctcgatgttcgatcgcttgtatatctaagaaatgttgtaagtggatagatttattgatcatgataaggattagtcgggtattaattgaaagcatc

SEQ ID NO: 14341 - DNA, 2455 bp, Oryza sativa
  ref <308>: DATABASE ACCESSION NUMBER: AK064945
  ref <309>: DATABASE ENTRY DATE: 2001-12-06
gagcaaaacagccattgcatctctctctctctctctctctctctctctctcgtgttcgtgttcgcttgccatcgcgtcgtcgctcacagctagctagctgatcggtcgctgcgagctagagcgcgccatgagagcgggaggaggaggaggaggggacacgaggaggacggcggccgggcaggccatggtggagctgcaggcgaacgcgtcgtcggcgggcggcgggatggtggtggggctgagcccgctgagcgagacgctgtggcgggacagcaaggcgatgcccggggcggcggcggcgctcatcggcgacgtgtcggcgaggctgacgtggaaggacctctcggtcaccgtggcgctcggccccggcaagacgcagaccgtgctcgacgagctcaccggctacgccgagccgggctcgctcaccgccctcatggggccctccggctccggcaagtccaccctcctcgacgccctcgccggccgcctcgccgccaacgccttcctctccggcaacgtcctcctcaacggccgcaaggccaagctctccttcggcgccgcggcgtacgtgacgcaggacgacaacttgatcgggacgctgacggtgcgggagacgatcgggtactcggcgatgctgcggctgccggacaagatgccccgggaggacaagcgcgccctggtggagggcaccatcgtggagatgggcctccaggactgcgccgacaccgtcatcggcaactggcacctccgcggcgtcagcggcggcgagaagcgccgcgtcagcatcgccctcgagctcctcatgcgcccccgcctcctcttcctcgacgagcccaccagcggcctcgacagctcgtcggcgttcttcgtgacgcagacgctccgggggctggccagggacgggaggacggtgatcgcctccatccaccagcccagcagcgaggtgttcgagctcttcgacatgctcttcctcctctccagcggcaaaaccgtctacttcggccaagcatcgcaggcatgcgagttcttcgcccagaccggcttcccgtgcccgccactgagaaatccatcggatcatttcctgagatgcgtcaactccgacttcgacaaggtgaaggccaccctgaaaggttccatgaaggcaaggatcgagaggtcggacgatcctctggacaggatgaccacatctgaagccatcagaaagttggttgcatcctacagcaggtcccagtactagtacgctgcaagggagagagttaatgacatctcacgactgaaaggaactgtgctggattcaggaggaagccaggctagcttcttgatgcaggcaggcacactgaccaagcgctccttcatcaacatgtcaagggacttcgggtattactggctgaggctcctcatctatctcctcgtgaccgtctgcattggcaccatctactatgacgtcggcaccaagtacacatccatcctggctagggctgcctgtaccgcattcgtcttcggattcgtcactttcatgtcaattggagggttcccttcatttgttgaagaaatgaaggttttccaaagggagcggctgaatgggcattacggtgtcgcggcttttgtcatcagcaacacaatctcggcgctgccattcttggtcctgatatgcttcttgtcagggaccatatgctacttcatggtgcgccttcacccaggtttctcccactacatcttcttcgttctcaacctctacgccagcgtcactgtggttgagagcttgatgatggccattgcaagtgtcatccctaatttcctcatggggatcattataggagctgggattcagggaatatttatgcttgtctctggatactttagacttccttacgacattccgaagcctgtttggagataccccatgcagtacatcagcttccattactgggcgctgcaggggcaatgccagaatgacatggatggtctcgtatttgacaaccagtacccagaccaaccgaagatccctggagacttcattctgaagtacatattccagatcaacgtgcaccggtcaaagtggattgatctctcagtaattttcagcatgatcttcatctaccgcattctgttcttcctcatgatcaaggtaaatgaggatgcactgccatggattcgggggtacattgcaaggaaaaggcttcaaaagaaggaacctcttggcaagacaccctccctcagaggctacgttgtggatccagagcttggtcctaacgaaagctagaatataaactgttagcagatataggcccatttcttgccggttcttggtggaatatgtatctaagatcagagaaactggtatttatacgttttgaaactgaagctcaagctgatcggaatacaggtatatacagacatgtaatgtgtgaaaaatggcatcagagatgcagagttgacacatagctggtggttc

SEQ ID NO: 14342 - DNA, 1980 bp, Oryza sativa
  ref <308>: DATABASE ACCESSION NUMBER: AK064946
  ref <309>: DATABASE ENTRY DATE: 2001-12-06
gacatcgcgcatccactccacaccacacgcttcactggttccgagcactcgccaccgatacactccagtggcagccgagctagccgagagccaagcaacttgccgtggccaataagctcccgtgagctgacgtctcgtgctcgacggctcggcgctatatataaaagcgtagtaagctggtaaaaaattcacaaggccacgcgcatcttgtctcggccaaaaaaaagagagcgcacacgcggttgatttgtttgaccgacgcgcgtaggcggaggcggcgagctagcggggccggcgggcatgtcgtggtccgagacggacgccgcgctgttcgcggcggtgctggggcacgacgcggcgcatcacctggccaccacgccgccgcacctcgacgcgccggaggggtcgccgtcgtcggccgagctgcaggcgagcctgcacgacctcgtcgagcggcagggaggggcctggacgtacggcatcttctggcaggagtcccgcggcgccggtgccgccagcggccgcgctgcccgcgccgtgctcggctggggcgacggccactgccgcgacggtgccggacacggggaggtcggcgccgcggagaggagcgtggcgcggaagcgcgtgctgctgcggctgcacgcgctgtacggaggcggggatgaggatggcgccgactacgcgctccggctggaccgggtcaccggcgccgagatgtacttcctggcgtccatgtacttctccttcccggagggctcgggcggaccgggccgcgctctggcctccggccgccacgcctgggcggacgtagacccccacccttccggctccggtagcgcgccagggtggtacgttcgctcgtctctcgcccagtccgcggggttacgcaccgtcgtcttcctcccgtgcaagggcggcgttctcgagctcggttccgtcgtagccatccgcgagacccccgaggtcttgcgcgccatccaatctgccatgcgcgccgtgccagctccgccggaagatttcatgagaatcttcggcaaggatctctcacccggccgaccgtcccagcccatgggatgcgacgccccatggacgccgcggctcgttgtccaaaccacgccggtgcgcccagccaagagcttggacttctccaaggcgaacgtgcaggaacaggccggcggccaggagcggcggccgcggaagcgtgggcgcaagccggcgaacgggcgggaggagccgctgaaccacgtggaggcggagcggcagcggcgggagaagctgaaccagaggttctacgcgctgcgcgcggtggtgcccaagatctccaagatggacaaggcgtccctgctcagcgacgccatcgcgtacatccaggagctggaggcccggctcaggggcgacgcgcccgtgcccgcgcgggcggatgggccggccgtggaggtgaaggcaatgcaggacgaggtggtgctgcgcgtgaccacgcccctggacgagcaccccatctccagggtgttccacgccatgagggaatcccagatcagcgtcgtggcgtcggacgtggcggtgtcggacgacgccgtcacgcacacgctcatggtgcggtcggccgggccggagcggctcacggcggagacggtgctcgcggcgatgtcgcggggggtgagcgtcaccactccctccccgtgacagtgcagtgcagtaagttagtactgtactaccagtacagcagtactcgtgcgtacggtatagctgccaactgttatcagtctttgaatcctaggtaggtgcaactccttgtgacttcaagcaattaatggaagcaaagatgatatttatatatttcttttcctgatttatatgttagatttagatcattgtcttaaaaaaatgttagattaagatgcatgtacacaaatttagcctgaagcatcgtataggggttttccatactttgatatggcaatgacatgtcctcgttgttgg

SEQ ID NO: 14343 - DNA, 2008 bp, Oryza sativa
  ref <308>: DATABASE ACCESSION NUMBER: AK064947
  ref <309>: DATABASE ENTRY DATE: 2001-12-06
ggcttacttagccagagagagagagaggagagagagggaggagaggttctcgcggcggcgaatgattggggcgcatgtgtgggacaaccagatcctagctgctcatcgcgatacaaatcccatccccgtctcccccccaattccatcgctgtcctccaatctctcctctctcccaatcatcgtctcatctgcgcgccgtctctccccccgattcggcttcgtccccgccgccgtactgcgccgccgccggtgccgacctgctgctgctgcgggggagatctgtccgggtgtgcggctgattcgctttccgtcgctgcagctctacaggtttcttcggcagcaactgtagtagaaaagaaagaggggaagattcgcagttcatatggcaaaacctgctaatagcattggccgtagcacgccaagatcaaatgaggggatgaggctcatattctcggcagttgttggtgttatgttgggatacttgtttggggtttccttccctacagtaaatataaccaagcttcacttcccttccagtattatctcctatatagaagataggaactctggcatcacaacccagacattgttaaatcatgcgtgggcatctgcaaatcgtcataacaaaaacaattccgattcaacctctgaagaagttcctaagatttatgttcccacaaaccctaaaggtgctgaaaggctcccaccaggcattgttgtttctgaaacagatctttttccacggagattgtggggtgatcctagtgaggacctgagtagcgaaccacggtaccttgttacttttacagttggaattacacagaaggctaatattgatgctgctgtcaaaaagttttcagataaattcactatcatgctattccattatgatggccggactactgaatgggatgaatttgagtggtctaaaagagctatccatgtgagtgtcaggaagcagactaagtggtggtatgcaaagcggtttttgcatcctgatgttgttgccccatatgactacatattcatctgggatgaggacctaggtgttgagcatttcaatgcagagaagtatattgaacttgttaggaagcatgggctagatatctctcagcctggtttgcaacctgacaagggactgacatggcaaatgacaaaacggcgaggtgatcaagaagttcacaaagttactgaggagaggccaggctggtgcactgatccccatctgccaccatgtgcagcatttgttgaaatcatggcaaccgtgttctctagggatgcatggcgctgtgtctggcatatgattcagaatgacttggtccatggatggggtcttgatttcgctctaaggaaatgtgtggagcctgctcatgagaagattggagtcgtcgatgctcaatggattgttcatcaagctgtgccatcacttggaaaccagggcaacgcagagaatggaaaagcaccatgggaaggggtaagagcacgctgtaggaaagaatgggagatatttcaaacgaggctggccgatgccgagaaggcatactacttatcacaaggaatcacaccacccaactcgaccctagtttagaagaacacacgaacacgacacgacctcacctgtgatggcaaggtttctatttcggcaacctagctggaccttccatattattcagtacgttcatcaaagcaggtgcctctatatagagctacagttcctttgccagatttgtacatggaaagctctcgtggatcccacgactactgtttaatcctagctttggttcagttggttctagtctcattttgtttttgggtagtgtgactagctgcgatgtaagtaggcgatgtagcatggattctgagggccgagcactttgtttatacaatctgttgtatcattgactggatgcaatgttggcgttgcattgattcccattacttgtttcatcatgtaaattattcagctggtcttactgttttatggagttaaggtcgagcattttgtttt

SEQ ID NO: 14344 - DNA, 2084 bp, Oryza sativa
  ref <308>: DATABASE ACCESSION NUMBER: AK064948
  ref <309>: DATABASE ENTRY DATE: 2001-12-06
gacttcccttcatcccgccgccgccggtcgccgggcggcggcggcggcgaggtttcctccactggtcgccccagaattttaatagagtgctggatcaagaagaaaccggcgtaaaaaaaaaatcagtggagaacgtagagagagatggatggccggagaggaagaaggtggtttgacggaggcgagcacggtggctgcatttctcggcgttccctgggattctcatcggaggccgccggattcagtgttcgctccggtcaatcgccgccgcgcccccagagctctggttagcatggagattatgatttctgctgtggcaggtgatcttatcagccggttcatctcttcggtagcacaaaattacagaaaccatatacgtaaggaggatgatcgtaggaggctggaacgcatcttgctgaggatgcactgtgttgttgaggaagcagaggggcgccacatcacaaatcaaggaatgctcctgcagctaaagggatttattgagggattctacctcggatactacgtgctcgacaagatcaagttccaaccccctgaagaagaaagcatcgaagatgaggtgagtcatgagattcagtcatttgccttgtcagcctgtaactctcgcaagcgctttcgttttgctgatgccataagaaaacacacaccaatagcctttggtagcaggagcagaacaaacctgaaagatgttgttgatggtttagaaactaagattgcagatatgagggaatttgtcattctccttggtagccaccctcgtctaccacgtcagccttacagtacatatctatacatagagaattgtatgtttggcagccgtattgagaaggagcaagtcatcaatttcttgctttgcaatgatcctcatgatccgtatgttagcattcttcctattattggcccaccaaggattggaaagaaaactcttgtgcaacatgcttgcctggatgagagggtgcgcaactgcttctcccatatatttttctttaaagaagacgatctgaagaccggagagctctcgcttaactccaaggcttctcaagggaaatatttgtttgttattgagttcatttgggatgtggatgaggcagcttggacaaaattccaatcatatttgcagaatatgcccggtattggaattaaggttgtagtgataggtacaacagaggacattgctaagtttgggacaacccaacccatcagggtgaagaggccatccgaagaagagttttggtactacttcaaggcacttgcttttggaagtatggatcctgatgaacatccgaaactagcatctctggtcatgcagctagctactgaggtgaatggatcatttctttctgcaactatatatggtgaactattaagagctaatcctaacactcaattctggaagagaatcttattattcgtaagagagcttgcacggaagcacttgacttcctctggtctacaccctgacgatcttttcgaaagaaatatccctgtcgatatgagcaggatagccgttgtggatggtcaagttcaaggttgcctgctttatgatgttagggtcgctggccctgcagatggtgagctaccaaaactgacatcacgagacatgctactgggttgtgatattcctgtcgaagataagtttgatgtgctggtctggagatctcgcattccaccctactgtaactacatagttacgtatgagaaacgaaaaccgcgacgcatggttcgtaagaggaacacgatctacctctgagaatacacagacacaaatcttaatctgggggaaaattttctagaaagaatacattgtctacgctttgacaatatagtttagaaggctgggtatgccttcacagattctagctactactgattattcagacagtttaggtgaaaggagcatatgtcatactattgtagtttcatggatgtcttcattcttggagaactgctattgtatctgttcttactagtttgggtatgtataattcagttagttactattgctaccctgctagcgtcatgtgtgtgacagaatagttcacaaaagaagctactttctgtttccg

SEQ ID NO: 14345 - DNA, 2224 bp, Oryza sativa
  ref <308>: DATABASE ACCESSION NUMBER: AK064949
  ref <309>: DATABASE ENTRY DATE: 2001-12-06
gatcccgctcacgagttcctcacttcctcctccgcccgcgtcgcccctcctctcctctccctcccggctcccggctaccgccgccgccgccccgaggaaatggctgccctgcaaccctcattctcttcagcaatggctatgaaaagtctgaagttacccaaaactgcagttttacctggatttggtggtattgcacgtcctcaagatgtgcaggacaggagcgctaacttcacttgttcaaggcctagagcagcttcagtgactgaccagtcaacagcagagcagcaaaacccaggcaaaacaagcacactgttgatccttctgctccagaatttctgccactcccatcatttgaagaatgctttccaaggagcacaaaagaatccagagaaattgtgcacgaggaatctggccatgtcctcaagatcccatttaggagaatccatttgaccggagatgagaagcattttgacacatacgacaccagtggtccacaaaacattagtccaaggattggacttccaaagataaggaaggaatggattgacaggagggagaagttaggtggtcctcgatacacacaaatgtattacgctaagcagggaatcataacagaggagatgttgtactgtgccacacgtgagaaccttagtcctgaatttgtccggtcagaggttgcccgtggacgagctataattccttccaacaagaggcacctggaattggaacccatgattgttggacgaaacttccttgtaaaagtgaatgcaaacattgggaattctgctgttgtgagctccatcgaggaggaagtacacaagctccagtgggctacaatgtggggagctgatactgtcatggacctttcaacagggcgtcatatccatgagacccgggaatggatcctccgtaattcttcagtccctattgggacggtgtctatttaccaagcacttgagaaagttaatggtattgctgaaaatctaagctgggaagtctttagagatactttaatcgaacaagctgagcagggtgttgatttcacaatccatgctggcgtgcttcttcgttacattcctcttacggcaaagagaatgaccggcatagtttcacgtggtggctctatccatgcaaaatggtgcctaacatatcataaggagaactttgcctatgagcactgggatgaaattcttgatatttgcaatcagtatgatgtggcattatccattggcgatggtttgagaccaggttctatttatgatgcaaatgatagtgctcagtttgcagaattgctgactcaaggggaactcacacgccgagcttgggcaaaagatgtgcaggtaatgaatgaaggcccagggcacattccgatgcataaaattcctgaaaacatggagaagcaactggagtggtgcaatgaagcacctttctacacactggggccactgacaactgatattgcacctggttatgatcacatcacctccgccattggtgctgccaacattggggctcttggcactgcacttctctgttatgtaacaccaaaggagcaccttggattgcctaaccgtgatgatgttaagacaggcgtgatatcctacaaaatttctgctcatgctgctgatttggcaaagggccatccctatgcacaagcatgggacgatacactaagcaaggcaagatttgagtttagatggttggatcaatttgctctatctctggatcctgtgaccgctatgtctttccatgatgaaacattaccatcggagggtgccaaagtggcacatttctgctcaatgtgtggcccaaagttttgttcgatgaaaatcacagaggatattagaaaatatgctgatgaacatggttacgggacagtggaggaagcggtgatacaaggaatgaatgctatgagtgctgagttttcagctgcaaggaaaacaatcagtggggagcaacatggtgaagctggaggggagatatatgttccagaaagctatacagctcgcaaataagaatacaatctccgtgcagatcgtcttggtgtccatctactccgggtggagcgtttatcagcagcactcctcaccatcctatgttaggaggtggtaagcagtataagtgccttgaataaagctggtgttgcttagctcaatttgttaattctgtcgtggcttgtaataaaattaaactctatatgtgatccttccgtgtcatattttct

SEQ ID NO: 14346 - DNA, 1964 bp, Oryza sativa
  ref <308>: DATABASE ACCESSION NUMBER: AK064950
  ref <309>: DATABASE ENTRY DATE: 2001-12-06
ggtagtcatctctcgctcgcacacaactaataaccaacgaaaccacgagcagcggctgatcggtaagcggtagtggtagtagtagtttcgtttgtacgttgacccaagcagcagatgccaattgcagcagccgcggtcacctcgccaccggccgccgcgcaggtgcacggtgtcgtgccaaggcatgcctcgccgacgccacagcagcgggcggcgccgcgggggagcagtcgccgctgaacccgagctcgcagtcgatccggtcggcctcctccggcaccgagctcgcaggttccgcggcgacggaggcctcccgggcgcacatcgccaaccttgaccgggttctcgggaagccaccgcaggtgccgagaccggcgagccacgcggcggcgagcaagcaggagcggcagcagcaggacggggagctggagccgctcaacgtcaggcacggcctgctcaacgcgctcaacctgtccttcttcgtgcccatgcccgggatgcgggcccgcaccgccgccgacgagcacatgtcgcctcgcagcctcatgcacatgcagcagctcctctccgccgactccccgcgcgcctcgccgaggagcaccatcgcgccgcgctggcgcagcctccacggggaagacggctgggccggcctcctcgacccgctcgactccgacctccgccgcgagctcctccgctacggcgacttcgtccaggcggcgtaccaggcgttccactcgctgcccaccgcgtcggcgaggcaccgcgggctcatgctccccgaccgctcctaccgcccgacgcggagcctcttcgccacctcggcgctgtccatgccgccgtgggcgaagcgccccaacacccccgagtggctcacgcagcagtccaactggatcggatacgtcgccgtgtgcgagtccgagcgggaggtcgcccgcatgggccgccgcgacatcgccatcgtgctgcgcgggacggccacctgcctcgagtgggcggagaacctgcgcgcctcgctcgtgcctctcgacggcgagagcggcgaaggcggcgggcaggaggagcccaaggtggcacggggattccggagcctgtacaagacggcaggggagaaggtgaagagcctctcggaggaggtcatgggcgaggtgcggcggctcatggagaagtacaagggcgaggagctcagcatcacggtcgtcggccacagcctcggcggcgccctggcgctcctcgtggccgacgagatcgccaccaccgtccccgacgcgccgcccgtcgccgtggtctccttcggcgggcccaaggtcgggaacgccgcgttcgtggacaagctccagaagaacggcagggtgaacgtcctgcgcatcgtcaacgccggcgacatggtcaccaaggtgcccggcgtggcgccgcgcctgccgctcaccaaggagcagtaccagcacgtcggcgcggagctgcgcatcgacagcaagaactcgccgtgcctccgccccgacgccggcccggcgtgccgccacgacctggaggcgtacctgcacctcatcgacgggttcacggggacgggccgcccgttccggcacgacgcgcgccgcagcgtgatccggctgctgcagttgcagagggggaacgtgaagaaggagtacgtgaaccgcgcccgggagctcggcgtcgacccctcggcgccggtggacgtcggccggagcatggcgtacgggaactgcgccgtcgcgagcccctcctcgtgagacgacgagattgacgtcttcttccaagagcccttaattatgtaaatttttgtagaagcagaccaacaattctttcgttagtcaggggtgtcagcgggaaaaaaagattttcccttgtcatttgacgtatgtatgtacagtacataaaaactattatacttgcaaaaaaaaggaaaaacattatgcaagtgaaagcttgttatatctttatcaccg

SEQ ID NO: 14347 - DNA, 3153 bp, Oryza sativa
  ref <308>: DATABASE ACCESSION NUMBER: AK064951
  ref <309>: DATABASE ENTRY DATE: 2001-12-06
gtctggtctccaccctccctttctctctctagtcctctagagccgagggttgctgcgaggaaagcgtaggagagagggttgctggctgcagccccggcgagaagcgccattgttgtcgtcgttgggccaagaaccaagaaaccaagaagacaagaggaggaggaggggggaagaagacggaagagagagaggaagaggcactggataggtgcatcctttgcctctagccgctttctctttctccttcctggaggggggagagagagagaggagtgggagaggaaaggagagtagatgggcgagatggtcttggccgggtatggcatggacaaggcggtgaggagcagcgtcagcttcgagacgccgtgcggcaggctgctgcgcgagctcgagcaaatatggactgagattggggagcgcgaagaagataaagatcgcatgttcttagaacttgaaacagagtgcatgcgtgtgtaccgtcgaaaggttgatagtgccaatgctgagagatcccagctccgtcagtcattgatggccaaagaagcagagcttaaagttttagtggcttcaataggtgaaattaccccaaaatttaaggtggatgaaaagcaatcattgaaagagcaacttgccaaagtgacgcctctactggaagatctcaggtcaaagaaagaagaaagaataaaacaattctcacttgtccaatctcaaatcgagaagataaaagcacaaatttcggatcacaataatcagcatgacaatggtccggtcaatcattccaaggacaatcatgatttgtcaaccagaaggctttctgatcttcaagcggagcttcgcaatttacagaaagagaagtctgatcgccttcagaaggtcttcatatacgtcgatgaagtgcactgcctatgctctgtgcttgggatggattttgcaaagacagttaaagatgtgcatccaagtttacatggggccaactcagaaaattcaacgaatatcagtgatagcactcttgaaggtcttactgagaccatccttaagctcaaagcagaaaagaggactagagtttcgaagttgcaagaaatcgtcggaaagctccacaagttatggaatttgatggagtcaactgaacaagagaggagacatttcaccagagtagctgctgttcttggatctactgaggaagagatcacttcatctagtgtcctgtcgctggagacaattcaggagacagaagaggaagttgagagactaactaaacaaaaggcaagtagaatgaaggagcttgttcttaagaaaaggttagagctagaagatatctgcagtaatgcgcatatggagcctgatatgagcacagcacctgagaagataaccgcattgattgattctggtctagtggatccttgtgaacttctttccagcattgaaacacaaatagcaaaagcgagggaggagtccctaaccaggaaagatatcatggagaaagtagacagatggctatcagcttgtgatgaagaaacttggcttgaggaatataaccaagatagtagcaggtatagtgctggtaggggtgcccatataaatctcaagcgtgcagagaaggcaaggatacttgttcaaaaaataccatcaatgattgacaacttgatagctaaaacatttgcgtgggaggatgaaagaagtgtgccatttttatatgatggagcccgtcttgttgccattttggaggagcaaaaactcagaagggtacaaaaggaagaagacaagagacgacaccgggaccagaagaaactgcaaagcttattgcttaaggagaaagagttgattttcggctccaaacctagtccaaaaaagacaagcagctttaataggaggacgagcagccatcacccgaatggaaatggagctgggttcatgaccccggtgccccgtagagtttctgcaggcagtgccactcctgagcttctaactccacgctcatattctggacggtacaataattacttcaaagagaacaggaggctggctgctgcaccactgaacttctcaacggtttcgaaggaggatagtatgtcatcctttgcctccatcagcggctcagaacctgattctcctttggttttgcactgagatcccatcgttcgattggacattttcgagaatgtcacagttgatcttttgaggttctgataatcctgatttccaaatgctgcatttctggttagggatgagagacttctcagcaagaaggatggtagtgaagactatccacgacattgggccattgtgtgttaactggttgacattgctaatgagtgacgacaggttgtgacaggatttagataagatttgcctgtagatatatgacctaacatctgcggtgctgttgtacctaaattacgtcgattgatcagtgggttggttaggaagcatgcctaagttgtgcattatattcgttttcttggtattctttgagttttgtatttagtcattgttttgcatgtgaaaaggagttggtgttgatttgcaatccaaaggtgctgtgtaatttcatcctgcagactcaacctgaggcctttgatttgtgtgctgtactgctatggaaatcgtagttcatacttcattcaggaaggaaagaagaaaacaaggagggagcatactagtacataataaagagaaagaaacagaattaaacatgggaggagcccgaagaaatagcaattgagaagacagccttccacccatctagggccggtccatctgcttctttgatgtaaaattcacgcacctgatggtggttgattattgaagataacgttgtttttgtgattccaaatcctccaaaaagcagaggagatagaagctctgataatctttcattgcgatagaagctctgatagtcttcaactgaggaaatatttggccagcacccctattttggaccagaaagaagcaaattaccttttgctgacggagggagtacattttacaacacccttgctgcattttggtcttccaaagatatagggaggcctgacatgtgtaaagaacaagcctgtgtagtagctaaaacgccagtgaacagcagaacagtaaacaacttgagaattacccctttcttagcatgaaacggcaactccaagataaagttgacac

SEQ ID NO: 14348 - DNA, 2351 bp, Oryza sativa
  ref <308>: DATABASE ACCESSION NUMBER: AK064952
  ref <309>: DATABASE ENTRY DATE: 2001-12-06
ggttgcagcttgggcttcctctcccccccggttgctgctgctgcagctgagcctccgttcttggaagcgagagagagggagggaggagggaggcaattggtgaggcttttggaggaggaaagggaagcttcgggccccagcatcctcctcctcctcttgctcactcaccacgctctcctctcaccaaactctctcttatctccttccaagatcccaaccccttttcttctttttttttgtttgttcttgttaggatcattttcttgatctttcaagctcagctccagcactccccccgttcgtttccagctgcagcagagatcttggttagttggatttttagcttccgtgttttttgagcgagttcttggttaattgctccaatccgagaaaaatcaccaagtgtcctttgcttccctccctccccccttgttttctgggcttcgattcgatcgaattcgaatccccgtcccaaatttatttattttcccacccctcctttgtgtaaaaagcgggttccatcgcgtcacccgcacggctcgtccgatcgaaaagcagcttgaagaagaaaaagtgagagttcttgattcgattctggtcgtagcagcagcagcagcagcgtcttcactggttcgttctttgtttatttataaggagcagcgcccaatccgagctgctgctcctccaccgcggcggcggcggcggcggtgtttgatcgatgcttgccttggtggccaccttcgtcttggcctgcctcgtgttcttgtcgaagccatgcgcgcgtgagatgagattgttcctgtcgacgctgtgccaagaactcgccctcgcgctgctcgggttcctggccgggctccggctgctcggcggcgtcggcgccggcgcggcggccgagaccaccatgccgctgatgccgtccttcaagaggaagcgcgcggcggccgtggaggagggcggcggcggcggaggaggaggaggcggcgaggaggccggcggcgagccgtcggtgctcgacctgccggagctcgccatcgagtgcattctcgcgaggcttcccccctccgagctgcggaacatggccggcgtctgccgctccatgcgggagcgctgccgcggcgaccacctctgggagcgccacatgtcggagaagtggggcggcgtcctcggccacgccgcgagggaggagtggaggacgtacctcgcgtcggcggccgacacgggcggcgccgcggcgtcgtgctcgctcgccggcggcggcaggcaccggaggtggctcgccgcgctgtcctgcgtctgcccggtggtgtcctggatgcgtcccagggccgacggcggcagcggcggcaagtcggccggccccgtgctcgatgattcgatcatgtcgtggtatctgtccatggagagtggcaagttctggttcccggctcaggtctacaaccgtgagcatgggcatgttggattcatgatgtcatgctacgatgcagagctcagctatgatttccacagtgataccttccgtgcaaggtatccaccacacggacgacggaccgtagtcttggaggacggggtacactgggatagggtcagggcacctccagtagacactcacgcacatgatctccatgcctctgactgcttacacgaactccggccaggcgataacattgagatccaatggagaaggaacaaggaattcccctatggctggtggtatggagttgttggccacttggagtcatgtgatggaagtgagcacttttgtcggtgtcatcttagtgacactgttgttctggagttcaaccaatacacacctggttcaagatggaggcaggcgctggtgaaccggaaggaccacagggaagagggcaatgagggcgacggtttctacggtggaatcaggaagctccgcagcaaggatgagatctcaaagtggagacagttgtggccaacagacattcttgagtagcaaggacagagattattattccactgttgttattcatcaagttgccaaattgatgctctccaattgctcattctgtattctgaaacctgacgaaaacgccacccatctcctccactcaagttgtatacacaaaggattggaacatggggtgacaaaatttggtagcttgggacacaattgtgaaacttactgtaaggcacggatgcacagattgcttctgtaaacgggcgttaactgaacatgtatcaagtctacagcattgtatgtgactgctgcagcctgtgcctctgcatgttgttgtagctgtagagcagaaagatcaaatgtaaattacattgttagctccaatttaatttacggcatttcaggatgccgtctcacgggt

SEQ ID NO: 14349 - DNA, 2050 bp, Oryza sativa
  ref <308>: DATABASE ACCESSION NUMBER: AK064953
  ref <309>: DATABASE ENTRY DATE: 2001-12-06
gattccccgcagcgcggagccgccgccactcccccccaccctcaccccgcagaccattcggaaaacctagatccgagccttcccccttcccctcccccggcggcggcggccatggcgacccgccgggccctcaccttcgtcctccgctccgcctcccgcctccgcgccgcctccccttcccagtgcccgcgccgcgcgccgctccacccccaccgccgcccgtcccccgcgggcttcctcctgaaccgcgccgccgccgcctacgcgtcgtccgccgcggcggcaggcggcccccgcgcctccccccgcgtcgggcaaggccaccgggggcggcaagatcaccgatgagttcacgggcgctggcgccgtcgggcaggtgtgccaggtgattggcgccgtcgtggacgtgcggttcgacgagggcctgccccgatcctgaccgcgctggaggtgctcgaccacaacatccgcctcgtgctcgaggtggcgcagcatctcggggagaacatggtgcgcaccatcgccatggacgggaccgaggggctcgttcgcggccagcgcgtgctcaacaccggctctcccatcactgttcctgttggtagggccacacttgggcgtattatgaatgtcatcggtgagcctattgatgagaagggagatatcacaacaaaccacttcctccctatccatcgtgaagcccctgcttttgttgagcaagctacagagcaacagattcttgttactggaattaaggtcgtggatctccttgcaccctatcaaagaggtggtaaaattggtctcttcggtggtgctggggtgggcaaaactgtacttattatggagttgatcaacaatgttgcgaaggctcatggtggtttctctgtctttgctggtgttggagaacgtactcgtgagggtaatgacttgtacagggaaatgattgagagtggtgtgattaagcttggtgacaagcagagtgagagcaagtgtgctcttgtctacgggcaaatgaatgagcccccgggtgctcgtgctcgtgttggactgactggtttgactgttgccgagcatttccgtgatgctgaagggcaggatgtgcttctcttcattgataacattttccgtttcactcaggcaaactccgaggtgtctgccctgcttggacgtatcccatctgctgtgggataccagccaacccttgctactgatcttggaggactgcaggagcggattaccaccacaaagaagggttctatcacatctgttcaagctatttatgtgcctgctgatgacttgacagatcctgcccctgctactacatttgcccatcttgatgctactactgtgttgtcacgacagatttctgagcttggtatttatcctgctgtcgatcctttggattccacatccagaatgttgtctccccatgtactgggtgaggaccactacaacacagctcgtggtgttcagaaggttcttcagaattacaagaatcttcaagatattattgccattctgggaatggacgagctcagtgaggatgataagttgacagtcgctcgtgctaggaagattcagcggttccttagccagcccttccacgttgccgaagttttcacgggtgcacctggaaagtatgttgagctgaaggagagcgttcaaagtttccagggtgtattggacgggaagtatgatgaccttcctgagcagtcattctacatggttggaggaatcgatgaggtcattgccaaggcagagaagattgccaaggagtccgcttcataagcgatgcaatttttaacatttggaggtcaacatgttgtgccttttatgtttgttagccaggacatgtacttacatgcaggaggcccggccctgctgatcgatgtttttcccctccacttttttccaaataaggatttgcagtgacctatttgtttggcttactgcccttcaaggaagaattgagttctctttttgtgtgatgtgcggccagtccggcagtccgtgaacttgttacttgctgaaaacactgaaatattggtctccc

SEQ ID NO: 14350 - DNA, 1046 bp, Oryza sativa
  ref <308>: DATABASE ACCESSION NUMBER: AK098864
  ref <309>: DATABASE ENTRY DATE: 2002-08-28
gggccacctcttcttcctacttcgtcttcttgctggtgtgttcgaggaggaggaggaggaggagaagctagcggcggcggcggcaatggcgacgagcgggctgaggagctgcagcgcggtgggcgtgccgagcctgctggcgccgtcgtcgaacaggagccgcctgccggtctgcgcctacgccaccacctccgggcgcgtcaccatgtccgccgagtggatgccgggccagccacgccccgcccacctcgacggctcctctcccggtgacttcgggttcgacccgctgggcctcgccaccgtgccggagaacttcgagcggttcaaggagtcggaggtgtaccactgccggtgggccatgctcgctgtgcctggggtgttggtgccggaggcgctggggctgggcaactgggtgcaggcgcaggagtgggcggcggagcccggcggccaggccacgtacctcggcaacccggtgccatggggcacgctgccgacgatcctggtcatcgagttcgtcgccatcgccttcgccgagcaccagcgcaccatggagaaggaccccgagaagaagaagtaccccggcggcgccttcgaccccctcggcttctccaaggaccccgtcaagttcgaggagtacaagctcaaggagatcaagaacgggcgattggccatgctggcttttgtgggtttctgcgtccaacagtcggcgtacccgggcaccggcccactggagaacctggccagccacctctcggacccgtggcacaacaacatcggcgacatcatcatcccgagaaccatctacccttgagcttggcacgaaccggtgcgtgcgtccgggcgtacgtgaaggctatgggtggtttttatgtgcgtgcgtactgtgtgtgattggttgattattgcgcgcgcgtgcgcacgcagtggtcggccggcaggcagctgctggttggccttgtaatgtaaagcttaagtagagggtgctctcttgtgaatccgtccatcttaatttttgtatcaaacacgaaatcaaactggtcttagtt

SEQ ID NO: 14351 - DNA, 2892 bp, Oryza sativa
  ref <308>: DATABASE ACCESSION NUMBER: AK064954
  ref <309>: DATABASE ENTRY DATE: 2001-12-06
gagctgggctggtggtgattgggacggcgctggtgtgtgtgtgtgagaaaggagtggggctgagctctccgaccccgctcttggctgtggagcgagctgctgctgctgctgctggtgctgggcgggcgctgcggacttgcccttttttattgtgtctttctctgctctggaccaggaggaggtagcggcgagagaaaggccttgcttggttggttttttgctgcctgttcttgggttggtctgctctcgccgtgtttggtggttgttgctccgcggtggagacgctcggatctgaattttggcggcgggcgcgcggcgaaggaggcgaggggtttctcaggctgcctcgcaagtcgcaagtaatagcaagcacctctatcggatttcattcatattcttttggaatgtcgtgaaaagttctgtcatgtcttgctggcgacaagtcttcggtggaattagaatcttaagccaaatctttgaagccgataatgccagagtcttctaccaacagattttgtaagaaggtagatttagaagttctgccaagcagaagtgacgttggagaatcatcttaccacaagcactccctatggatggcacattgggccagatcaagcatcagtccagaacctcaaaatggccagagctgtagcccacttaaggaaattgatgatgttggctattcaaaagattgcggggctttaccttttgagctcatgaaagctagagtagctgaaaggttgatggtgggagtgagccatggaggtgtctctgcaggaaatactcggcaattcagtactaatatgaggggtgtagcacgtgatgtttgccaagaagttcaatgcaagaatgttgatcagatgggtagctcctttgaaagttctgtgatgcagaaaaatgtgaacttatatgctgctaagacggtggtatctgaaagatattctgttcataagatatctgatatattggtggattctcgtaaactttgtggcactgaaaatctgagttcagagtggaatcactttccaatgtttgaaatcaacaggaaaatcgacagtattcttaacccaaggcggtctgcgttggtcacatcatctgaaaagatttttgtaccacaaaaatcagtgaagataaatatgtctacgtctaatgtgatgtcattttcatcaaaggaatatcagctgcacacacatcaggtaactggtgagaataggcaatgcaaatctgcaaggggcatgctatctcatcttgataattacactggcctcaattctgaccatgcagggaaaaagctgaaaggccatttatcaattgaagaaccatgctcttgcagcaaggatgacactgactcatcatgttcattagcagacgagcaccatgctcgccattatatcccaaattcaaagaagtcacctcatcggtcttgcaagaacagttctgtgtattcagcgagcaaaatggaaaatcaatttgttgaaggttctttgttggaacataaatcagaagtgtatggagcatgcaaaaagaaactgcatttagagggagttgctttccatgagtctgcactgcatagagaatatcaaatcaagtcagttaaaactactgccattaccaacgagggtgatatggacactaatggccatcatgtggactttggtaatttgttacaaagtgatcagcagtatctgaataaacacacagaagattctgcagtgaatttgacagaatcctgcaagacacctgatgcaattgatagtgcaatgatactgaagagcaaggacgaatccctggcccaagaaaagagaacaaacaacaaattgatagataacaaacggaagggtccctgcttatttgaaatgtttacacagcctacgaaatcaaatgtcaaatgttccatagatcgaacatcttcagggaaatcttgtggtaacatgaccagtggtttattgggagcacagaaacagttttcaactaaaactgataccttttacagtgaagctcaccatgcatcaaaatctacagcaggatttgcttcagcatcaatgcaaaaggacttgggttatccatcctctgcaaaaactgaacagttagtgacttcatcagttaaaggagtatcaagcggcagtaaaggaaatgaagcagtcaacacgagtgcagaacaccgcgacttctatccaaaagcaacttgtgccaacaatcaagaatggagcatgtcaaagacatcaagcatgaacttagatttagttcttttccaaataagcagactgaaaaatccaattcctaatgctttaaatgagtcgccagcatgtccagatccaagtgagaagtggctgaaacgcctgcaacatgatacctcagactctcatgttccttgttccaagaaaccaaaggttggagatggtccattggctggaggaacatgtactgtgtttggtcaagtgtttgactgtgacagcgacagtactggcatgatcaaccatgtgaagaacaaattaatatgtaaaggactcactgatcaacaaagccaagaaggttctcctatgtcagcaaaaagtcttaatcgttggataggaagatggtgcagaggaggcacccctgtttttcatggaacttcaaatctagaaagacaggaagccaagtctggcatgccatcggatgatcttgagggtcagtttccaagcatcgcagcaatggcgatgatggggcgtgtaatgaacaagctccggccatgtgaacttcagaagaggggtccctctgtagtctggaggacagaggggctgtgaaaattgcatggtgcatgttttgccggccatcagctatcatgtaaaaaagtcttcaaattctgcaggtaggggatactttagtaaacgcaacgtgtgattatgattttcc

SEQ ID NO: 14352 - DNA, 2685 bp, Oryza sativa
  ref <308>: DATABASE ACCESSION NUMBER: AK064955
  ref <309>: DATABASE ENTRY DATE: 2001-12-06
gacaatcacttctccccccggaatatctccgccaagagaagagaagagacacccaacaacccaaaacctagcgcctctgcgctcgaggcccccccgaatccgcgaatccgccgactcccatggcgagccagggagagccctcctcctcctccgatccgaaggggaagaaggatttctcgacggcgatcctcgagaggaagaagtcgccgaaccggctggtggtcgacgaggccaccaacgatgataactccgtcatcgggatgcaccccgacaccatggagaagctccagcttttccgcggcgacactgtgctgctcaagggtaagaagagaaaagacaccatctgcattgttcttgctgatgacacctgcgaggagccgaagatcagaatgaacaaggttgtcaggaagaacctgagagtacgacttggtgatgtcgtgtctgttcatcaatgcccagatgtcaaatacggcaagcgtgtgcacatacttccaattgatgatactgttgagggcatcaccggaaacttgtttgatgccttcctgaaaccgtacttccttgaagcataccgtcctttgaggaaaggagaccttttccttgttaggggtgggatgagaagtgttgaattcaaagttatagagactgaccctgcagagtactgcattgttgcacctgatacggagatattctgtgatggtgagcctattaagagggaggatgaggaaagacttgatgaagttggttacgatgatgttggtggagttaggaagcagatggcccaaatcagagaacttgttgagctcccattgcgccatccccaacttttcaagtctattggtgtgaagcctccaaagggcaaactgctttatggaccccctggctctggaaagaccctcattgctagagctgttgctaatgaaacaggtgctttcttctttctgattaatggcccggagattatgtcaaagctagcaggagaaagtgagagtaatctcaggaaggcatttgaagaagctgagaagaatgcaccatcaatcattttcatcgatgagatagactccatagcaccaaagagagagaagacccatggagaagttgagaggcgcatcgtttcacagctgttgactcttatggatgggctcaaagctcgttcccatgtcattgtcatgggtgctacaaaccggccaaacagtattgatcctgctctcagaaggtttggtaggttcgatcgggagattgacattggtgttcctgatgaagttgggcggcttgaagttcttcggattcacaccaaaaacatgaagctggctgaagatgttgacctggaacacattgccaaagacactcatgggtatgtgggtgctgatcttgctgctctttgcactgaggctgctctccaatgcatccgtgagaagatggatattatagatcttgaggatgagaccatagatgctgagatacttaactcgatggctgttacaaatgatcacttcaagactgcactagggacaagcaacccgtctgctctccgtgaaactgttgttgaagttccaaatgtctcttgggaggatattggtggactggagaatgtcaaacgggagctgcaggagactgtccaatatccagtggagcatcctgagaaatttgagaagtttggcatgtctccgtccaaaggtgttctgttctatggccctcctggctgtggtaagactttgttggccaaggcaattgctaacgagtgccaggctaacttcattagtgtcaagggacctgagctgcttaccatgtggtttggtgagagtgaggccaatgtgcgtgagatttttgacaaggctaggcagtcagctccttgtgtcctcttctttgatgagcttgactcaattgctacccagagaggaagcagtgttggtgatgccggaggtgctgctgatagagtgctgaaccagttgttgactgagatggacggcatgaacgcgaagaaaaccgtgttcattattggtgctactaacaggccagatatcattgaccctgccttgctaaggccagggcgtcttgatcagcttatctacattcctctgcctgatgatcaatctaggctgcagatcttcaaagcttgcctccggaagtcacctgtggccaaggatgtagacctgaatgctcttgccaaatacacccaaggtttcagtggtgctgatattacagaaatctgccagcgtgcatgcaaatacgccatcagagagaacattgaaaaggacatcgagatggagaagcggaggaaggacaaccctgaagccatggaggaggacgaggttgatgatattgctgagatcaaggcggctcacttcgaggagtcgatgaagtacgcacgccggagtgtgagtgacgccgacatccgcaagtaccaggccttcgcccagactctgcagcagtctcgtgggttcggcaccgagtttaggttcgctgaccagccagcgtctggcgccggcgccgccgctgaccccttcgcatccgctgccgccgcagctgacgatgatgatttatatagttagatcgctgtgctatttatatttaacctccgtgcttttgttcagtatgtctatttcgctttggtaaactttatcatatgtaacatacggggaaacagtgtaccatttttaagttaatattttgagaggtactgaaccg

SEQ ID NO: 14353 - DNA, 5529 bp, Oryza sativa
  ref <308>: DATABASE ACCESSION NUMBER: AK064956
  ref <309>: DATABASE ENTRY DATE: 2001-12-06
tctcccaatacaactagctaacttaattagttgttaattagagtttgcccatgctgctttaatattcgcgctcgatcgaacgagttgtagcagccatgtcgtggaaggccttcaccaagtccctcctcttccactccaacaagatcgtcaggcggctcaaatccttcgtcctccatgcgcatcctcctccgccgccgccgcacgtcgtcaggcggccgccgtcgtcggacgagctgccggcggcggcggacgtgacggtgtgcaaggtggagggcggcctgctgatgtcgccgtcgaccttcccgtacttcatgctcgtcgcgctggaggccggggggctcttccgcggcctcctcctgctgctgctctaccccgtgctgctcctgctcggccatgaccgggccaccaagctcatggtcatggtcagcttcgccggagtcaggaaggagaaggacgggtcgccgtccttccgggtgggcagggcggtgatgcccaagctgttcctggaggacgtcagcgccgaggtgttcgatgcggcggcgcggcggcggcggctggtgtgcgtgagctccatgccgagggagatggtggagccgttcttgaaggagtacctcgccgtcgacgccgtcgtggcgccggagctgagggcgttcagggggtattaccttggcctcgcggagtccgacggcgaggtcatgcagaggctggacatggaggaggtgatcgggatgaaggagcgcggcggcgccggcgacggtgacggtgatggacaggtcaccgtcgtcggcatcgccggactcgggaactcgttccatcagctcttccaaaactattgcaaggtaggagtggagtaattcactcggaaaactcaaataatccttaaaggggatatcacttaaaaagtcatcaaaatttttaaaaaaatttagtaagataggtcagtatatgatttgccacttcacttcaaattcaacttatatagataaaaacaaaactcataactttacctacgacgtgaccacgtactccacagtccacctccgttatgtttgttttatattatataagttgaattttaactaatatgtttacgaaaagatatattatatagtgatctatcttaaaagtatttgttaaaactataggtacgcaaaacgagtgatgtccctgcgagggaaaaaaatgtacttcctaattcactgtacatgcatgcatgggtcgtcacatgcaaactactttactccacgtcagcgttatgcatgcatatctgttcgtaggtactactccgtatgtagtgttgatgatcaaagccagaactccctgacttcacattacaagtcttttgatttttttttaaaaaaattgttttgatttaatgaaatttatagaaaaaaaaattagcaatgttacaacactaaattattttcatataatttaacattgaatatattttgatatttatgttatatttcaacactattattatattttttctataaatttagtaactttgactatgaaaaaaataaacgacttataatataaaacgggggagtagtagttagtgatatgatacagagggttaatttgatttgcatgcctatatgcatatatatactcactttatttttttaactgcaattgtgacgttcactttaaacggttaaccatttatcttagtttaaaaaaattacataacttgtgcaagaatataatcatgggtgatgtatatttaataataaaataaataattattatataattttggtaataagacgaacggttaaacgtatgtctagaagttaatggcatatcatatactatttattaagaaaagaggtaactgaaagctgtagataatatattgtttcgtatattatacagtgggtcttgatcgatctacatgtagctttaatagctcttctttttttctaattaattcatccctcattaagtacgtgataataagtttctgttgtcggccggactgtatatagcgagttatgggtaaggtatgaatgccgcttttcattgaaatctcagtttacgtacacacggcccagaacggtaattggcatgttactgaatttttgtcagcagagctacagtttattcacctcttgtcttgtagtacctatatatatgccactttaaaattaaatgcttcttttaaggctatcttcaaatggttttcaactgttcatactggtagtatgtaaataaccatgcctatttaagaaggttaattggatttatgtcattataaaaaataccctattaaaatttatcattacaaaggatgaaattgggtgatataatgattattttgcaaagtttaaaccatatcattatgtagtacgcagtacatctaggatgtctttgttcaagtatttttcatatagactaaaatgcccctgccattcttttcatatgaaccgtattttcgtatatatggcactgatcgatttttttttcatcaattaattataagtctctgttcacatcaacatcatcattaagaaaagacccgtgcatacagtagctccgcatcacttcgttatgaatcgacgtacgttgcacgtttatattactactcttatcagatataattaagagcactgttttattcaggtgaatcaaatcgtattattcacccgacatgcatcctacatatttacttccgctgtcctaaaataacatcgtgtttaccctcctccagtttattccaaattaaatttacttttagcaatcattgtattagagtttgtaaaagtgaatagtaaatacattgaaactagataaaataagaaacaattatattgtgatttaataaaatagaactattttagttttttttgtcctattgatacgtgtgagattgataaaaaataaatttatttagggaggtagtatgcatgatcagctgcagtgttgataaaattagttttaccaacaataagacactggtcaattaatctaccgaccgattaagacaccggtcaaattaatattcgtaccgatcaaataaatctgcataaccgattaagacatcggtcaattaatctaccgattaactaccagttgtcgatcactctttactacacatctttctcaaccataaattcgtaaggatttctcattcacgcccatgcttgtgcacaaacagaataaaatttattatctacaatagtatatactactacgtgattaataaatacatgtacatgtatatttacatcttacgaaatgagcgtagctcaactagttaggggctgctgatggatggcttgccacgcgcctagcacggtcacctcacctccttacatcccctgtacgtttgtacatacttttgcagtggtagagctaactcaagggcaggtcgggcggtcgcttaggctctgtcgctggcgtctcggctgtagatagcatttgatgtcccaaaaaattagttgattactgaaaaacgctaatacttgtctgggcttcatggcatctttgctccaccactgtacttttgtatacacacgtataaactgtgtacatgtatatataccaagtttatacatgtatatatactaaatttatatgtatgtatacaaagtataaacttcacatatacatctacaaattttctatatttagaaaaattgtgtgtatactttttagatgtataaaaaatacacatacgcatataaactttatacttctatgtacaaattatgcgtgtatgtataaaaatagaaaaaaaaggcatgatcggaaactgaccagacacgcagtcgatcgctaattagtaattttgtaactgcgtgggttccttgtggtggaaactgtctttcgggttcaattcctagacttagctcacgtgctcgcatttataattaatattcttttcattatagggatagagagacgctcgcgatgactttatcaatcttaagaatgtcgctcagtctttttaaaaatgctcacagggatagagtgtgcgcgtttttgtgtacgtctgagtttgttccgtgttttagaaaaatatttacacgctcaaataattaatataaagattacattttttttaatcgggctaaagatttactattgatcccgatacttttactgtgggttaaaacggacgcattcatggtgttgaggtgttgtgcgatggtactgaacacattgtgtactccctccatcccatataaaatcaaaccctcgcatccctatataaagttagtgcagagtaaaaatgaacaaaatactttttattattgaaaaaatagtaatggtgatagataggtaaagagtatcgaaggaataaaacttttcattttacatgctgagaatagataagattgtacaagttttttttgataaaatttaagctctagaagttgattttttttttttagggagagagtagaaaggaagatgcaagatagattaatcaagtgagaatgggcaaacattaatgaatgcaggaggtgtacgtggcgtcggagtgggcgcggcggcgatggcgtcccctccatccccggcgatacgcgaagcccctcatcttccacgacggccgcgtcgcgttccggccgacgacgtcggcgacgctggccatgttcgtgtggctgccgttggccgtgcccctcgccctcctccgcgtcgccctcatcgtcgtcgtcctccccttctccctcgccgccccgatcgccgccgccctcggcatccactgccgatgcatcgccgcctccacgctgcgggccgccgcggtcttggacctcttcgtctgcaaccaccgctccctcctcgacccgctctatgtctccgccgtcgccggccgcgccgacctcgccgccgccacctacagcatcagccgcctctccgagatcctcgccccgatccgcaccttccgcctcacccgcgaccgcgccgccgaccgcgccgccatgcaggcccacctctcccgctcccggcgcggcggcggcggcggcggcctggtggtgtgcccggaggggaccacctgccgcgagccgttcctgctgcgcttcagcccgctcttcacggagctcggcgccgacgtgcagcccgtggcgctgcactcggaggtggccatgttccatggcaccacggccggggggtggaagatgctcgaccccttcttcctcctcatgaacccctcgccggcctacgtcgtgcacttcctcgaccccgtcgccggcggcggcggcggcccggaggtggccaacgaggtgcagcgccggatcgcggagacgctggggtacacctgcacggcgctcacgcggagggacaagtacctcgtgctcgccggcaacgatggcgtcgtcgccaacaacaacaagagcaattaatttactaatcaactactctactgtctactactgttgtgtactccactacgtggcttgtaattagcatccttaatcccgcagttaattaaggggaagtgtaagacacactggttgtactcatccaaatgctcatatcaagttataatgaactgcgaaattcgattgctgcttc

SEQ ID NO: 14354 - DNA, 2204 bp, Oryza sativa
  ref <308>: DATABASE ACCESSION NUMBER: AK098865
  ref <309>: DATABASE ENTRY DATE: 2002-08-28
gtggcgtgttccctctctctctcctcttatccttctcttctccgtttgcttcgctgctgctgctgctgttctacgcgcgcgacacggaagagagaaaagtggttttttattgggttcctaagccctttttgtttccagaggcttctggattgatcggttgatctctctcccttcccctctagggtttcctgggggtggatctgaggagcggcggcgctccttcgtcccggtttatgtaaatctgatcgatccagaaagtttgtgaaaaaagagtgtggcacatacctaaagctggcttaaagtttgcccatagctaatatcatgggcgctctttgtgatttctgcggggagcagaggtctatggtttattgccgatcagatgcagcatccttgtgcttatcgtgtgaccgtaatgtgcattcagctaatgctctttctcggcgccatacaaggacacttctgtgtgatagatgtgcttcacagcctgccatggtccgctgccttgtagaaaatgcctcgctttgccaaaattgtgattggaatgggcatagtgctgggtcttcagctgctggtcataagaggcagaccataaactgctactcagggtgcccatcatcttcagaactttcaaaaatctggacatttgtttcggatattcctaatgtagctcctgagccgaattgcgagcaagggataagcatgatgagcatcagcgacagtggtgtcagtaatcaagacaatgctgcaggggacagcagtttgttagatattgctagtgcaacccttatgagtgatcttggcactgctggcaagccaaagtctttgataggctcctcatctgaagctggcgtgaaccttcttccacttgctactgatcagatggctggatccgtggattcgacatcagctaaggtgccctatacggcagaccaagatatgttcagcaaagacagtatatatgaagatttctgtgtggacgatgttgatcttagtttcgaaaattatgaggaactatttggcacctcccatattcaaacagagcaactgtttgatgatgctgggatcgacagttactttgaatcgaaggaaataccttctggaaactctgatgagcagcccaagctgatgcagccagtgaccagcaatgcagtatctgctgattcagggatgtcgatcccaggagccaaaggtgattccagtctttgtatacctgtgaggcaagctaggtccagtatctctctttcattttctggtttgactggtgagagcagtgctggagattaccaagattgtggggtatcaccagtgctccttatgggtgagcctccttggcatcctcctggccctgaggggtcatttgctggagctaccagagacgatgctatcacacgatacaaggagaagaagaagagaagaaaatttgacaagaaaatcaggtatgcatctcgcaaggctagggcagatgtgagaaaaagagtcaagggccggtttgttaaggctggtgaagcatacgactacgatccactctgtgaaacgaggagctactgaacacaataaaacattatccaagtgttaggttagcaagcatcaaccaatgcttgttgtggctggcaggaaggcactcatactacaaacaatgtggcaggcctgcctctaaaaacaacaaaaaaaacagagcaatcaaggggacaaaaaggacaaaaagatttgaatttgggaaatttttcagatgctaccccctcctttttcttctgtacagtggagggaatttgcatctttctgttgctttcgggaggagcgatttgagtcgctgcccaccttttgtgaattaatcttgatacagctgaacaaacttcacttgcatttttatctcctttctactaaccagagcatccacctacccttgctgtggtgtttttggtggtatgcttccagattggactattagcaagacaaggatggatgtagtcgtgaaatcttctgctgctctatttattgttatgtaaaatctgctgtaatccggagtttattctgcaactctgcatgtgtaaataccagatcagaataaactggtagatgtaaagttttctttattttctcaagtcgatgacattggaacccatgtaaccggccaccaacttttttgtttcactatgctcaaatattcgaaaacttcagactggcttaatgctattatttgtact

SEQ ID NO: 14355 - DNA, 2770 bp, Oryza sativa
  ref <308>: DATABASE ACCESSION NUMBER: AK098866
  ref <309>: DATABASE ENTRY DATE: 2002-08-28
ggctaagtaagtaagaattgtggttgccactcggcactcgccaccatgctcctcgtcggcgtcctcctgctgctcttcttcaacctacatctccccacggccgccattgacaccctcacgctaggccagtctctgctgtggaaccagacgctggtctccaatggcggcaacttcgagctcggcctcttctcgccgggaaagtccaacaagcactaccttggcatctggtacaagaagatctccaagaagacggttgtttgggttgccaaccgtgagcgcccgattcttgagccgtcgagctgccacctcgagctgagcgtccacggcgatctgcggctgttctcgacggcgccgtcgaacaccttgctgtggtcgtcgaacgcgtccgcgtcttcctcgccgtcgcccccgcgcaccaccgtcgccacgctccaggacgacggcaacctcgtggtgaacagcaacgcgacgcggtcgcggtcgcgatcgccgtcgtcgactacgacgacgcacgtggcgtggcagagctttgatcacccgaccgacacatggctccccggagccaggctcggctacgacaggggccgcggcgtccacagcttcctcacgtcgtggacggactccgagaacccggcgcccggcgcgttctccatggtgatcgacgcgcgcgggctggccaagttcgacctcctcgccggcggtgagcaccggtactggacgaccggcctctgggacggcgagatcttcgcgaacgtgccggagatgcggtccggctacttcaccggcgtcccctacgcgccgaacgccagcgtcaacttcttcagctaccgcgaccggctgccgggcgccgtcggcaacttcatgctggacgtgaacgggcagatgcggcggcggcagtggagcgagacggcggggaagtggatcctcttctgctcgttgccccacgacgcgtgcgacgtgtacggctcgtgcgggccctttggagtctgcagcaacgccaccaacccggagtgccggtgccccgccggcttcgagccgcggtcgtcggaggagtggaggctggagaacgccgccggaggctgcgtgaggcggcaccctctcgagtgtcacggagacgggttcctggcgctgccgtacaccgtgcggctcccgaatggctccgtggaggcgccggccggagctgggaacgacaaggcgtgcgcgcacacctgcctggtcgactgctcctgcacggcctacgttcacgacggagcgaagtgcctcgtgtggaacggcgagctcgtcaacatgaaagcctacgcggctaatgagaatggccaaggcgatcctggcctcgccggagcggtgcttcacctccgtgtcgcccactcggaggttccggcgtcgtcgacggagcactcgtggaagaaatcgatggtaatccttggaagcgtcgttgcggcggtggtgctgctcttggcgagcctcgtcaccgtggtggcggtggcggcggtgttgcggatgcggcgtaggaggggcaaggtgacggcggtgcaggggtcgctgctgctgctcgactaccatgccgtgaagaccgcgacgagggacttctcggagaagctcgggagcgggagcttcggcacggtgttcaaaggcgcgctgccggacgggacgcccgtggccgtcaagaagctcgacggtctccggcaaggcgagaagcaattcagaacggaggtggtgacgctcggcatgatccagcacgtcaacctcgtccgactccgtggcttctgctgcgagggaaacaagagggcgctcgtgtacgactacatggccaatggctcgctggactcgcacctgttcgtcatgagcggctccagctccggccccgactccaagcaggtgaccctgacttggagccaacggtacaacgtcgcggttggtgtggcacggggcttggcttacctgcacgagaagtgcagggagtgcatcatacactgcgacgtcaagccggagaacatcctcctcgatcaggagatggcggcgaggctcgcggacttcggcatggccaagctcgtcggccgcgacttcagcagcgtcctgaccaccatgcggggcacggtgggatacctcgcgccggagtggctagccggcacgccggtcaccgcaaaagccgacgtgtacagcttcgggctcctgctcttcgagctcgtctcgggccggcggaacagcaccgcgccgtcgtcgtcgtcggagggcggccctgggatttacttcccggttcatgccgtggtcaagctaaacgaaggcgacgtggccgggctggtcgacgagagggtggccaaggatgccgacccgaaggaggttgagagactctgcaaggtcgcgggctggtgcattcaagacgaggaaggcgaccggccgaccatggggctcgtcgtgcagcagctcgaaggcatcgccaacgtaatgttgccgccgatcccttctcggcttcatatcctggcgattgagaacgaatgggtcagaggtgttccaggggatgagcgctgctcaaagagcggtagtaaaccagaaacagaagcaatagaagaaatgtagaactgaaaagaatctgggagcaccctacagctgaagtgaagatgcagcgtcagatatgaaaatgtagttgtaatgtcagcatagttgatatttcccgtgtggatgtatagccagtactgtactgcaactgttctgtagattccttaaattccggaaacaggatcagacaagtaccttctctcgttttgttccc

SEQ ID NO: 14356 - DNA, 990 bp, Oryza sativa
  ref <308>: DATABASE ACCESSION NUMBER: AK064957
  ref <309>: DATABASE ENTRY DATE: 2001-12-06
ctctgaggatacgcggagagctgagggcgtcgtctccgtcggcggcggcggcggcggcgctggcatcgtcgggtcgctgatcgagaagggagggaagccgctcatcgtttgccggaagcggagctccatcgcgaaggccgcggtggcggcgaagaaggaggagagcgcggagaagggtgaggccgccgaggaaggggaggggagcgacgacggcgagaagaggctctccgtgtcggcgtcagcgagcaaggacaaggcgtgggggttgaggacgaagaaaggccgcggccccggcaagaactcggccagcgtcggtggccggaaaatggccaagctctcggaagcgacggaggcagcgaccgacggaagcaagaagcccgacaagaagatcgccgccgacgcagccacgcccgccaagaagcggaacgccgtggacttcctcaaacggctaaaccagggctcgtcgccgtcgaagaagaagaagaaaggctcaccaatggggacacggaagcgtgctgcggcggcgacgtcgccggagcagccgcagaagacgcgtaaggggcccggcaggaaggatgccggccgcggcggctccaagaagggcggcaagagcgccacgccgaagagaagcgtggggcggccaccgtcgaagcaaggtgccgccgccgcaacgacgccgccgccgtcgaagagggccaaggtgaaccggtcggagaagacggcggcgacggcgacggcggcgaagcggggtgggaagaggtagaaatttgccaatttgggggcagtgtagtgtaagctagtagaacagatgtgacctgtagcaagtagcaaaggtggatagttcaaggtatgagtaaattacgtagttttgcgtctgcagcatttggaggctaatgtattgcattccgtagtcgactaactgatcgtctgtctttgtagcaacaccattgatcacttgcaaattgctgtttgaattggtcgttccccatc

SEQ ID NO: 14357 - DNA, 2341 bp, Oryza sativa
  ref <308>: DATABASE ACCESSION NUMBER: AK064958
  ref <309>: DATABASE ENTRY DATE: 2001-12-06
gagtgccctgccctctgactcatttgcgctcgatctcgtcgtcccctcggcctcgaagcgaccccgtctctcgcgagttctcccgtcgtctgcgccgatctcgcgagcagtgggtgccgacgtcgtgctgcttccgccgcatcctcgccgattttaggtcaactttcccaggatttgctagtcatggccaaaggcaggatattctctgccttgttaatggtgtttctagttttggctccccactgcgaggcgttctatttgccaggcagttacatgcacacgtaccggcaaggcgaggaaatatgggcaaaggtgaactcactcacttccattgagactgaactgccattcagctactacagtctcccatactgccatccccaaggtgggataaagaagagtgctgagaatctaggggagctcctgatgggtgaccagattgacaattccccataccggtttcgtgtgaatgtcaatgaatcactgtatctgtgtaccacaaacccacttgacgaggctgatgtgaagctcctcaagcagcgaagccgagacctctaccaggtgaacatgattctcgacaatcttcctgtgaggagatttactgaacagaatggagtgaccattcagtggacaggctatccagttggttataccccggaaggaagcaatgaggtctacatcattaatcacctgaaatttaaggtcttggtccataggtacgaaggaggtaaagtcaaggtagttggaactggggaaggaatggaagtgatctcagagacagagacagatgccaagtctggctatgagattgtgggatttgaggttgtcccatgcagcatgaagcgtgatcttgaagctatgtcaaagcttaagatgtatgaaaaagttgatcctacaagctgccctgtggagatggagaaatctcaattgattagggaaaaagagcagattacttttacgtatgaggttgaatttgtaaacagtgatatcagatggccatcacggtgggatgcatacctgaagatggagggtgctaaaattcactggttctcaatcatgaactcattgatggtaatactatttttggctggaattgtgtttgtcatattcttgcggacggtgaggagagacttgactagatatgaggaattggataaggaggcccaagctcagatgaatgaggagctctccgggtggaagcttgttgttggtgatgtcttcagagaaccaacatcatcaaagcttctctgcgtcatgattggtgatggggttcaaattctgggtatggcaattgttaccatcttctttgctgcctttgggttcatgtctcctgcatcaagaggaatgcttctcacagggatgatatttctttatatgttgcttggaattgtggctggatatgctgccgttaggctctggaggactttaaaaggaacttctgagggatggagatctgtctcctggtcaacagcctgtttcttccctggtattgtctttgttgtcctcactgtgttaaatttcatgctgtggtcaaggaatagtacaggagctcttcccatctcactcttcttcacacttctgtccttgtggttctgcatctctgtgccacttaccctcctcggtggtttctttggcacaagggctgagccaatagaattcccagttcgaaccaatcaaataccaagagaaatccctgcaaaaaattactcttggctccttgtgcttggtgctgggactctgccttttggaacactattcattgagttgttctttattctttcaagtatttggctcggaaggttctactatgtgtttgggttcctccttgttgtcctcctcttgctggttgtggtctgtgctgaggtatctgttgttcttacctacatgcatctttgtgcggaagattggcgttggtggtggaaagctttctttgcctctggagcagtagcgctttatgtgttcctgtactctatcaactacttggtgtttgatctcagaagcttgagtggcccagtttctgctacgctctacattggatatgctttcgttgtctctcttgcaattatgctggctactgggactgttgggttcctgacatcattctctttcgtccactaccttttctcatcagttaagattgattgaagaccataccttacaaatctccaaggatgactgtacactgaatcactctaaagcggcaatgatttgatcatggcatgaaggccctttacacaattgtgatgtcttccttatgtagctaattaccgggactattgtaccacgatgaatatggtgatagtaatgtaccagcatatatgcttttaagcttgcattcatc

SEQ ID NO: 14358 - DNA, 2412 bp, Oryza sativa
  ref <308>: DATABASE ACCESSION NUMBER: AK098867
  ref <309>: DATABASE ENTRY DATE: 2002-08-28
gctgttgcgccgcagttgggagcgaaacccttgtcttcctcccaacccatcttacccaaaccctaaaaaaccaaaaaaaaaatccgcaaaattacccccgaaaatcccaaaaaatatcgccggaaccctatccttcgatcggatccacctatccccctccccggtgatgggggcgcaggttcaggcggtgccggcggcggagggtggtggcgcgccgccgccaggccaacggggtcgtggctgcgggctctgctgccgccgctgcggcgaccttccaggcgacgtcgctgtacgtgggggacctcgacgtgagcgtgcaggacgcgcagctgttcgacgtcttcagccaggtcggatcggtggtatcggtgcgcgtttgccgggacgtcaataccaggctgtcgctgggttacgcctatgtcaacttcagcagtcccgccgatgctgcaagggcattggaaatgctgaacttcactcctattaacgggaagcctatcaggataatgtattctaaccgtgaccccagctcacgtaaaagtggagcagcaaacatatttattaagaatcttgacaagtcaatagataacaaagctctctatgacacattttctgtatttgggaatattctttcgtgtaaagtcgcgacggaaatgtctggagagtcgaagggatatggttttgttcagtttgagctggaagaagctgcccagaatgctatcagtaagctcaatgggatgcttttgaatgacaaaaaggtgtatgtagggccttttgttcgtaaacaggagagggaaaatgtatcaggcaatcccaaatttaacaatgtgtatgtaaagaacctatcggaatcaacaactgaagataatttaaaggaaatttttggtaaatttggacccataactagtgtcgttgtaatgcgtgaaggtgatgggaaatctagatgctttggatttgttaactttgaaaatccagatgatgctgctcgagctgttgaagatttgaatggcaagaagtttgatgacaaggaatggtatgtttgtagagcacagaagaagtcagagagggagatggaattgaaagaaaaatttgagaagaacatcaaagaggcagcagataagaaccagggaactaacttgtatttgaaaaacttggatgatagcatcgatgacgatgagaaattaaaagaaatttttgctgattttggtactattacctcttgtaaggtcatgagagatttgaatggtgttagtaaaggatctggctttgttgcatttaagtctgctgaagatgcttcacgagctcttgtggctatgaatggtaagatgattggcagtaaacctctctatgtagcacttgcacaacgcaaggaagaaagaagggcaaggcttcaggcacagttctcacaaatgcgtcctatggtgatgcctccttcagttgctcctcgtatgcccatgtatccccctggtgtccctggtgtaggccaacagctgttttatggccagccacctccagcttttgttaaccctcagcctggatttggcttccagcaacatctcattcctggtatgaggcctagtgttggaccaattccaaattttgtcatgcctatggtccagcaaggtcaacaaccacaacgtccagctggaaggcgtgcaggcactggtggaattcagcaaccaatgccaatgggccaccagcaaatgcttccaaggggtagtcgtggtggttaccgttatgcttctggtcgtggcatgccagacaatgcattccgtggtgttggaggtttagtgccatccccatatgagatgggaagaatgcctctcagtgatgctggtgcaccaccgcaggttccaattggagcattggcctctgcactggccaattcacccccagatcagcaaagactgatgcttggtgaaagtttatacccgcttgttgatcagctggagcatgatcaggcagcgaaggtcactggcatgcttttggagatggaccagactgaagttctccatctcattgagtcacctgatgctcttaaggccaaggtcgctgaggctatggaagttctccgtaatgctcagcagcagcaggcaaataccccaactgatcagctagctgctctcaccctgagcgacggcgtcgtttcttaacttggttggcatcttatatctgagactgcaagtgatgtagtatgtacttggtatgttttggaacttgaacctgtggggaagtctgtctttatctttgttaaacggcagttcagttacttcagcattgtgtggatctggatttcagttcctatttgtgttttcttaaaatattgggattgcaatatgatttactcttggattgatgccaacccatgaactagattcttgttatatcaagaaatcatgacaggattagccatgc

SEQ ID NO: 14359 - DNA, 1765 bp, Oryza sativa
  ref <308>: DATABASE ACCESSION NUMBER: AK064959
  ref <309>: DATABASE ENTRY DATE: 2001-12-06
gaaagtcgagccgccacaaattgtgattctctgatccgtcatgtcggggaagaagccgacggcggcgccgccgacggcgaggctgagcagggcatgcgtgatgatcatagtggtggcgagcgtggagaggttcgcgtacaagggggtggcgtcgaacctggtgacgtacctgacggaggtggtggagatgagcacgtcggcggcggcgaagagcgtcagcgcgtggagcggggtgacgtccatgctgccgctcctcaccgccgtcctcgccgactcctactgggaccgctactccaccatcaccgcctcctccctcctctacgtcgtcgggctaataggcctaactttatgggcactgctacacacacggatgccatgctccacgctcttcttcccgctctacctcatctccatcggccaaggcggctacaacccttcgctgcaagccttcggcgccgaccagctcgacatcggcgacgacgacgatgacggcgacaatggcgcaacagcagcaacagaagagcagaggagcaaggtgaagagcctcttcttccagtggtggtacttcggcatctgcagcggcagcctgctggggaacacgacaatgtcgtacgtccaggacaccgtcggctggggcctcggcttcgccgtcccggccgccgtcatggccgtctccgtcgccgccttcttctgctgcacccccctctacaagcagaggcaacccagagctgttcatcgcaagccctgtcgtgacagcgtcctcaaagccctgaaatcgcttctcgcaagtgtcactggcgccagaaagatcaccctgccatccagagacggcgacgatgacactgacatcgtatctgagctagagttgcaggagaagccactgaagctggctgatcagaagcaggaggcggccatgggagaggctgcagcaccaagtgtagccaagatcatagtgaggctgctcccaatctggacgatgctgctcatgttcgcggtcatcttccagcagccgatgacgttcttcaccaagcaggggatgctgatggaccaccgcgtcggcgccgtgttcgtgatccccccggcgatgctgcagagctccatcaccgtctccatcatcctcctcatgccgctctacgacacggtggtggtgccgctcgccggcctcgtcgccggccacggcaaggggatcacggtgctccagcggatcggcgtcgggatggtgctctccatcgtcgccatggcggtcgccgcgctcgtcgaggcgcgccgcctccgcgccgccgcgtcgtcctcgtccggcggccgcctgagcatattctggctcctcccgcagtacgtgctcctcggcgtctccgacgtgttcacggtggtgggcatgcaggagttcttctacacccaggtccccagcgccatgaggaccgtcggcatcgcgctctacctcagcgtcttcggcgtcggcagcttcgtcggcgcgttcctcatcaccgcgctcgagatggtgacggcggggggcggcggcggcgggcacgatcacgggtggttctccgatgatccccgggaggcgcggctggacaagtactactggttcttggcgctcctcagctgcgtcagcttcgtcgtcttcacacacttgtgcaagtactactagcattcatctcatcacgtagagatcagattttatttagcatttgttggaacttggaagttggggcctttgttactgtgtttgtgtgtgtgtaaattacacgcttttcatggtgagctt

SEQ ID NO: 14360 - DNA, 1326 bp, Oryza sativa
  ref <308>: DATABASE ACCESSION NUMBER: AK064960
  ref <309>: DATABASE ENTRY DATE: 2001-12-06
tattcctcgcgtcgcatcgcacttgtagctctcgacccccgcatctcatccctcctctcgcttagttcagatcgaaatcgcaaatggcgaagattaagatcgggatcaatgggttcgggaggatcgggaggctcgtggccagggtggccctgcagagcgacgacgtcgagctcgtcgccgtcaacgaccccttcatcaccaccgactacatgacatacatgttcaagtatgacactgtgcacggccagtggaagcatcatgaggttaaggtgaaggactccaagacccttctcttcggtgagaaggaggtcaccgtgttcggctgcaggaaccctgaggagatcccatggggtgagactggcgctgagtttgttgtggagtccactggtgttttcactgacaaggacaaggccgctgctcacctgaagggtggtgctaagaaggtcgtcatctctgctcccagcaaggatgcccccatgtttgttgttggtgtcaatgagaaggagtacaagcctgacatcgacattgtgtccaatgctagctgcaccaccaactgccttgctccacttgccaaggttatcaatgacaggtttggtattgttgagggtttgatgaccactgtccatgcaatcactgcaactcagaagaccgttgatggaccctcgagcaaggactggaggggtggaagggctgccagtttcaacatcatccctagcagcactggagctgcaaaggctgtcggcaaggtgcttcctgctctcaatggaaagttgactggtatggctttccgtgttccaaccgtggatgtctctgtcgttgatttgactgtcaggcttgagaagccagcatcctatgatcagattaaggcagctatcaaggaggagtctgaggggaaactcaagggtattctgggttacgttgaggaggaccttgtttccacagacttccagggtgacaacaggtcaagcatctttgatgcaaaggccggtattgctctcaatgacaactttgttaagcttgtgtcttggtatgacaacgaatggggatacagctctcgcgttgttgacctgatccgtcacatgtacaacacccagtagaagatggtcactctttcggaagaaatggagtagagtgctactgaaaataagtcggaccttttgcgagctactccagtagagcttcattagctgtatgctgccttttgtttttgctggcttttcgcatgatgttttattaaaactcgatgtaatgttaatttgtgtacttcatctccggcactttataaatcgtggtttttgaatttgaaagttcaagtggcattagacg

SEQ ID NO: 14361 - DNA, 1698 bp, Oryza sativa
  ref <308>: DATABASE ACCESSION NUMBER: AK098868
  ref <309>: DATABASE ENTRY DATE: 2002-08-28
gcctttccccgtcgcttcctgcctggatcgcacacacaaagagatccctcgcaggcggagtggtgcttcccctctcggatcatcttcgcctctgcaagattggcaagcaatgaggtgcctgcctttcttgcatggagattccaaagaggaggatcccgtcaacaagtcggcttctgtccggtcgttgagcacaacatcgacggagcgggatgtccggtccggctccgacttcaactccttgaatgtctctgacatgagtgccgaatcaatacggaggacacagtatcccagcttcactgatcggcccagtaacctcagggtgttctctttctctgagctgaagaatgccactcgcaattttagccggtctcttatggttggtgagggtgggtttggatgtgtgtataggggtgtcatcaagaattccgatgaaccaactgagcgcaccgagattgctgttaaacagctgaatcgcaaaggacttcaggggcagaaagaatggttaacagaactgaatgtgcttgggattgtagagcatccaaacctcgtcaaactaattggctactgcgctgaagatgatgaaaggggcgtacagcgtctcctagtatacgaatacatgcctaatggaagcgtggatgatcacttgtcaagtaggtcaaattcaactctatcatggccaatgagactaaaagtagctctggacgctgctcggggactgaagtatctgcatgaagagatggaatttcaggttatcttccgtgacctaaaaacatctaacattctgttagatgagaactggaatgcaaagttgtctgactttggattgactaggcatggaccatcagaaggcctgacccatgtctctacagcggtcgtgggaactcttgggtatgcagctccggagtacatgcagaccggacgcctcactgccaagagtgacatatggggctatggtgtgctcctttatgagctcatcaccggccgccgtcccattgaccggaaccgcccaaagggtgagcagaagctcctggattgggtgaaaccatacatatctgatatcaagcggttccccatcatcatagacccacggctagaggggcactacaacctcaagtccatgacaaagctggctagtgtggcgaaccgctgtctcgtccggctaccaaagtcgcgcccaaagatgagtgaggtgtatgagatggttcagaagattgtggccagcattgagaccggcacaccacagcctcctctgcactaccatgggtcggtttctgaaccgggctcaaagcggccaaagaaggggtcactgaagagaaggttccaagaattcaaattcggttgccggcagattgtatggcggagctggaagcctgagatcataaagacttgctgagagaatacagtagcttcctgcctgtaagtatatagctaagttgttcatagggataaagctcttcttcctctgtatgcttcctgtccttggggtgatctgatcccatttcgggcacacagttgagtacttgagttgcagtgtgaagctttttatcttatagggttctgtgtgatgcatcttgaggttgtagattccatgtgttttcagtataatccctgtggctttcctcatcatgtaatatagatcttgtttgtgcaatatgaaagaaaaaaaaagatgagctttcttgtatgaaaaaaaaaaag

SEQ ID NO: 14362 - DNA, 1394 bp, Oryza sativa
  ref <308>: DATABASE ACCESSION NUMBER: AK064961
  ref <309>: DATABASE ENTRY DATE: 2001-12-06
gaatgaatcaagtaaggtgggggaggtggatgtggagtgggacgccgggcgttgggtggagcagctgagcctccgggagcgtgtcggccagcatgtccttgaaggcctccaccgtaccctcggtggcgacgacggcggtgaggaggcccttggcgtccacgtcgccgttgctcattgggaccacgtaccttgcccgcagcaggctggccagctccacggcgtcctcctgcccggcgacgagggtgaagttggccgggaggagctgcttcacgacgggcgtgattaccacgtcggcacgcagcgcctccttctccaggaaggaccggtcgtacacgcagtgcggctcgtagtacacaagccccttggcgtcttcctcttcttcctggaggaggaacatgatgtagccgttctccggccgctgccatgggggccccagcacgggcccaggggtggccagtatgcggacgccgccgccgttgcagttggtggattgcccgggctccaggtaggtgacgttgcggaatggggtgggcagcgcggccaggacggggcgcgcgttgggggtggtgacgacgggaaggtcgggggcggcggcggcgagctgggccagggtgcgcgcgtggcagtggtcgtcgaggctctgcgtgatgaggagcaggtcgacccccggaggctgcagcacatcttggacgcccaggttcttgaggcgcttcttggcggcgtcgaagagccatggcgcgccgaagtcgaggttgccggcgaggatggggtcgaccaggatgcgcgcgccgccgacctcccacacccagctgttgatctccaggtatgtcagcttcacctgcctctgcctctgcctctggctcttcgttacaccggcgctgctgcttcggactcggacggctatcgctctgggtcgctgcggcggcgtggaggcggcgaaggttctccggctgcagctgctcctgcttattagccggtggaggccgcccatggtggtggtggtggtggtggtggtggccatggcgaaatttgcgtttgcatctcactctagtggtgctctgcctctgctgctgagtaggtactccacctgtggcctgtggggcgccggctacgtgtccaagtggcaaccacccacccaagaccaatcctcctgcttttacttttgaccggccattcctttttctttttcttttactatgatcgaagaggccaggccggacttgcgattctctcaaaaggaaaaaaaaaggaattattgaaaaacgttcgacaaatttctttcatagctctcgatttttctgctaggctgagttcttttctgttgaagttttcaacttgtcaccctcgttttccacgtgtacatttttcaaactaataaaacaatgtgtttttgc

SEQ ID NO: 14363 - DNA, 1211 bp, Oryza sativa
  ref <308>: DATABASE ACCESSION NUMBER: AK064962
  ref <309>: DATABASE ENTRY DATE: 2001-12-06
gcccagccaccctctctctctctctctctctctctctctctctctcctctccgccgccgccaccccgccgcctccctcctccggcgaccgccgcgggcagagcgcgacaagagggagggaggagagctcgcccgaggtgggggcagggagcgcgaggagagggtgaggggaagatggtgagctcttcgtcgccggtggtgaacgtgtacccgctcgccaactacacgttcggcaccaaggagcccaagatggagaaggacacctccgtcgccgaccgcctcgcccgcatgaaggtcaactacatgaaagaaggaatgcggaccagtgttgaagcaatcctattggtgcaagaacacaaccatccccacatactgctgttgcaaattggtaatacattttgcaagcttcctggtggacgtttgaagcctggagaaaatgaaattgagggtctgaaaagaaagttatgcagtaagcttgcagtgaactcgccttcctttccacctaactggcaggttggagagtgtgttgctgtatggtggaggccaaactttgagactgtgatgtatccttactgccctccacatataaccaagcccaaggagtgcaagaagcttttcattgttcacctatctgaaagagagtattttgctgttccgaggaacctgaagctgcttgctgttccactgtttgaactctatgacaacgttcagcgatatgggccagtcatttccaccattccgcagcagctgtctaggttccagttcaacatggttagctcgtgaaggtgatgagagatggagattagtgtgcactaggctctatttgatgggatcttcaacgggctgaactacctaatcgacttggcatgactaatttgttctatcacagagaatttccatgaattagcttgggaaaaatattctggatccatcgttggactgttagctggacatgcatttcgactgtattttgttggattgttttgtatcacatcgcaaagctggtgcctggtgtatttttagatgatcttttgttggctctgcacgctaattgttggtgtacatggctctgtatgcttactgccttgatgttgtatgctgtagctgtaactcttcaggctgcctagcttttttttctagccaggaactccccctcttaactgtaaaaatgctttggatttaagacaacatagagaggattaagctttttat

SEQ ID NO: 14364 - DNA, 2012 bp, Oryza sativa
  ref <308>: DATABASE ACCESSION NUMBER: AK064963
  ref <309>: DATABASE ENTRY DATE: 2001-12-06
gaggggcagggactagagtgcaaattaagctgggtgtgggtgtgggtctgggtctgggtggaagaggaaaaggatctgtgtgtgatcgacacgacagatcggcatcggcgggcagggtagagtgagatggccgccgccaccgccgcggtttttgcgctgttgatggcgtcggcgctcgctggggctgcggccggcggcgacatcgttcaccacgacgacgaggcccccaagattccaggatgctccaacgacttcatcctggtcaaagtgcaaagttgggtcaacggcaaagaggatgatgagtatgttggtgttggtgctcggtttggcccgcaaatagtgtccaaggagaaacatgcaaatcgaactagacttatgttggcagatcctattgattgttgcacttctccaaaagaaaaggtttctggagatattcttctagtccaaagaggggaatgcaagttcacgaaaaaggcaaagtttgcagaagctgctggtgcttctggtataataatcataaaccatgtccatgagctgtacaagatggtctgtgaaaagaatgaaacagatcttgatataaatatacctgcagttcttcttccaagagatgctggcttcgctttacatacggttcttaccagtggtaactcagtttctgtgcagcaatactctccagatcgtcctgtagttgatactgcagaggtattcctttggcttatggctgttggtactgtcctttgtgcatcatactggtccgcatggagtgctagagaagcactttgtgaacaagagaagctcctcaaggacggacgtgaagttttactaaatgttgagaatggaagttctagtggcatgatagatatcaatgtggcatcagccataatgtttgtagtggtcgcgtcatgcttcttaataatgctttacaagatgatgtcttcctggtttgtggagctactggtggtaattttttgcgtcggtggtgttgagggcctgcaaacatgcctagtggctctattatcaaggtggtttagagctgcttcagaatccttttttaaagtgccattctttggagctgtttcataccttactcttgcagtttccccattttgcattgtatttgctgttctttgggctgttcaccgtcatttcacctatgcctggattggacaagatatccttggtattgcactgataattactgttatccaaattgttagagtacctaacctcaaggtgggttcagttctcctcagctgtgccttcttttatgacatcttctgggtgtttgtctccaagagatggtttcatgagagcgtgatgatcgtggtagctcgtggtgacaagactgatgaagacggcgtccccatgttactaaaaattccacgaatgtttgatccatggggaggatacagcatcattggattcggtgacatccttctacctgggctgttagttgcatttgcattaagatatgattgggctgccaagaaaagcttgcaaactggttactttttgtggtcaatggtggcctatggttctggactccttattacatatgtcgccttgaaccttatggacggacatggccaacctgcacttctctacatagtgcccttcacacttggtgcgctgatatcacttgggtggaaaagaggagaactgtggaacctatggtccaaaggggagccagagagagtatgccctcatcacatgcatatgcagcctcagccgaagacgcccccactagtccagtagatccgtcatcttgttaattagtactgtagctatccgtcaccagctgcatccgtttgcctaagcgagcttaatggtgtaaaaaatcgtctcctgcatgttcttaattagtaagtattaatctcaatgagttggtcgtttgctgcttctctatagtgaaagatgtttttggttcgataaactagtcatgagtagaattctctgtaatttacaactacagaagagaagggaactatatatgcaagcttatggttgatagg

SEQ ID NO: 14365 - DNA, 1622 bp, Oryza sativa
  ref <308>: DATABASE ACCESSION NUMBER: AK098869
  ref <309>: DATABASE ENTRY DATE: 2002-08-28
ccccttttcccctcttccccagctcctttgttaggttttcttccagtgagctctttttgctcatattcagatcttcacttatttcctagttgttactactgcctttgagtattgacagcttcatcctgccaactcagctcaaccttcctctgaagtttcagtctttgtttctgaatctcttcagtgttcagaggggaagttctgccaaaaaatttctctggccatccattttccaaggggagattctgccaaaattttcatctctgtccatcaatattcctggggaggttctgccaaaattttctctgaaatcggttaatttataaggggaggttctgccgaaattttcgctggtcatcaatcttccctttgttgacataccctgcataagtatatacaacaaacatataactttttgcaaggtaagaaggagtttttatctgttcttgatgatagactcctagagaagttgtcctagttgtgtagatgttgttgctcatcatccctgagcacctcctctctagatttatgactggcccagccataacccagcttgttcagtccttctctgttgtcttcctctactggttctatgtcttctcagtaagctccctgtagttgtagccttttgaaattacaagacttatttatacaacataattatcaaggcatccacatataaactacaaggtatatatatatatatatatatatatttacaaaaagaaaaggaataagagggagtaaaattgttgccggtgcgaaaaaaaaaattgttgagaggtgaccatgtcgagtgggacctcgtccgggtcgagccagggaacccggagctccaggtcggaagatgacctgaacctccaggcccagatggagaagaagaggaagaggaggaaggagtcgaaccgagagtcggctcggaggtctaggatgaggaagcaacagcacctcgacgaactcacctcgcaggtgaaccagctgaagaatcagaaccagcagctgagcatggcactgagcctgaccacacagaaccttgtggcagtgcaggcacagaactcagtgctgcaaacccaggagttggagctgcagagcaggctgtgtgccctaactgacatcctgatgtgcatgaacaacaccagtgctactcctactcctacaattccagccaccactacaagtgcttgtgatatttttggtgccagctcatggaaccagccacccatagacttgtaccagtaccagtgcttctgatctaggaataagaagagggttgttgtggtagtgtgggtaggaccagaagccatcaagtaatgtttcaatcatgtagggccattgttgtcactgttaatgtatgcaattcaatcttaattgcctgctgtaggggacagggatatttgctctttcttgtagctgttggtggtagagggattaccagatggcaaaatggtgctttggcaatgtgttaggtggggctggttttggttgttaagggtagggaggagaaaattggtaggtttttcttgagcatgcaagaggggaggcaaaggattttgtgtaatgatgctcttcaaggaaagtattcataattatgattataatgtaatatgtggatttggtggacc

SEQ ID NO: 14366 - DNA, 1728 bp, Oryza sativa
  ref <308>: DATABASE ACCESSION NUMBER: AK098870
  ref <309>: DATABASE ENTRY DATE: 2002-08-28
gagggttttccctccccccgcgcgcgcagcaggcggcatggagagcctggtcctcgcctcctcctgctccgcttctccccgcctgcctcccctctccgcggcccgccgccgccgcccctcctcgcagactctcccggcgacggctgcggcgtccgggcggaggggagctgggaggtccaagctcgtcgtcgtcgccgccgccgccgccgcggcccgcgggtccgggaacggtttcgagggattaaagacaaatggatttgcaagcatgtcgtcttcgaccaacagtgagaatatgtcaactggaacgggttccctacctcccatgccacccccatcgtcatacatcggttcgcctgttttctggattggagttggtgtagcattgtccgcagcattttctatggtctcttcgatggtaaagaaatatgcaatgcaacaagcattcaagtcaatgatgacccaggcaccgccaaacacttttggctcaaactcgcctttcccatttgccatgccaccacaggcagctcctgcagctcctagcagttacccatactcacaaccaaggaaagatacctctcctcaatctgcaactgtcgatgtttcagctactaaagtggaagcaactggaactttggaagaggctgatgtggctgaacagccaaagaagaaatttgcctttgttgacgtttctcctgaagagttgcagcaaaaggaacttcaatcttcactggagacagtggatgtaaaaagtgagagtaaacagagtgaaactatggaggatactgagcaaaaagctccaacaaatggaactgcttttaagatgaatgaaggttctgctagcgggacaactgaatctagcaattcagggcctatgttgtccgttgatacaattgagaaaatgatggaagatccagccgtgcagaagatggtttacccctatttgcctgaggagatgaggaaccctgattcattcaagtggatgctgcagaatccaatgtaccgccaacaactacaggatatgctaaacaacatgggtggatctcctgatcaatgggataaccgaatgctcgatcacttgaagaattttgaccttagcagtccagaagtcaggcagcagtttgcgcaagttggcatgactccagaggaggtagtatcgaaaataatggcaaacccagaagttgctgttgcattccagaacccaaagattcaaacagcgatcatggattgctcacaaaacccgctcaatattgtaaaataccagaacgacaaagaggtcatggatgtttttatgaagatatcacaaatcttccctcaaattaatggctagtggatcgtcgccgtgagattgcagttttgatttttgttgccctatcatctcttccaagtggctgcggtaacatctgttgatcggctgagtaaaaggaaacgaagttcatctgttcagtcattacggacaagatgtaaaagctttcctgtcagggttttttgagttgccaatgtacatcatcatatcgcctagtgtttggtttggtagtgaccctgcctcaagccagagcaggcaacgaagcgaagttaaggattttttttatttacatccccgcgcccccgtacaactgtgtagcttgtgctttgacgttacgaggtttgtggtaggttgtgaagatgcagagatagttcatatcacctcaattttgataatattatgtattatatctgtgttagcattgc

SEQ ID NO: 14367 - DNA, 1745 bp, Oryza sativa
  ref <308>: DATABASE ACCESSION NUMBER: AK064964
  ref <309>: DATABASE ENTRY DATE: 2001-12-06
tggatgtgatgtgattagttgacgagacggggaggggcgtccagccaaagaggatcgaatcgccatcagccaccgccgccgccgccggagacctccgatccgccgcctccaatcgccgacgatggaaccgctcaatcatccaaggtgacgcatcggcatcgcctcttccaatccccctattcatccatccactaaattcgtcatcatcgccatggccaccaccaaatcctttctccctcccccattcatcgccctctcttcgaaccctcgtcccaccaccctcgctcccactcccaatcccaggccccgccgccgcaattccctcgctatctgctccgcctccgcctcgggcgacccttctcccacacccgaggccgagggcggcggcaacccgctcctcgcgctatggcgccgcacgctccaccccctgggtgactacggcttcggcaagcgcagcgtctgggagggcggcgtcggcctcttcatggtctccggggccgcgctgctcgccctcgccctcgcctggctccggggattccagctccgcgcccgcttccgcaagtaccaagccgtcttcgagttcacccaggcctgcgggatttgcgtcggcacccccgtccgcatccgcggtgtcaccgtcggcaacgtcgtccgcgtcgactcttccctcaagagcatcgatgcttatgttgaggttgaagatgataaaattattgtgccccgcaattcagtggttgaggtgaatcagtctggtcttctaatggagacactgattgatataacaccaaaagatccactccctacaccttcagttggtcctcttgacccagactgttccaaagaaggtttaattctctgtgacaaagagaggatgaaaggacaacaaggagtaagcttagacgcactggttggaatatttactcgtctaggaagagatatggaggaaattggtgttcacaaaagctacaagttggctgaaaaagtagcatcaataatggaagaagcgcagcctcttctttcacggattgaagcattagctgaagaaattcaacctctgctttctgaggttcgtgatagtgatctggtgaaggatgtcgagattatagctaaaggtctggctgatgcatccggtgatttaagaaggctgaagtcttccatgcttacccctgagaacaccgatcttattaagcagtctattttcacccttatctttactctgaagaatattgagagtatcagctcagacatctctggtttcaccggtgacgacgcgacaaggcggaacatcaagctgcttatcaagtcacttagcagactgttgtgattgctcaggaataacacgggggagctttctccattgggaagcgctgatacaggaatttgctattagtgtagcatttcttgaaaaaaggaagaaaatgagaggaaagcgcaggttgagaatgagattagaaagaggtcatttggagagaggggaaccaagtttttgaatagtggaattatagtctctggttttgttttccaagtttcctgcattcccggatattattaaaacaagaaaagcacggggaaatgtgtaaatctccgttagttgtgtagggcatcttcttaatttgtttttgttttttttttttgggaggcagtgtaggccggtttttgtttgatattgtgatgtttcattcttgtgcccttgcgcaaaggtaaccagcaaggaatgcataaatacatgaaaactttgttgtctg

SEQ ID NO: 14368 - DNA, 1810 bp, Oryza sativa
  ref <308>: DATABASE ACCESSION NUMBER: AK064965
  ref <309>: DATABASE ENTRY DATE: 2001-12-06
ggaatgtacattagcccaggcgcccagcagcaagctgtacctagcaagcgacaatggctacgggggcggcgccgctctggttcacctcgctggccggcctcggcgccgcctacctcaccgtcgtcttcctccgcctcctcccttacctcgccctctacctccgccggcccaaggacctccgccgctgctacggcgagtgggccgtggtcaccggcccgacgacggggctcgggcgatccatggccatggagctcgcccgccgcggcttcaacctcgtcctcctcgacctcgatcgggataacctccgcgaggtgtcggaggcgattcgcgaggcccacgccggcgcggtggccaccaggacggtggtgttcgacctgtcgaccgtcggcaccggcgccggcgaggaggggatgcggcggctgagggaggcggtggacggggtggaggtcgggatgctggtgaacaacgccgccgtggcgaggcccggggcgctctactttcacgaggccgacgtggagcggctggtggcgatgatacgggtgaacgccatggcgctgacggcggtgaccgccgccgtgctgccggcgatggcgaggcgcggccggggagccatcgtcaacgtcggctccggctccaccgtcgccgtcccgtcttttcccttgtacactgtctacagctccaccaaacggtacgtggagcagctgtcgaagagcctgtacgtggagtacaaagggaaggggatcgacgtgcagctgcaggtgcccttctacgtccacacaaacatgctctccgccgccatcaaggacaggatgctgctgccggcgttcgtggcgacggccgacgactacacgcgggcggcggcgcggtgggtggggcacggccacatcgccgtccccgacgccggccagcagctgcagtggttcctcgccgccttcgtgccggacttcgcccacgactggtatcgcctccgcaagcacctgcagcaccgggccatcctctggaacctcatttaatttcatccatattttggccctgtttggatatagggaagtttagtctgtcacattaaatatttgggcactaatcttgagcattaaatatacactaattacaagactaattacacagatggaggctaatttgcaaaatggatctattaaccctaattagtccataatttaacaatgtagtgctacactaaataagtgctaatcatagactaattaggcataatagattcgtctcgccaagtagcctctatctgtgtaattagttttgtaagtagtctgtgtttaatacttcaaattaatgtttaaatatctaatgtgacagtgacgagctaaagtttaatcactagatccaaacaagcccttaactggcagaaaatttttttttacctcaaatctcttgaacaatccaccagtcaatcaagcaatatatatgcatttttattttctttttgcatatatagtttgcatatatgttaatggtttagtgtggcgatgaagtttgtgagtgtgttactccaccaactaaggtttaaataatgatccctgatgtatatataaaatatggttctgtacatgtgtccttttaattattgatatgtacttcctctgtttcacaatgtaagtcattctagtatttccaacatttatattaatgttaatgaatctagatagatatatatatgtctagatttattaacattaatataaatgtggaaaatgatagaatgacttacattgtgaaacgggggagaacgtgttatccttccaagttatccttccaatactacttgtccttgctc

SEQ ID NO: 14369 - DNA, 1313 bp, Oryza sativa
  ref <308>: DATABASE ACCESSION NUMBER: AK064966
  ref <309>: DATABASE ENTRY DATE: 2001-12-06
ggcactgcgaactcactgccaatctcttcatccagctcactgcataatcacacactaattaacaagctaattagctgcagtaattagctgcattgaattcatggagaggggtcagaagaagaagctggcgacgttggtcgggtgcaactacgccggcacgcccaacgagctgcagggctgcatcaacgacgtcgccgcgatgcgcgacgccctcgtcgcccgcttcggcttcgcgccggccgacgtcaccgtgctcaccgacgaccgcggctcgccggtgctccccaccggcgccaacatcaagcgcgcgctggccgacatggtcgcccgcgcggcgcccggcgacgttctcttcttccactacagcggccacggcacgctcgtcccgccggtgaaggggcgccgccacggccacggcgagtgcgacgaggccatcgtgccctgcgacttcaacctcatcaccgacgtcgacttccgccggctcgtggaccgcgtgccgcgcggcgcgagcttcaccatggtgtccgactcgtgccacagcggcgggctcatcgacctcgagaaggagcagatcggcccctccgtcctcgccgccggcgccgcaccggccgctgctgctgcttccacgacggccacgcgcgccaccgccgcgcggttcctgccgtacgccgccgttgtcgaacacctctccggcgtctcgggcgtcgacgccgcccaccacgtcgccgaccacctcctcgcgctcttcggcgcggacgccagcgccaagttccaccgcgacgccgaacagccggtgcgcaccgacgacgacggcatcctgctgagcgggtgccagacggacgagacgtcggcggacgtgccgggggacgacgaggtggcggcgggcggcaaggcgtgcggcgcgttcagcaacgcgatacagaccgtgctggcgtcgcacccggcgccggtgagcaaccggcagctggtgagcatggccagggcggtgctgagcgatcaggggttcgagcagcacccgtgcctctactgcagcgacggcaacgccgagacgccattcctgtggcaagaggaggacaagaagaagacggttaccgcggcggcggagcaggccatgacggcgctctgaatgtgttcgacagaggaagattgattggtcaataccgatcattgggaaaaaaataagattataattttaatcgtcttattcaatgccacaacaagttaccattgcaaatttgtatgccatcatgctgaaggaacatgtttattgatttttacaatgatgaatatatcatcagttcagtattgttacg

SEQ ID NO: 14370 - DNA, 1099 bp, Oryza sativa
  ref <308>: DATABASE ACCESSION NUMBER: AK064967
  ref <309>: DATABASE ENTRY DATE: 2001-12-06
ggtgtgtaccgctgccgattcctccgcccgattcgctcgattctctgagccgtttcttgaattagttgaggggaaatattcttcctatcctcctctatcttttcccccaagaattggactttatcccgaagaaatcaacgcggaatcgagctcgattcgagtttatctctccaccaaacccaggttttcccggcgcgattccttgcgttccaagcccgatctctctccccacgctagccatctctctcctcctccggccgccgctccagccggctatagccgtcggctccgccatcaccggtcagcgccgtcgcctccatcgggaccgcatcgaagagaggaagagcggcctccacttccccgaagccgaagacaaccggaaggccattgccgacgtcaaaccgatctgcttcgcctccatccgcgccgtgccgtcgcctcggtcgtccccgacttgtgccgccacctccctcggcatcgcagcaccaaggagaagcccgtccacccctccgttgccgctgctcgtcgccgaaaagccgctgccgtcgtcgatcagtaccttgccgccttcggagttttgtcgccggccgtcttccgtcttcgttcgtcgtcgtgccgcccctcacttgctgtttccgtcgttgcgaaggttcgtgagtgcgtcggaagtgttcaagaagattaattgaagaccgattattgcaagttgaagaaaaaggatccagaaggagaagacgtttggcttatatcccagttgagctgcctgtgggagtggagctgaagccatcgctagaccgttaattccgctgctgttttttttcttctgtaagtatgtaacgttattattatgatggatttgtatattaaattgtcagtttgtgtacctcggctgattcctggacgagggttttatgcacaaataagttcggaaattactagtgaatttccggacgtgacaaccaccttcaactggtaggccaaagtatgaggcctagtggcggagccatctctcgggcaggtcgggcgactgcccgggtttcgccggtaccatctttactatcaatagccattgacatctataaagattaatcgatcaccg

SEQ ID NO: 14371 - DNA, 3711 bp, Oryza sativa
  ref <308>: DATABASE ACCESSION NUMBER: AK064968
  ref <309>: DATABASE ENTRY DATE: 2001-12-06
ggtttgtttccggtgagagaaatcaagagatgggtggccacgtcatcgtgtggatattgctctcggtgtgctcatggcggatttcagctgctcaggctcagcaaccaccaagaaccgatcctgtagaagtggcggcgctggaggcgatcctggggagatggaacaagaccaattcgccggtgtggagcatgagcggcgagccatgccgcggcgtccccgtcgacggcgtcaccggcctcgacggcaaccccaagaacaaccccggcatcaagtgcgactgctcctacatcaacggcaccgtctgccatatcacccagctgaaggtatacgccttgaacgttgtcggtcagatacctgcagaattacagaacctcacctacctaaattacctggacctggatcaaaattacttgtcaggccccataccatcattcatagggcaattgactgccttgacagaattgcatgtgggattcaatgcactctcaggaccaattccgaaggaacttgggaatctcacgaacctcaacttgctaggcatcagtttgaccaattttactggtcaacttcctgaagaattgggcaacctgaccaaacttcaacgattgtacactgatagtgctggcttgagtggtccattcccttcaacgttctcaaagcttaagaacctgaagctcctgcgggcatcagataacgattttacaggaaaaatacctgattatattgggagcttgactaatttggaagatctgtaagagtaatttttaactttttatcacatcaatgattttatcctattcacaagacaagtggaactgcaacagaaattttctgcatatgttgtttccaattgaattcgaactgtagcgtgttttttttcttttaagtcatcactatgaacagaaatgtgcatacctgtatgccattactctggtcccaacagtgtcttaatatgtagaggttactttttctaatattcaaataaacttggcattttcatacttttttcttaaattatgaactcacagggctttccaaggaaattcttttgaaggaccgattccggaaagtttgtctaatctaaccaaattgacaaccttacggattggagatattgtaagtgggagctcttcatttgcctttgtcagtagtctgacgtctttgaatatccttgtattgaggaactgcaggatatctggagaccttggagcagtagacttttcaaagttcacaaaattagccttcctggacttgagttttaacaatatctcgggcaaagttcctcaatcaattctgaatctacaaatgcttacagacctgtttcttgggaacaatagcctaaccggaggactgccagatgggataagcccttcactaaaaaacttagatttttcatacaaccagctcactggaagctttccctcctgggctacccagaacaacttgcaattgaatttggtggcaaacaactttgatcttggcagcaccaacaacgggtacttatgacatttggctatacttccataagtgtttaatattaacaattttttctcacaacttttttcaagtcaattatgtccacagtattctacctccagggctaaactgcctccagaaagacactccatgtttacgaggttctccagaatattattcctttgcggtagactgtggtagtaacagatctatcagaggctcagataatactatgtatgaattggatttcacagaccttggcagctcatcatattacgttaccagtgaaacaagatggggtgttagcaatgtaggaaaatatttccagtctccaaatgacagtaagatcatatatagcaatgagaagattcagaatgcagtggtttcagaactactccaaactgcaaggatgtcaccatcgtctctgagatactttggccttggacttgagaatggaaattacactgttctgcttcaatttgcagagttaggttatccagactcaccaacttggaaaagcttaggaaggagagtttttgacatatatatccagggtgacctaaaagaaaaggacttcgatataaggaagatggctggtggaaaatctttcactgctgtttacaagagttacacggcaactgtgtcgaaaaacttcctcgaaatccatctgttctgggctggaaagggcacttgttgcattcctattcaaggttactacgggccattgatctcagcattaagcatcactccaaattttactcctactgtgcgaaacggtgtacccaaaaggaaaagtaaagtaggtgcaattgctggaatatcgattggtgcctcagttgtaggattagcagccctatttggaatatttatgttcataaagaagagaagaagacttgcacaacagcaaggagaactgtacaacctagttggacggcctgatgtcttcagtaatgctgaactcaagttagctacaaataattacagttcccaaaacattcttggggaaggtggatatggaccagtctataagggtatgctacctgatggaagagttatagctgtaaaacaactttctcaatcatcccatcaggggaaaaaccagtttgtgacagaggttgcaacaatttcttctgtgcaacaccggaatcttgtcaaattgcatggttgttgcattgacagtaatacacctttgttagtttatgagtaccttgaaaatggaagcctagatcaagcactcttcaggaagaatagcttaaaactggactgggcaactcgcttcgagatcattttaggaatcgcaagaggactaacttatcttcatgaggagtcaagtgtgcgcattgtgcatagggacatcaaggccagcaatgtcctacttgacaccgacctcaccccaaagatatcagactttggactcgctaggctctatgatgagaagaagactcatgtcagcacggggattgcgggcacatttggttatctggctcctgagtatgcaatgagacgtcatttgactgaaaaggttgatgtttatgcattcggggtggtcgcattagagactgtcgctggtcgatcgaacactaataactccatcgaggaaagcaagatctatcttttagagtgggcctgggacctgtacgaaaaggagcaagcacaaagaatcgttgatccaagacttgaggatttcaataaagatgaagttctcagagtcattcatgttgcgctcctctgcacacagggctcaccaaatcagcgaccgccaatgtcgagggtcatggcagtgctcactggagatgctgaggtagttgagatggtgacgaaaccgagctacatcactgagtggcaatatagagatggaaacagcaccaactcagaatctaccacctcagagttcagcaggcagaaggagatcgaccctctcaccatgtcgccaacaatcaccggatctagtcatgatggaaggtgaatgctgcaacctgcaggtgatcttggtttgaaatgattgtatgtaaatgtaagacggagctaatagtggaacttaattattctgaagtatgtatgatgataaaagtatttactccttgtaatttgtaacaggtcaaatagagtagtatcctagtatatatcttagaaattaatcaacgtattcgcatgtttatgagcacattctgcagcaaaatagtaaaaactgtccatgaaatttgttggctggaggacaacttcatgggttcatag

SEQ ID NO: 14372 - DNA, 2756 bp, Oryza sativa
  ref <308>: DATABASE ACCESSION NUMBER: AK098871
  ref <309>: DATABASE ENTRY DATE: 2002-08-28
gaagtaagaattgtggttgccactcggcactcgccaccatgctcctcgtcggcgtcctcctgctgctcttcttcaacctacatctccccacggccgccattgacaccctcacgctaggccagtctctgctgtggaaccagacgctggtctccaatggcggcaacttcgagctcggcctcttctcgccgggaaagtccaacaagcactaccttggcatctggtacaagaagatctccaagaagacggttgtttgggttgccaaccgtgagcgcccgattcttgagccgtcgagctgccacctcgagctgagcgtccacggcgatctgcggctgttctcgacggcgccgtcgaacaccttgctgtggtcgtcgaacgcgtccgcgtcttcctcgccgtcgcccccgcgcaccaccgtggccacgctccaggacgacggcaacctcgtggtgaacagcaacgcgacgcggtcgcggtcgcgatcgccgtcgtcgactacgacgacgcacgtggcgtggcagagctttgatcacccgaccgacacatggctccccggagccaggctcggctacgacaggggccgcggcgtccacagcttcctcacgtcgtggacggactccgagaacccggcgcccggcgcgttctccatggtgatcgacgcgcgcgggctggccaagttcgacctcctcgccggcggcgagcaccggtactggacgaccggcctctgggacggcgagatcttcgcgaacgtgccggagatgcggtccggctacttcaccggcgtcccctacgcgccgaacgccagcgtcaacttcttcagctaccgcgaccggctgccgggcgccgtcggcaacttcatgctggacgtgaacgggcagatgcggcggcggcagtggagcgagacggcggggaagtggatcctcttctgctcgttgccccacgacgcgtgcgacgtgtacggctcgtgcgggccctttggagtctgcagcaacgccaccaacccggagtgccggtgccccgccggcttcgagccgcggtcgtcggaggagtggaggctggagaacgccgccggaggctgcgtgaggcggcaccctctcgagtgtcacggagacgggttcctggcgctgccgtacaccgtgcggctcccgaatggctccgtggaggcgccggccggagctgggaacgacaaggcgtgcgcgcacacctgcctggtcgactgctcctgcacggcctacgttcacgacggagcgaagtgcctcgtgtggaacggcgagctcgtcaacatgaaagcctacgcggctaatgagaatggccaaggcgatcctggcctcgccggagcggtgcttcacctccgtgtcgcccactcggaggttccggcgtcgtcgacggagcactcgtggaagaaatcgatggtaatccttggaagcgtcgttgcggcggtggtgctgctcttggcgagcctcgtcaccgtggtggcggtggcggcggtgttgcggatgcggcgtaggaggggcaaggtgacggcggtgcaggggtcgctgctgctgctcgactaccatgccgtgaagaccgcgacgagggacttctcggagaagctcgggagcgggagcttcggcacggtgttcaaaggcgcgctgccggacgggacgcccgtggccgtcaagaagctcgacggtctccggcaaggcgagaagcaattcagaacggaggtggtgacgctcggcatgatccagcacgtcaacctcgtcggactccgtggcttctgctgcgagggaaacaagagggcgctcgtgtacgactacatggccaatggctcgctggactcgcacctgttcgtcatgagcggctccagctccggccccgactccaagcaggtgaccctgacttggagccaacggtacaacgtcgcggttggtgtggcacggggcttggcttacctgcacgagaagtgcagggagtgcatcatacactgcgacgtcaagccggagaacatcctcctcgatcaggagatggcggcgaggctcgcggacttcggcatggccaagctcgtcggccgcgacttcagcagcgtcctgaccaccatgcggggcacggtgggatacctcgcgccggagtggctagccggcacgccggtcaccgcaaaagccgacgtgtacagcttcgggctcctgctcttcgagctcgtctcgggccggcggaacagcaccgcgccgtcgtcgtcgtcggagggcggccctgggatttacttcccggttcatgccgtggtcaagctaaacgaaggcgacgtggccgggctggtcgacgagagggtggccaaggatgccgacccgaaggaggttgagagactctgcaaggtcgcgggctggtgcattcaagacgaggaaggcgaccggccgaccatggggctcgtcgtgcagcagctcgaaggcatcgccaacgtaatgttgccgccgatcccttctcggcttcatatcctggcgattgagaacgaatgggtcagaggtgttccagaggatgagcgctgctcaaagagcggtagtaaaccagaaacagaagcaatagaagaaatgtagaactgaaaagaatctgggagcaccctacagctgaagtgaagatgcagcgtcagatatgaaaatgtagttgtaatgtcagcatagttgatatttcccgtgtggatgtatagccagtactgtactgcaactgttctgtaaattccttaaattccggaaacaggatcagacaagtaccttctctcgttt

SEQ ID NO: 14373 - DNA, 4008 bp, Oryza sativa
  ref <308>: DATABASE ACCESSION NUMBER: AK064969
  ref <309>: DATABASE ENTRY DATE: 2001-12-06
ggagcgagctttcgttgcttccccacccgagctctctcttcgccctcctcctctccccaatccccatccgccgcaacccccacagattcgcgtgattcgtgttcttcgcgtgcggcgcgcctaatcatctcgtggggagcagcaaaggccaaaaaaaaggttggatgggcacgccgcttttcttcccctcattcgtcccaaattcatttctttagtcaaaaagattctcctctttccttcaatctttctccccaccctccaatcttctagtttctccttcaattcttcctcccccaggtcggcatagcatctgcattcttgcaggcacggtcccgaacgcccagattgctcgcgggatcgatatcttgtagccgccaagaatcgcggcgaagtgaccaatccggtgcaagggagattcttggaaggaatccccctccttctggagcacaacattttggaggaggccaagatttcttgagcgccggtgggcgtggccgaggatgattcagctgctgttcctggtgctgttcgcggagggcgcggcggcgctgctgctgatggtgaagatcgggccgctgcgggagctggcgatgcgcggcgtggagcaggccaaggacggtaaaggccccgcggcggtgaagacgctggcgtgcacgctgctcgtcatcttcatgtccagcgtcgccagcatcctccggatccagaaccgcggcatcaagctcggcaccgtcagccccatggaccaggtgctatggcggacgcacctcctcgaggcttccctcattggtatccccctctcttcctcgtctcttaccattttcattttttttacctccacttggtggaatctgtacaattgtactgtaggtggtggcaatgattggggtttaggggtggatttagttgatttttttggtaattaagagagcagttcatctgaaggaatgtttgttgggcaatctcttcttgactgcttgttattagcctgaattcgtctagatatgtgttgtttaatgcatctagatctgctggtcaacatgtttagaatatataatggtggtttcaggtttttatatgattgattgcttactaagctactaacttgctagtagtagcaagtttgtgttgactcgaaccaataaatactacccatcttgcgtctaaatttgattagtcatgtcagcagccagtagaagctcctgttctgtgcttagctaggaaacctcctgctgctaaaatgaaaatgatgtctagtactctagtttgagtaaggagtgtcctaaaggctaaagggaagatttattttcctcatatttgaactcattgtgtggtgtgtggtgtgtgtgtgtgtgctgtatcttcaagttgaaaacactgtttcaaaaaaaagagagaatagatccaaggcacacaccaccaaatgccatgacttatttctcgatttttatgaaaaataagaaaatgaatgttgtgtattccaaatctacatctcagtgaagcatatgagcactaagtttcaatagctccagttagcaagaaaccaatatggaatgtaaaggctatgaagctgtaaaccactaaaaagatctgtcgactatggaattgaaacataggtctcaacatgcacaagttcagaacttcagatcacaatatgaactcatcagttctgtactttggcagttttttagaaaaaaatgataagcttttttaggtctattcttatacacctagtcattcaggaacacaaattttcagatgcaggaattatatgctttacaaagctaacagtccgtgcgacaaatttgtatgttgcttgtcctagtgtttgtactttagtcttagggagtcttagaattgatgcactttttttactgtttattcaatgtccaaagttccaaatattacgactgcgaaattccactcccctgacttggactaagaacttaggtcatgaaataaactagggtgctaggctattcaaattggtctgtcactgtgtccattttgataactggtatgccatacaatcgaactgatgacaaacatccttacaggttcatagagaaatggaaaaaatgacatcagtgagcaaataaattgaactttgtgaaagtgaacatcttagtaatggtttgaaggtttgtttggataatacttatgaatattgtagtaagcagtgattattcatgtttcttcttggtggctctgcgattcacacgattgcttaggtatgcattgttgcagtacatttaggattttcatacaaggaatttagagaacaaggcattgaagttaactttgtaaagagttaaacttaaaatgcctgcactaaaatttagagaacaaggcattgaagttaactttgtaaagagttaaacttaaaatgcctgcactaaaataaacaaggatggtagttgatatttcccattgatatagggtctttactctttagttgtactggttgaatcatgaatagctttgacgctcttttgaataccaaaatgtacaaatctcaaagcagtactgttatgtaaaactgcattgttggctgggtgcctaacagcaggggctgggagtgcaatccatttccattatctaaaataaatgcaaaaccgtattattctttgaaatgttttttatatatattatgtataatgctatataccggagttggtgcaattttgttctaaccgtataatttagagtcactcaagaaaatcctctttcaacttaagattcaaattatagaaccagatcaaaatatcatgtctacatagagtttgtcaaggaagtccttttattgtagggataagctttatatagtctgattccattggtaaactgcggtgggtacctggtgcctgagaaataatccttgctgataagacatcaatttattttctttgttcaactagacatataataatgactttgagtgtgtgagcagcttggtaaccagttcaattcaaaatttgcatttaaatttgagcagattagaagccctgaaggcctgaaccaatcatttatattaacttcgaacttatgtgccttcaattgtatctgtcgatgtagtggggcttttcccctgggaaatcgcatgaagtaatgtggattggagaaataatgctggatatgattaaatagatattgagatataatggcattccccatgaggaagcgttccattctgttactaagctatatactctgatcccttaaaattgataaaagtacaaatattagtagtctgtgtgatattcactgtgtcgcacttataaagaagtaatgataatactgtgtgtggtagacatgttgcttatctacaggcgagttttttgaccttccttttgtactcaaaatttattctatagactggaaaggaaagacaaacaaggagactaggatcatttctagtgtatagactttagatttgtctggaacaaatcaggaaaccagaataactgtctgggtagaaggatcctttaaccctgctgcacatatttgtaggccatttgatttgatacaagtgaatttgatggtttacttgatgttccagggtacatactattccttgcatttgtcattgatcggttacaccactaccaccggaagctgactatactgaagaaaaccgcaaacacctccagggaggaggttgagaaactacaaattgagctccaaggcaaggaagataaatccaaggaagtcaagaagcttcgtgcggaattagccagccttagtgaaaagatgaagaagctaaaatcagaatcggaggagcatgaaaggcagagattggaggccgaagcacatgtcaatgccctacagaagcaatctgaggagctcctgcttgaatatgaccggttattggaagataaccagatattacagacacaggttctttctctcagaagctgagtctgcaaatgtacaacttgtgtgatggccatactcttacaaaagggggattggattgctatgattttatttactagctcagatctctgtaag

SEQ ID NO: 14374 - DNA, 1101 bp, Oryza sativa
  ref <308>: DATABASE ACCESSION NUMBER: AK098872
  ref <309>: DATABASE ENTRY DATE: 2002-08-28
gacagtctccccctttctgaacacagcaccaccccttctgctgcatctcccacctccctctgaattgtgggcctgaggcgatggcggcgctcgccccgtccaagatgctcggcacccggctcaacttcgccggctcctcccgctacgccaccgcggcaccgaccaccggagcgcagaagatcgtctccctcttcagcaagaagcccgccccgaagcccaagcccgccgccgtcacctcctcgagccccgacatcggcgatgagctcgccaagtggtacggccctgacaggaggatcttcttgccggagggtctcctggaccgctcagaggtgccggactacctcaacggagaggtccccggagactacggctacgacccttttggcctcagcaagaagccagaggacttctccaagtaccaggcctatgagctgatccatgccaggtgggcgatgctcggcgccgctgggttcatcatccccgaggcctgcaacaagtttggcgcaaactgcggccccgaggccgtctggttcaagaccggcgcccttctcctggacggcaacaccctcaactacttcggcaacagcatccccatcaacctcatcgtcgccgtcgccgccgaggtcgtcctcgtcggcggcgccgagtactaccggatcatcaacggcctggatctggaggacaagctccacccaggtggcccattcgacccgctggggctggcgagcgacccggaccaggcggcgctgctgaaggtgaaggagatcaagaacgggcggctggccatgttctccatgctggggttcttcatccaggcctacgtcaccggcgagggccccgtcgagaacctctccaagcacctcagcgaccccttcggcaacaacctgctcaccgtcatctccggcgccgccgagaggacgcccagcctgtaaacatctcgccgccggcgacgctggctggcctcaagttaattttaatcttacccgggaagaagaagggaggagtttgagaagggtggaagaatgtgttaaatgtacgtgtaaattatcgtcgagttgggagatgaatttgaaaacctgttcattctgatcttctgatagg

SEQ ID NO: 14375 - DNA, 3145 bp, Oryza sativa
  ref <308>: DATABASE ACCESSION NUMBER: AK064970
  ref <309>: DATABASE ENTRY DATE: 2001-12-06
gaccaccatcctcaacctcaatccccatccattccattccatcctgcacgagttctccactggagtggagatccgtactatacttttttttattattaccacctgcccgcaaaaccaaatccccgcaccttcctctttccccttctttctcctcccaaaaccgctctctttcttctcccaattgcccacctaccggaagagaggaagagagagagagagagatgggttcttgcggattgaggagggtcagatgatgccattaccaatttaacatcttctgcatcttttttttgcctttcttggcatattcttctcttctggatgtgtagatccttctttccccagtcctgcttagctttcaagcagaccaacaggtccgagattggtgacctgggagcggtttcttgaggtgtggtgccgttctgggtaagatcgactctgttgccctgcaagaattcgatgcaggagtaagggcggcggcagtatgtaatttggtgggcggttgttggagaagaggagcaattttgcccatcggtttcttgggtgcaaattgagggcaaatttcggtgaatttcgtcggaaattgaggaagcccgtttggcaatcggtcctgtccatgtcccatgcctagaagctggggcattttgggtgtgaattgtgacgaattccagccaatttgggttgggccaggaaagtaccctttgggggtttcagtttgtggtgtgatctgcaatctttccaagattggtggggagttctttgtgtgtgctggtggcaaatgggttgcacacactccaaggtggaggatgaggaggccgtcaggaggtgcaaggataggaggaagctgatgaagcagctaatgcggcgccgagttgagcttgcggctgcacaaaccgcctacctgcagtcactccgaaacacaggagccacacttcgacaattcgccgaggtggagtctgcattgtcacagcagccccctgcaggtattgcagtgcatccatcaccaccaccacctccacctccacctccaccgccaccaccggtgccagtacctcctgcatactcagtgacatcctcagtgccaccgtactcgatgacatcctcattgccaccctcaccacgccctccaccaccgctaccgtttagtccaatagtgataaggaggaaaaagagagacggtgaacttgatgaggatgattctacagacgacgacgacgacactgacagctgctcgactcctctaccacctcccccgccaccaggggttgagtgggagtacttggaaccttttgcaatgcgtcccttaaattttccatcttcattggctgataggattgataaagaagcggcctcacaggtgaccatggatgatgataactgggtggagactaacacagaatttgatggatatgacgatgaaagtgtgtctggtaatgttgaaggcattgtgagcagtgtccagttgaatcaagccaagagtagggctctaggtgatgacaattcatcaatggttagctgggtgacaaaggactcagacacttcagcgatggcctggaggagtaagaagtcgctggcaggaattgccaaggagattgatgaatacttcttgaaagcagcggcgagtgggagtgacatcgtcatacttttggactcttctggtgggcagccagatccctcagagttagaggcaaacagaggaaaaaattccaaatccgccaaggttttttccacaatttcttggagctggtcattcaaatctgcgcaagctaatagacaatcctcaatgcattcaagtgatgcctctggatatggttaccatggcaaaacactagagaaactttatgaagaggagcaaaaactctacaagttagtcaaggatgaagaatttgcaaggctccagtacagaaagaacacctcgttgctacaaagactagaatcaggtgaccatgataaattgcatgcagagaaagtgcgagataatatagaggaattgcaagctcggataatctctttggaggaagctgttggtttgacatgtttgtccatatcaaagctcagagatgaggagttatatcctcagattattgaattatctgcagggcttgtgcatatgtggagaaacatgtatgagtgccatcaggttcagaaccacattgcccagcaagccaatcttctaggcaatttaccagggaatgaaccaacaactgacactcattgtcaggcaacatctcagctggaagttgaagtttctgcatggcatagttcattctgcaatctcatcaccttacagcgtgactacgtaaccatccttaaccagtggattaaactcactgattgcctgcctgataacgatggctttatgaaaagttcgtcaggaattcgtagtctctgtgcagaactccagcgagctcttacaggattacctgagaaggtagctgcagaagcaataaagacttttctgtcagttatacacactatagttgtacagcagactgaggagcgtcaactgaagaaaaagtccgaccaaatcgagagcaagttccatacccagttagagaaacacagcaacaatgcaacccaaaattcgggccagcctacacttgcaaagctggacacgttcaaaaagcaggttgaagaggagaaggctaggtatctgaactccgtgaggactagtcgagccatgacactgaacaatcttcagacgagccttccaaatgtgttccatgctctgatggggttttccggagtatgcgtgcaggcgttcgaaggtatcagtagatgcagtgagattgtcgccagccactcgggagcagtttcacctgccatttcttcgtgactgcatccggcatggttcgttgtgattgttcattgtaagtaggcaaagaaactggttctacgtgaatacacttctcttccaaaacttaaaaagggaaagaatttagcgacgattttaagtcagtacaggcatagtagtcttttgaatagatcaacatagtctcgatttgggaagaggtggatgtctatgaggttactgggaaatgattcatgtgtaactagatacttgaacagttgaacagtagtctgttgctgcatgttctcaacttctcaattctcattatatgatgctattttctatttctcaact

SEQ ID NO: 14376 - DNA, 1775 bp, Oryza sativa
  ref <308>: DATABASE ACCESSION NUMBER: AK064971
  ref <309>: DATABASE ENTRY DATE: 2001-12-06
gattcattactcactcttttactcttcttgacaagagtagaacaacaacaacatcatcatcatctatcacacacactatcagggcaggtgatcgaatagctaggaagcaagcaagcagagagtagtagatcgagtgatcggaggatggggtcgcggtacgaggtggaggtgacggtgtcgtcggcgcgggacctcaagaacgtcaactggcgcaacggcgacctcaagccctacgccgtgctctgggtcgacgacggcgccaagtgctccacccgcgtcgacctcgacaacgccgacaaccccaactgggacgacaagctcaccctccctctccccccctcctcccgcctcgacgacgccctcctctacctcgacgtcgtccacgccaacgccgccgagggcgtcaagccgctcgtcggctccgcccgccttccgctccacgacgtcctcgacgacgccggcgtaggcgcccgcgtctcccgctccctccgcctcaagcgcccctccggccgcccccagggacgcctcgacctccgcctcgccgtccgcgagtccgcgcgctactacgacccctcgccctacccggctccctacggccaacccgccggaacacgcgacccctatggcgccccgcctccggcctacagctccggctcaggcgggcagtacccgtacggtggtggctacggctcaggcgggtacgcggcgccgccggcagggtacccgagcgcctacggggcgccgccacagccagcgtacggcggcgcgcctcctgtggcggcgtacggtgcagcaggtggggcgccggtggttgtggaggagacgaagaagaagagcaagatggggatggggacagggctggcggtgggcgcggcggcgggcgtgctgggagggctggcgctggccggcggcgcgagctacctggaggacaagttcgaggagggcgtggcggagaaggtggaggacgatctcgacagagacgacgactacgccgccggcggctacgacgacgactattaattaattccattttcattttattcatccaaccacaccacgcctatccctgcacttcaaagttcaaactcatcctaatataaccgaataataatacctatacttactattacctctttttatatgatactccaataattgagaaacacaaattaaacaagagtaataatcaatttttggtttagaaaacaactcattattcatgctgatgatgatgtgttgttcatttctttttcattcaaggggggaaaaaagaatctttctcctcgccaagaaagagagatgttgatgaacaatatttatatcagaccgatccagtgtggatttggacattcctgcactgtcgtctatcggtgtggaattgtctataaaatactccatctatttctaaatattcaataccgtttatttttctaaatatgtttgaccgttcgttttatttaaaaaaaattaagtaattattaattcttttcctatcatttgattcatcgttaaatatacttatatatatacatatagttttatatacttcttaaaagtttttaaataagacgaacggttaaatatgtgctaaaaagttaacggtgtcaaatatttagaaacggagggagcgagtactagctagtatttgatttaagcagagtggaaaaatactatcttgcattatgaaatgtttgacgttttgaactagccaacgtcattcacgaagtctgtaatttgatgggaatattatagtagtattgtgtactacttcctcc

SEQ ID NO: 14377 - DNA, 1319 bp, Oryza sativa
  ref <308>: DATABASE ACCESSION NUMBER: AK064972
  ref <309>: DATABASE ENTRY DATE: 2001-12-06
ggctctcctcctccgccgccgccgccgcaaccaaccagccagccagccatgcagcccgactccgcctcccaccgcatcgcccgcgtcgccgcccacctcagcccgtcgccgcgcccccagatggaggagggggtgaggccggcgccatgcagggccaagggcggcgcgccggggttcaaggtggccgtgctgggcgcggcgggagggatcgggcagccgctgtcgctgctcatgaagttgaacccgctcgtctctgtgctccacctctatgatgtcgtcaacacgcccggtgtcaccgccgatgtcagccacatggacaccaccgccgtggtccgtggtttccttgggcccaaccagcttgaggcagcacttacaggaatggatcttgtcattatccctgctggtctcccaaggaaaccaggaatgacaagggatgatttgttcaacaaaaacgctgggattgttcgctcactttgtgaaggcgttgccaagtgctgtccaaatgcaattgtgaacttgatcagcaacccagtgaactcaaccgtccccattgcagcagaggttttcaagaaagctggaacttatgatcccaaacgtctccttggagttacaacactggatgtagcaagggcaaacacctttgtggctgaagtacttggaattgacccaaaagatgtcaatgttccagttgttggtgggcatgctggagtgactatattacccctcctctcccaggtccaccccccatgctcatttaccccagatgaaatcagctatttgactaaacgcatacagaatggtggcacagaagttgttgaggcaaaggcaggagcaggctctgcaactttgtcaatggcttttgctgcagcaaaatttggtgatgcatgcttgcgagcaatgcgtggtgatgctggcgttgtggaatgttcatatgttgcatctgcggtgaccgagttgccgttctttgcaacaaaagtgaggttaggtcgtgctggagccgaagaggttctccctctggggccgttgaatgattttgagagagctggcttggagatggcaaagaaagagctgatggagagcattcagaagggcatcgatttcatgaacaagtgaggtgtatgaagggacaaagttatgcatacatgtaaagagtgtcctatatatagtgctcatatacatgtaaaattttcgccgggctcatatacatgtaaaatcacttctgtaaaacgaccgtgaaatgctaattaccctttagttgcactaaacctttttttcctgatcatggaataaaaatcctatactagacaacatcctgttgt

SEQ ID NO: 14378 - DNA, 2765 bp, Oryza sativa
  ref <308>: DATABASE ACCESSION NUMBER: AK064973
  ref <309>: DATABASE ENTRY DATE: 2001-12-06
ggtggcctcctccctcacgccccgtagcccttacccgaagaaggagaacttgggcaacgcgcggcgggggatgggggtcaagcctggcccgcgccgcaatgtcctctcggcaatcaacaatggcggtggcacgaacagcgacacggcgtcggtggacggcggcgagggcggggctgggccggcggcgcctgtgatcgagttcaccgggagggaggatgtggagcggctgctcgccgagaagatgaaggggaagagcaagaccgactacaaggggagaactgagcagatgagtgagtacatcaagaagctgagagcttgcatccgctggtacattgagttggaggacggctacttggtcgagcaggagaagctccgtagtacgatggatgcagagaatgcccagcacgccaagttggaggcccagcttagcagtgatctggaagagctgaaagctgcacacctgaacttgacgcggcagtgcgattcgttggaggaaagcttcaacaaggagaaggccgacaggatgcttgctgtggagtcctacgagaaggagaggcagcaaagggaatcggctgaggcgtccctcgacttgctgtcggtggacctggaaagagtcagccatgaagcaaaacggtttagtgagcaactgaaaatggtccaagacacgaacaaaagactgcaggagtacaacaccagcttgcagcaatacaacagtaatcttcaagctgatgcctctaagagtggggacatcatctcaaaactgcaaaaagagaagagtgccatgatggaaacaatggcttctctgaaagatttaaacaattcaatgaagaaccatttggattcttctaggacttctcaacaagaggccattagaatgaaagaacaacttatgaaagaagtggattgccttagaattgagctacaccaaattagagaagaccgtgatcagtctgtttctcaagtaaataccttgagtgctgagcttgctaattacaaggaactagcaggcaagtctacaaaagactgtgaaagcttgagtgtaaaagtgtcagcctttgaggttagtggtttcagattaaccaaatcaatactttctgtgcgcaactatttggctcaccattatgcttctgctcaggaaacatgtagtatgcaacaagaacagattcaaactttgcagaaacaacttgcagttgcaacaaataaactgaagcttgctgatgttactgcaattgaggcgatgacaggatatgaagaacaaaaggtgataataaaagatctggaagaacgtttggcatccgcagaatttcaaattgttgaagctgacaagctacgaaagaaactgcacaatacaatattggagcttaaaggaaacatcagagtgttttgtagggtccgaccacttttgcaagacaacgattctagtggtgcagaagaagcccttatttcatatccaacatcagttgaatctgccgggcgtggtattgatttgatgaaccaaggtcagagattttccttctcatatgacaaagttttcgatcacggtgcttcacaagaagatgtgtttgtggaaatgtcacaactagttcaaagtgcacttgatgggtacaaggtttgcatatttgcttatggtcaaacagggtctggtaaaacttatacaatgatgggtccaccagggcgtgatcagaaaggcatcatacctcgttctttggagcaaatttttaagacaagtcagtctcttgaatctcaaggatggaagtacagtatgcaggcatcaatgttggaaatatacaatgagacaattcgtgatttgttagcacctggtcggtctaataactttgatctgtctaccagtaaacaatacaccataaagcatgatccacaagggaacacaaccgtcactgaccttactgttgctgatgtttttagtagcgccgacgtaacttctcttctagcgaaagcatcccaaagcaggtctgtgggtaggacccaaatgaatgaacaatcttcccggagccattttgttttcacactgaagatatctggatcaaatgagaacactgggcaacaagtccaaggtgtccttaacttgattgatttagctggcagtgaacgccttgctaaaagtggctccacgggtgatcgtttgaaggaaactcaggcaatcaataaaagcttgtcagctcttagcgatgttatctttgcaattgcgaaaggagacgatcatgtgcccttcaggaactcaaaacttacataccttttgcagccttgccttggaggtgattccaaaacgctgatgtttgtcaacatttctccggaggcatcatccgttggggagacgatttgttcactgaggttcgcttcaagggtaaatgcttgcgagatcggaataccaagacggcacacacaagcccggtccttcgattccaggctgagctatggctgaagttgctgtggccatcatgatgtgatgataatcgatcagcattggggatatcatttggctgaagctgatgaggccgcttgcttcttgtaacttgtacagtaggaaggagagtggcactgcgctagtgcgctgtgagcagaagagaacacgcatgcatcatgtgttttctttctgttgtagctgatttgagcaatattaactgcattgcaatgtattttctggagtaactttgtatgcaaccgtgggttccaaaatggtgtactacttttgcccggcagaacttcgctgctggctcctgcatcaaaatgatggttatgccacg

SEQ ID NO: 14379 - DNA, 2406 bp, Oryza sativa
  ref <308>: DATABASE ACCESSION NUMBER: AK064974
  ref <309>: DATABASE ENTRY DATE: 2001-12-06
gacaaaccaaacgccaattaatggcttgaccaaccaccgcgcgcgccgccgtctttcgccgacgccgaggaggccggccatggcggcgccgcccaggcccataccctccatccaccggcaaccgcccaagccaaccaccacccacgtcgcccgctgcttccgcgacccgcccaaagcccccgacaccaacagcaacaccaacccgctcctctccctcctctccgccgtgcccgactgggccgacgccgtctccgagcgccgcatccgcgaccgccgcccgctctacacccacgccgactggcgggagcaccgcagctcccgccgccacctgcgccacctcctctcctccctcacctcccgcgtcatcctctccctcgcgccccccgtctccgccactgaggacgatatcagtaatacattaggacatagaattgtaatatgtgttagaatggaagtagagtaggattcttgtcatacgctctcttagcgaggcatcaccgattataaccatataaaagacctaacttaggtctataattaacttctccataatcaaatgataaataactaatcgagtttaaagtcttaaaacatgagttcaaagttttaaatttcaagttgaaatttaaaaatatccgaattgaaaagtttcaaaattgaagtcaaaattttcaaattttggacactgaaaaaatgttttattgtttcaaatttaaaagttttaaacattgagttgaaagattcaaaattttaagttggaagatcaaattttgaattgaatgcttaaaatttgagttgaaagtttcgatttggagttaaaagtccaaaaactgaatttaaagtttaaaatttgagttgaaaggtttaggtttttaaatttgaaattaataaatctctgttgctaaagtctattacaacattttatttaaatttaataggtattgaaaaattacttagaattcataaaaacaatccataatatctctagtacttttaataaaaaaaggtgactataaaactttctatattaattaattggaaaaaaagctacatatttagttggcactacgagaccataagcagtagccatgatatcagggcgtaggtgcacagccacatgggcagggcactgccagcgcagctgcaccaacttgctctagatatgactggccagttgggggtcgtggatacccagataagctataattatattagatcatggaggagggcccataatcaatatcctgagaatgaaggctttggtcaaacctcattaacaaatattatgtcgtggtgtcgttagaatgtttggatcttttatagatctcttatgcagatcataatcgatgtgataccgataccactttaatatcaagacatatccaagagcgagatccatgatatatgtgcgacagaactgccccacaacgcgtggcccgcacaagatgtcgatagagggatattggcacatggtggagcacgatggcaatcaacataaattgattggtggtgacgaatacacctgggaggtagttcaaattgctcgatgagctctagttgatgaggaggcaatcaaacatggtgcttgggtcgatggtggctttaggtgtagcaatgagcgatctaatcggtggagtcggatactttgggcggtagcctagatatctcgatgagctattttcagcaaggagacagtcaagcgtgacgttaggggttgattgagactagaggcaatcgacgattcaatcagtggagtcacattctgggtggagggccagggtttatcgatgatggccaaatatggtgctagggtcatttggtggctaagtatagcatgatgatttgttggcttcagcttgcagctaaattgtgggggcttatcggaagttggtgcaggctgaccttgatcaattcttacaacgatagtaaacaaagtgacatgcatccagataagacatagtgtgaccaaaccgacaatttgggctagaaagaatgtggaatctttggcttggctataggtaggggtggtaatgggtcaaggcccgtgggttctttcacaacccatctcaacccttaaatatttttagcacaaaaaaactactaaatttcagcccaacccttttttggacccaaccctcacattttctaggccaaaatgttgggcccattaccacccctagctataggacattgcacaacaatgtgcactagctagttatggaagactctaaattcctcgttggtggttgtgtagaagattgtggagtgtatgtgaagctcggggaggttaggccatggtggtgagcatgatttcactcactactacaaaaatctattaaaaccttcataaggactggccttataggtgccgattcatttaaaactggcacctatgggcattttccc

SEQ ID NO: 14380 - DNA, 2039 bp, Oryza sativa
  ref <308>: DATABASE ACCESSION NUMBER: AK064975
  ref <309>: DATABASE ENTRY DATE: 2001-12-06
gaccatagtccacagtcacacgctcgcgcggcatgacggcgacctcgccgccgatgaggtctgtcgccgccgccgcgcttgtcctaacccccactccaacgctcaaccgtctctcctttcccttcgcccaccgtcactgccctagtactgctgctcctcggtggaggcccgcgcggtgccgcgggaagccggcggtggaggacgtggtacacgacgacgaggaggagacctggcggcgggaggccaaccccgagaggaaggatggaggagaggagatgctcgggcgcgggtggttcatggttgatgagattggtatggaaatcctcaccatcgccttgcctgctgtgctcgccctcgccgccgaccccatcacggcgctcatcgacaccgccttcgttggccatgtcggttcaactgaacttgctgccgttggagtatccatttctatcttcaatttggtatccaagctgctcaatgtcccattgctcaacgtcaccacatcctttgttgccgagcagcaggcagtggatgccgattataacagctccgtagaaaattctcacataggagaagagatttccatttcacaagagaaagcaggtgaacaaaggaagtttcttccagctgtctcaacatccttggctctagctgctggcatcggattgatggaaaccgtggcactgatccttgggtctgggacactactggacatcgtcggtgtacctgtcgattcaccgatgcgtataccagctgagcaattccttactttaagggcatatggtgcaccgccagtcatagtagcgcttgcagcacaaggtgcttttcgtggattcatggatacaaagacaccgttgtttgctgtggttgctggtaacctagtgaatgcattgctggatgctatatttatttttccacttggtctaggagtaagtggcgctgcattggcaacagtgacttctgagtatttgacagcgttcatcctcctctggaagttgaatagcaaaatagttctgttctcatggaatattgtttctggagacatcatccgctacctaaaatctggtgcgctgctaattgcaagaaccatagcagtagtcctgacattcactgtgtcgacatccctggctgccagggaagggtctgttccaatggctggctatgagatatgtttgcaagtgtggctaacgatttctctactcaatgatgcactagctcttgctggtcaggctctacttgcaagtgaatacgcaaaaggaaactataagaaagcccgtattgtcttatacagagttctgcagattggaggcgtaactggtgcagcactttctacaaccttactccttgggtttggatatttgtccatgctgtttacagatgatgcagcagttttagacgttgcccaaactggagtctggtttgtcactgtttctcaaccaataaatgctgttgcgtttgtgatggatgggctctactatggtgtttctgactttgctttcgtggcatactctacattatttgcgggagctatctcatcagcagtactgcttgtggccgctcctaagtttggtcttggtggcgtctgggctggccttactctatttatgagtttgcgagcaattgctgggttctggaggttagggagcaaaggtggaccatggaaaataatctggtctgaaactgagtaaagaaaaaagatagtgatgcataattattagattaacatcttacagcaaacatgtaaaggcaactacacaggaaaggcagatagctgctggtcatagttcagaataagattttctttgggagatgacaaatgtatgtagtgatttggttacaagaagtacagatacagatacttgttggtggctctagatagatagctctctctttgttttgactgctataggaagttgattcgacttgtacagtgctgtcctatagaatggacaaagctgatagctgatgtacacaggaacattcagaatcattcatccatgtaaataagtctttctttgggaaaagtgtactgtttagtgaac

SEQ ID NO: 14381 - DNA, 1073 bp, Oryza sativa
  ref <308>: DATABASE ACCESSION NUMBER: AK064976
  ref <309>: DATABASE ENTRY DATE: 2001-12-06
gatcttctctatctacacttgtacacaacactagcaaaccgccatggcgccgccgccgccgtgttgtgtgctagtggtacgctgctgttccggatccctcccttcgccgccgccgccgccgccgcccagaccctctccctccaacaacctcagaatcgccagaagagagtttgtgctgaggagcagtgagctcgccacgctcgctgccatcttccacttgagcggcacgaagccaaggtacctgggcgtgcagaagagtcctccatcgctggctctgtgccctgccaccaacaattgcgtttccacttgtgaggacatcactgactccattcactacgctcccccatggaactataaccccaaggacggacgcagggctaaacccatcaccaaacatgaagccatcaaccagctcattcaagtcgtcacacaaacaaagcctgacaacttcactcctcgcctagtagagaaaacagatgactatgttcgagttgaatacgagagtcctatattcgggtttgtagatgatgtggagttctggttccctcctggtaacaaatccattgttcagtaccgatcagcatctcgatcaggattcattgacttcaacgccaacaagaaaagagtcaaggcgctcaggttggcactggaaaacaaaggctgggcttcagaaagcaccatctgaacctaacctcaaggaagccaacccctcgagtctgtactggagtgtggattctaatccctcgagggatatcccctcgtatatctttttcttccaaattcgatgcaaatagttgtgaaaaattctaaaaaaaattgataatgtagagtataatgatacctactagtccaccaaaattcatgttcaaattcgatctacacatcgagaaacaaaaaagacaaatttagatataaacagtacgctattattcatacgctgaatttgtcttttttatatctcgacttgtgagttgagtttgaacttaagattttgtggagttgtatatatgtgttgtatgaatgttgtcaaatttttccagaatttttcataaccgtttagatggtttttgacc

SEQ ID NO: 14382 - DNA, 1560 bp, Oryza sativa
  ref <308>: DATABASE ACCESSION NUMBER: AK064977
  ref <309>: DATABASE ENTRY DATE: 2001-12-06
gaccggatggccaccacaccacttgcttcctccagctttcgctgccttctgctgctgctagctaggcgtgcgtacgactgttgcacaaagcagctagcgccctctgctgtaaagctgcaggctgagaacgacgattgcgcatcgatctggcttgtgtgcttaattgctgcttcctggtttcttctctctctcatcaattagttgcggcatgcgcatgtgatttgtttctgctttgttctgacttctgaggagcatacgctgggtatctaatggctggggtcataaaatggaaaatgatgtcatgtgaacaaagtgggaggagaagtgccgaaattgcacgagaatgcttatcactgacacctaatagatacaagtgtcacagctaccaacatattggctatttgggtgactctgcagagggtttcatttgccgtccattgaagtcaaaactaagaagcaaggttggactacatgtggctgcgaaggtacacaataaggacgatgaaggaagctgcagctccagaatttctgatgaggacaacgagacattgtctaatgcgtcgcgaaaaatggaagtaaaccatctgggggcactgagatgctatttttctaaactaaacactgaggacgcccagaagccatattcttttcatcagacgaacaagcagagaactggcccattatccacaaacatagaagaagcaaacatggctactgattatggcgatttcaggaatacgctggaatcattcgagatcaacttcaacagacgaaaaaaaggtacaaagggttatctaaatactgccgtggaggactacacaaattatttgatatttgatgagaagaacttcctggacatgcagcaagatgatcaaacatccagtttctgtttgacgaatttactagctgcgatcaatattgcagttttgttgttcgaaatagcaagtccggtgagaaattctgatattgaaaatctctctctccctttgatgtatggagccaagataaatgacctaatactatcgggggaatggtggagactactaacaccaatgtgtttgcactctgggttcttgcacatagcacttggatgttgggtattacttatctttggacctcgcgtgtctagagcatatggtcaaacgacatttttgctgatgtacatacttgggggagtttgcgggaacttgacaagctatcttcacacgtctgagctaaccgtctgtggcacagacacatcttggggcaacaatttgtggactacttttcggctatttaacctgcccaagtgtgcaggtcgacaatgctgctaagaaaggtcaaaaggctgtggttcttgttaggcgacaggccagtccatggaaatccattgccatcttcgtcataagcataattgtgcttgctcttttcgcctttgcttatggaacacaagcctagatttttcacatggttctgtttgcatatatagtaggtatggcatggccatgagatatggaatgtaacataatcacctttttttttttcttcttgggtttaatgaatatacactggcatttatcg

SEQ ID NO: 14383 - DNA, 1516 bp, Oryza sativa
  ref <308>: DATABASE ACCESSION NUMBER: AK064978
  ref <309>: DATABASE ENTRY DATE: 2001-12-06
gataattccaaaactttctcgtcctaatcgcgacgagctcgaaacgaacatggccggcggcgatggcggcggcggcgggggagacgagagcgagtttgtgggggtaggcggcggcggaggaggaggaggagaaggagaagggaaccagagcccccccaaccgtaggttcttcgtggccgtgcacgtcggcgccggcttccacgcgccggcgaacgagaaggcgtaccgccgagccatgaagcgcgcttgcctcgccgccgccgcagtgctccgcgagggaaatggcacaagccttgatgcggttgcagctgccattcaagtattggaggatgatcccatcacaaatgctggacgcggttcaaatttgactgagagtggtcatgtggaatgcgatgcaagtatcatggatggttctactactacctttggagctgttggagctgtgcaaggtgtaaagaatcccatccaaattgctttgcacttggcaagggaacagatggtaggaccttcactgcttggtcggataccccctatgtttttggttggtgaaggagcatgccagtgggcaaaatcgaaggggttgaacctacctgaagccacatcagagggaaatagttggttggtgactgagagtgcaaaagcacagtggggaaaatacagatcattgcttgcaagtgccaaggaatcagttaatcatagcactggttctggttcagaatctagttcagtacagttggaagcaccaggagctgaagctgaggatattactggtgtaaagaagatgaagatgatcacacgatcaatcatggaggatgatcaagactgcgtgatggatactgttggtgctgtttgtgttgatgcttatggaaatatagcatcaggagcatccagtggtggcattgcactaaaggtagatggacgggttggtttggctgctatgtatgggtctgggtgctgggcctcatccaaagggccctttggcacaccgtttatagttgggtgttgtgcaactggagccggtgaacacttgattagaggatttgctgcacgtgaatgttgtatctcatcatcattgatacaatctggccctgcttctgcttgtaccaaagttctgcgccaagcggttcaaagcagcagcgagatgtctcatgatacaggcgctgggttgttgctaattcaggctgatgttctaaagagaggggaggtatctgcattgggagccgctgaacttgttgctgcctattcctccccttcatttggtgttggttatctcggaagcaatatgaacagtcctaaggttgcaatgcttagatcttcaaaagctgcacccaatacgataaaccattttgctactcgtgtcaactttgacgcacaatctgaccaatgatgtgctgttgttttaatggcgtgtgccactgcagtacctcttgtgaaaagagcatgttggtggtgcatgtagtctggtcttgtaccgaagatattgtttttggcctaacccaaaatttctgtcgttcct

SEQ ID NO: 14384 - DNA, 2400 bp, Oryza sativa
  ref <308>: DATABASE ACCESSION NUMBER: AK064979
  ref <309>: DATABASE ENTRY DATE: 2001-12-06
gaccgcgtcgccgtgcctccgccctccctctttcaggtcgccgacccaacatcaggtcgtcgtcgctccgccgccacccggtccccatcgaccgtcgcccacggcgcctccacaccatccccgcatctccgtccgcatcgcctccctcagcactcggccctcgcacatccccgcgctctgcggctccgtatcgccgccctcgccgcatctccctcatattctggttttgttcactgccgccgccttgcaagtcgctgtcaatccgccgccattcagtcttcatcgtcgagtccccttcgccgcgcacatccgtcgttggagcgagcatcatcgtcagaatgatgtcttcaaccatcctccctccactgccgtcgcatcagtgccacgtctagccgccttcgcaagtcgctgtcgatccgccgccattcagtgttcgttgccaagtccaactgcgtcgccgctgtcaccatcttcaccttcaccttcactgacctctcctctcaggaggatgcagcaactgcattaaaaagaagaccttatgctaacaaagccaaaggaacctgagtttcagacctcccacagggtccgtgcagtcaagagtgaaaagctctgctgagctagaggaggagatgctggccaacatcccaaaattcagagcacggccatttaacaaaaaagtgagaattcgtttaccttagtttgatcgttactaactgctcaatccaggatctgaagactattaactaaatgtttgcttctgcattttgcttcagaacataaagtctgaacatcgtttcttgcagattcttgagatattgacactggccatttctagagagtagggaaggaagaaatgagtagtgatcacaagcaacagctattgacattacaccattggcatcatttcttttcatggggaaaatcatcaaaagatgccttagaacagaacagaaactaaatattccagatattttatccatattttcacctatccttgtctttgcctttccagtgctatttttctggtaccaaaagatctctggtgctatattctttttatttgtaaaattattagatgcctcattctaatatgaagatcattcacatcttaatcatactgcagaggatatcatcaagaatttgtgaatggcttatcttcctttctccatttcccatttattgcacattgcatcatcacatctttttgttatgtataatcatgtggtagttgattttgctctgattgatttttgtacaggtttttgccatttcacctgacggataaagacaatggctatttatctttaacaatagatatcatagactgcaaaattatttctacgcttggctgaaaggaggacacctcactgcaggtatgtccatacactatacatttatatgaatcaacacaatttaatgtttgcttgtgtcacaaaaacaaaatatttctctgatttaatttgagaatgcatcttacaacaatttagctggctttcgagcttcttaacctgatgcattcatatgtgatgctcctgaggaatcctaatatgtttcttgttttcaactgtttgatgagatagttaattctataactgaataatcttctcaatgcctattcaggacaatgtgtatttactaatgacctatttcttatttatgtacctttatgcacatgttgtttcctaattcagattattatagatcctattgtttcctgtcaaaaatttatagcaatctagctcctatgagtttccatatacatgttataagaatgcaccctgtaatatttatgggatctagaattcaagaattacatacacaaaatatcctttcaatctagctaattatctgcatggtgctgctgatattactagctcacttggatatgccacacattagtccattcatgctacacatgcacggatcaacaatatgcaatggtttgagttcacctcttgtatctgtaattcattttcttatctagataatatatggcgtttaggcaggaatgtacatataagtcatagttatggctatgtgagggattcactggatttgtgttcaacccttaagacatgtcaggcatgttaggcttaagacattacgatttttaatttctattttttggtacaagaatctccatgtgaatttaggtgtatgcctgtttgtcagcatctatgatattttatttaagttgtaaaatctgctcgtgtaagttttgtccatattcagccaatacagtaagtgaaccacccagattgccttatgtttggtttgatctcttctcccttacccttcactgtgtgatatatttttgtcctgtattgatatataagtgatgtgtgaaccaatttagatttttgttatttgattactggtatgatatgatgcaattggtcg

SEQ ID NO: 14385 - DNA, 2237 bp, Oryza sativa
  ref <308>: DATABASE ACCESSION NUMBER: AK064980
  ref <309>: DATABASE ENTRY DATE: 2001-12-06
gtcacttctccacggtttcaccctccctctctgagaggggggggggggggggggaatcattgagtgatgactgccctatccctgagcagacgagccccaggcggcgggccggcgacctagccccacgccacgccggatccggctgtccgttgccggcggcgctatgcctgcctcttgctgaaagttgactatcggttcagtgttcgtttcggattagagttggaggtcaagtcggtgctcatcatcttctaatatatatatatatatatatatatatatacaaatcatcatcttcttcttcatccaaacggctgcgccgccgcttccgtgctctgcatcttcctctgccgcgggtacgaatcctgccgatcgaccaaatctcagctaggtcaacgtgttggtgttgctgctgtgggcagcagtttggtggctacgagaaagacaaaacgaagcttgaaacggattggaactaatacaaccaaaaaagaagaagacatggatgatgctactacgaccaaaaggaaaagaccagtgattcgtttcaatgacctacctacggatatattgattggtatcatatcccggctgccgataaaagaggcggcaaggacgagtatattatcaagccactggaaaaaaatctggtgttcccatgtaaacttggaattctccttctactcgatgtcgccaagattagcttcgacctcacatgatgcacggcttaggatgaaaatgttcatcgagagagtcagtcaagtctttgcgcaacacagtggtctaagtgttcagaaaatagcaatccaaggtaagttggataatgaacatgcagaccacataaacagatggctcagctttgttagtgctactaaaacgaaagatcttacttttgatttcaaatcccggtatcctagagaggggccctatgatttcccttttaagtttttcggtgctatggacagttcatatttgctgtccatgaggcttagtgctgtttctctgaacccgcctgtggatttcaaagcctttctgaaccttaaaaggctcaagttagaacacacaaatattactgatgaaaacatgcagattttgatctccaactgcaatgccttggagtttcttggtatcgttgattgtgggaagctcacaagattgtcgacatcgcacctttggaaccagcttaaacatttgcatgtcgagagctgccatctgcttaaagagatagagttgaatcttggcctgacgaaacttgggtacaagggcacactgataccgttgtcacctcctgggccattgctgctaacgaatgtctgcatgaagctgcaacacgctcgttcctctcttggatatatcttcaccaatcttccaagcacgctgctccatctcgagacgctgagtttgcaatgttcagaactcgagagggctattttgccagaaaatcatatcaaatttatgtatctaaagcatttgaggttgcaattgagacaccctgtgacggaaaagaagattgatcttcttgactttgcctgcctactggaagctgctcctttactgcaaaagtttgaattacatatgtggatgccccttcaccatcaacggtatcgcgaagaagctcatggcgagctacggagtcttccaccgcagcctcatgcccatctcaggcttgtacacataagtggattcatcggcatgaaagaccaattggagctgtcactgcacattctcagaaattccgccatgatcagggcgatgaaggtcgaccccaagccgctcttcgcccttccttgtatatcgatgctgtcacccttggaagggtttcagtatcttgatgggtatgaggtcgccattgaatatctctgcagagaagaccacaacaatgttgtcgatgtttctgaaattcgtcgcgaggaggtcgaaacgctctcggtttgtgagctggtttatccagattgtgttcgccttacccgtaaggccaattcctcttcctgattaagatttgagccactctgaaggtattgttcatgccagtcaagctctacacaatttggacgactttggagtttggagcagctaagtcagccctgattagtttggttttggtttttggacaacttaggattgtgaatttgaagaacaactcgtatgtgttttagttccttgacggtaacttatttaacttccttttctgtatgatggttgcttcagaaaatttcatcactggaaagtgtttttgtgattgg

SEQ ID NO: 14386 - DNA, 2324 bp, Oryza sativa
  ref <308>: DATABASE ACCESSION NUMBER: AK064981
  ref <309>: DATABASE ENTRY DATE: 2001-12-06
gggtgtcaagctccgcctccgcctccgcctccgactccgggcagagcagagcagcagctgccgccgccgacgacgagagaagaggcggccagatggcgggcctgcggcggctgtggggggagtgggagatccgggtgcttctgctgagcagcctctcgctgcaggtcttcctcctcttcaccggcggcctccgcaagcgcaacgtcgccgcctggctccatttcatgctctggctcgcctacctcctcgccgactccatcgccatctacgccctcggcaacctctcccagaaccagaagctctgcagcaacggcccccacggcggcggcgacatgcacctcctcgtcttctgggcgcccttcctcatcctccacctcggcgggcaggacaccatcaccgcattcgccatcgaggacaacgagctctggctccgccacctcctcagcctcgtctcccagatcgccctcgccctctacgtctactggaagtcgcgcccctccgccgcgggcctcctcgtcccggccatcctcatgttcgtctccggcgtcgtcaagtacggcgagcggacatgggcgctcaagtcggcgagcatgagcagcctccggagctccatgctgacgcgccccgaccctggcccgaactacgccaagttcatggaggagtaccactccagcaaggaggccggcctgcacgccgagatcgtcatcgtcccggagcgcccccccgacgacaacatccatgtccaggaggagcacatggagtacggcgagctcgtcgtcaaggcgcaccggttcttccacaccttccgccgcctcttcgtcgacctcatccttagcttccaggaccgaaccgacagcctcgccttcttccgccgcctccagcgagatcaggcgtataaggtggtcgagatcgagctcctgctcatgtacgagtcgctccactccaaatcctccgtcatccatggcccgaccggccgctacctccgcatcttcaccctcgccgcgcccgtcctctccctcatcgtcttctccggcaccgacaaggctccctacaagccggttgacgtcaccgtctcctacgtgctcctcggcggcgccatcttcttggagatctacgccatcctcctcatggccatctcgccatggagcttcgccgacctgcggaagaaggacaagtgcctccccgtggcgagcggggtgttccgggcggtgagctacttcttgccggaggcgaggccgcggtggtcgaaccagatggcgcagtacaacctcatccactactgcctcaaggacaagccgacatggctcaccggagcgctcgagaagctcgagtgggactacaatgtccgcgtgaagacgatctgggacagtatctggtacacccaccacatcggcgtctccatggtgctcaagcagctcgtcttcaagcagctcaaggagaaggccaacagcacggcggacccgatgagctaccggcggttcggcgaccaccgcggccagtggttcctccaccggatggggtgctaccaggagctcggggccagcgtcgaggtggagttcgacgagagcatcatcctctggcacatcgccaccgacctctgcttctacgacgacgacgacgacgacggccgcgacgccggcgagaggaagctgaagcggtggtcatcttgctgcttctgctcctgctccgaccacgcccccacggcggacgacagccacctgaacgacgtgtcgcacctgccggcggcgagcagggagatctccaactacatgctgttcctgctggtgatgcggccgttcatgctgacggcgagcatcgggcagatccggttcggggacacgtgcgcggagaccaagaacttcttcctccggggggacgagctcggggcagcgaggaaggcggcggaggcgctgacgaaggtgaagacggagatcaacccgcgggaggtgaagggggaccggagcaagtcggtgctgttcgacgcgtgcaggctggcggagcagctgcggcggctggggcggcggaagcggtggcggctggtggccggcgtgtgggtggagatgctgtgctacgccgccggcaagtgcaggggcaacttccacgccaagcagctcagccagggcggcgagctgctcaccgtcgtgtggctgctcatggcgcacttcggcatgggtgaccagtacagagtcgaggccggccacgcccgcgccaagctcatcatcgagaactagccccaaattgcagccggcacataacagctgagagtttcagaattcagatcagttcagagttacaaataaattctcttttgttgctgaaaaaag

SEQ ID NO: 14387 - DNA, 1762 bp, Oryza sativa
  ref <308>: DATABASE ACCESSION NUMBER: AK064982
  ref <309>: DATABASE ENTRY DATE: 2001-12-06
gctccgaattcccaaacatccaaagaaacacccacaaagaaaaaaaaagttcggttttttatccgctttgctcacggcagcgaggaaaaaaagctggaattttttatactcgtaccacggcgagtagtggtggtggtggtggtagtacaatcccaatagaagaagaagaagaaagaataaactagcagctcaggaggcggaagcgagcgcatgagctcgagagaaagagaggcggagaagtggtgaggtgaggagaggagaggagggcgagtagtaggcgtctaggtcccatctctagggtagtagtagtagtaggcttgtctcctcttcgtcatctctcctctcctctcctctcttctcttctcttctctccgccacggcgccacccacctacccccgaggtcgctgctgctgctgctgctgcggttttcgttagaagatactctcggtagcatcagacctgcatcttggaagttcagtatgggttcaggaatggtgaagaagaaggtggtgaaggccggttctttcgatttggatgccaaacttgataaaagttggatgaaggatatcacttgtccaatctgtctggattttcctcataatgctgtcctattgaggtgcacctcatatgagaagggttgtaggccgttcatatgcgacactgaccaatcccgttcgaactgtcttgagcggttcaaaggtgctcatggactgccgaccaatatgaaagtcccatcttttaatggagcccctcttgatagcattcatatcatttcgtcaaatacaactgaccgcccagcttgcccgttgtgtagaggcgatgttattgggtgggttgttattgacgaggcccgtctgcatcttaaccaaaagaaaagatgctgcgaagaaagctgttgttcatatgtgggcaactttcatgagcttcagaagcacacccagcagaagcatccaaattcacgcccgtcagaaattgatcctgctcggagagttgattgggagaatttccaacagtcttcagatatcatagatgtcttgagcacgatacatgcacaggtgcctaatggtatagttttgggagactatgtcatcgagtacggtgatgatgatgccggagatgactatgaagtttaccacagggttagggggaactggtggacatcctgtattttctgtaagtcattctgcagatcttcaggaggcagaagtagagcaagagcaagggaaaggagaagtagtggaaggaggagcagcaataggtctagccaagaaagctttactattgaggtgccctcgggatctgttgacataagggaaatcagatttgatgaaatagatgatgaatatatagttacaggagcaatgcccggcattgcagcatccaggaggatcgccagtcattacagggatcctagatatggacgcagacgttcatactactaggatgaaccagccagctgaaatgtaatgcagtgcagccacaaccagaatattgtgcctctacccgcctctttttcttgttctctcaaaaatctggaagatgctatcccagcccaaatttggtgtgcatataagatagcagcaaacccttcattgttgttcatttacagcaggtttcaacatcttaggttcctatgtaaatatgtaaccactaccctatagcaatgttgatccaaggtttctctccgggaatccattttatcttaaaaatgtttctctggaaatacaccaaacttttacaggaaaagctcacaaatttgcc

SEQ ID NO: 14388 - DNA, 2881 bp, Oryza sativa
  ref <308>: DATABASE ACCESSION NUMBER: AK064983
  ref <309>: DATABASE ENTRY DATE: 2001-12-06
gaacgttcaactcgactcgagtcgagagagactcgtcgtcattagccatcactactagatccgccatttctctctccctccctctctctctctctctctctctctctcttgttccgtccgcccccaacctcccccacccaattcgatcgcctcccccacccagatctcgccgcccgcccgcccgcccgccatgccgtcggcgaccgaccccccggcggcgctcccgctaaccctcgacctcgacgacttcaagggggacttctcgttcgacgcgctgttcgggaccctggtggacgagctgctgccggagttccgcggggacgacgcgcccggggcgcccccgcccccgccgcccgtgctcggggccgcgccccccgtcttccccgccgtcgacgagcttctggggctcttcaagcactcatgcaaggagctcgtcgatctccgccgccagattgacaagaggctccagaatctcaagaaggaggtggccacgcaggacgccaagcatcgcaagacgctcggggagcttgagaaaggtgtggatggtttatttgatagctttgctaggttggattcccgtatttctagtgttggccaaacagctgccaaaattggtgatcatttacagagtgcagaatcccagagggaaactgctagtcagacaatagatctcatcaagtatctgatggagttcaacagcacaccaggggatcttatggaactttctcctttattttctgatgacagtcgtgttgctgaggcagcttcaattgcacagaaattgcgttcatttgccgaggaggatgttggtagacatggtgtaccatcagctgttggttctgctaatgcaagtcgtggtttggaggttgctgttgcaaatcttcaagagtattgtaatgaattggagaatagattgttagctcggtttgatactgcatcacagaggcgggagatgtctacgatggcagaatgtgctaaaattttgtcacagttcaaccgcggaaccagtgctatgcaacattatgttgcaacacggccaatgtttattgatgtggatattatgagcattgatattcaagttgttcttggtgaggaggggccacaagctgaccacatttgtattgcagagggcctctctgtattgtacaaggaaattgcagatactgtgaggagagaagcaactacaataatggctgtatttccttctccaaatgaggtcatgtcaattcttgtgcagagagttttagaacaaagggtaacagcaattcttgataaacttcttattaagccctctcttgctaacttacctcctatagaagagggtggtcttctgcattatctcagagttctggcggtagcatatgacaagacaaaagaacttgctaaagagttgcaatctatcagttgtggggatttggacattgaaggtctcactgaatccatatttgtttcccacaaagatgagtacacagaatttgaacaggcatcactcagacaacaataccaatcaaagatggctgaattgagagctgaggccaagcagcaatctgagtcaactggcacaattggacgttcaaatggagcggctgtgactacatcacttcagcagcagatatcagttactgtagtgactgaatttgttcgctggaatgaggaagcaatatctagatgcacactgttgttttctcagcctgctactgttgcagctaatgtgagatccatatttgcatgcttgcttgatcaagtaagccaatatttgactgaagggcttgaccatgctagagagagtttaaatcatgcagcaactcaacgggatagatatgtcattggaacaagtgttagtagaagggttgctactgctgctgctaatgctgcagaggcggcagctgctgcaggtgagagtagctttagatccttcatgattgctgtgcagcgttgtgctagcagtgtggctattcttcagcagtacttctcaaatactatatctcggctcctgctgcctgtggatggtgcccacccctcagcttgtgaagatatgggatcagcagtatctgttgttgaggctgctgcccacaaaggactgctacagtgtattgataccgtcatgtctgaggttgaaagattgctgtcttcagaacagaaggctacagattatcgaacaccagatgatggagctgcaccggatcatcgaccaaccaatgcttgcataagaattgtagcctatctatctcgtgttctcgaggttgcattcagtgctctagaaggtctcaataaacagtcctttttgactgagctgggaaatcgcttgcataaggggctactcaatcattggcagaagttcacatttagtcccagtggtgggttacggctgaaacgtgatatcactgagtacggggaattcgttcgtagcttcaatgccccatcgatagatgaaaagtttgaactgcttggaatcatggccaatgtattcatcgttgctcctgaaagtctagcttccttatttgaaggaacccccagtatccggaaagatgccttgcggttcattcaactcagggacgactataagacagcaaaaatcgcttccatgctaaacagtatcatggctgaatagtgtcacgtcaagaagcagtatgtttgagccgcattcacactttctgctgcctatcaaacttcaagtctatgaaatgattcagtgccctccaaatgattttgaccatccatgtcgcctgtatagcacagattcatgattatgttaattctttgggttttctttgttccattttttttccctatcctattttgggcttgcatttgtacatgctgtatcagtctctctaaatatgaccattgtaccaagtggcataagtagtatttaacgttc

SEQ ID NO: 14389 - DNA, 1084 bp, Oryza sativa
  ref <308>: DATABASE ACCESSION NUMBER: AK064984
  ref <309>: DATABASE ENTRY DATE: 2001-12-06
gactcttcgcgccgccgcagcagccgcctccactcccccacccccagagaaccctaatccacaccctctcaagccagccatggcggagcgcggcggcgagcgtggcggcgagcgcggcgggttcggccgcggcttcgggcgcggcggtcgcggcgaccgcggagggcgccgtggcgggcgccgcggcccgcgccaggaggaggagaagtgggtgcccgtcaccaagctcggccgcctcgtgaaggaaggcaggttctccaagatcgaggagatctacctccactccctccccgtcaaggagcaccagatcgtggagaccctcgtgccggggctcaaggacgaggtgatgaagatcacacccgtgcagaagcagacgcgcgccgggcagcgcaccaggttcaaggcgttcgtcgtcgtcggcgacaacaacggccacgtcgggctgggggtcaagtgcgccaaggaggtggccaccgccatccgcggcgccatcatcctggccaagctgtccgtggtgcccgtcaggaggggttactggggtaacaagatcgggcagccgcacaccgtgccgtgcaaggtcaccggaaagtgtggctctgtcaccgtgcgcatggtgcccgccccgaggggttcgggtattgtcgccgcccgcgtgcccaagaaggtgctgcagttcgccggcattgaggatgtcttcacctcgtcccgtggatccaccaagacccttggcaacttcgtcaaggccacctttgactgcctgatgaagacttatggattccttactcctgacttctggagggacaccaagttcgtcaagtctccattccaggagtacaccgacctcttggccaagccgactaaggctcttatgattgatgcacctgtcgagaacgtagaggcttaggatggcggagtaaagagagtctttgctagctcggacttgtctgatgcactttgttttacaatagttaagaaccggttgtcatccttggattgtgctgcgtctggatgtttctatttcctgtcaagttttggatcatggtactgtgatactgcttttatcaatgaatgctgcataattatt

SEQ ID NO: 14390 - DNA, 1778 bp, Oryza sativa
  ref <308>: DATABASE ACCESSION NUMBER: AK098873
  ref <309>: DATABASE ENTRY DATE: 2002-08-28
gacgctcactcctccaccgccaggtcgagctcaaacgagagagatcttttccgaatccgaggaggagaagccacagaaacgatgacctcgctgtcgtcctccgccgccgcggcgcgcgccaccttcgtcatgccgtcgtcggttcgtgggggcatgagccgcggcaggaggatggcgaggctggtgacgcgcgcggcggcgtcgagcccgaagctcccgagcgggcggcagctgcgggtggcggtggtcggaggcggacccgcgggcggcgcggcggcggaggcgctggccaagggcggcgtggagacggtgctcatcgaacggaagctggacaactgcaagccctgcggcggggccatcccgctgtgcatggtgtcggagttcgacctgccgctggacctcgtcgacaggaaggtgaggaagatgaagatgatttcgccgtccaacgtcgccgtcgacatcggcggcacgctcgcgccgcacgagtacatcggcatggtccgccgcgaggtgctcgacgcctacctccgctcccgcgccgagggggccggcgccgaggtcgtcaatggtctcttcctgaggtatgaggcgcccaaggaacccaacgggtcgtacgtggtgcactacaaccactacgacagctccaacggcaaggccggcggcgagaagcggacgttcgaggtggacgcgatcgtgggcgcggacggcgccaactcccgcgtcgccaaggacatgggcgccggcgactacgagtacgccatcgcgttccaggagcgcgtcaagatccccgacgacaagatgaagtactacgaggagcgcgccgagatgtacgtcggcgacgacgtctcgccggacttctacggctgggtgttccccaagtgcgaccacgtcgccgtcggcaccggcaccgtcacccacaagcccgacatcaagaagttccaggccgccacccgccttcgcgccaaggaccggatcgagggcggcaagatcatccgcgtcgaggctcaccccatccccgagcacccgaggcctaagagggtggcggggagggtgacgctggtgggggacgcggcggggtacgtgacaaagtgctccggcgaggggatctacttcgcggcgaagagcgggcggatgtgcgcggaggcgatcgtggccgggtcggcgaacgggacgcggatggtggaggagagcgacctgcgcaggtacctggccgagttcgaccgcctctactggccgacgtacaaggtgctcgacgtgctccagaaggtgttctaccgctccaacgccgcccgcgaggcgttcgacgagatgtgcgccgacgactacgtccagaggatgaccttcgacagctacctctacaagcgcgtcgtgccgggcaacccgctcgacgacatcaagctcgccgtcaacaccatcggcagcctcgtccgcgccaccgccctccgccgcgagatggagaaggtcaccttgtgagcctgagctgccatgaccacgaccgcgatcgaacactttgcttcattttcttgaggcattagaaactgcaatttgcggtggatcagtgtgcatgtatagtacagattcgcggctgatcaaacagatttgaacaagcgtaagtagagatggataagagagagaggctgtgtaccgatcgaccctgtccgattttcttgtacaacacaaggtgatgttcagacttggggcagtttggttggattactgaagcacaccaatcttcggtgtgaactcaatgtactactatataagctccatgtttctgc

SEQ ID NO: 14391 - DNA, 2040 bp, Oryza sativa
  ref <308>: DATABASE ACCESSION NUMBER: AK064985
  ref <309>: DATABASE ENTRY DATE: 2001-12-06
gagatcgcaggaaatcgtatctgcctacttttcgagagcttaacaagggagagctccttaattgccacgtcccgcccgctcactgcctaagcttccaagttccaacggggacatctcttctcttgcaccttcctgatttcatggatcggacaagccagtgggtctcgtcgccggacatccccgccgatcttctcatccggatcgccgacgacgtcttccctctccataaggcggtgatggtgcccaagtgctgctacatccgcaaggccgtagcggcggcgcgcggtggcgcaacggccaccgtcgacctcgacctgtccgcgctgcccggcgccgccgacgccttcgacaaggtggcgcgctactgctacggcgccaacttcgagctatccgtgcgcaacgcggccgcgctcctctgcgccgccgccttcctcgacatgcacccaacggacggcggcctggcgcgccgcgtcgaggagttcctggccaaggtaggcctccgcacgctgcccggcgccgtcgccgtcctgcgctcctgcgaggggctcctcccggccgccgaggagatcggcgtcgtgcagcgatcagctgatgctatcgcgctcaggatctgcaacgaggtgctgttcccgacgaggtcgccgcccgagtggtggacggcggagctcgccgccctctcgccggcgtcgttccacaaggtcatcacggcgctgcgctgccgccgcgctgaacccgaggtgcttgtcgctgcggcgaccgcttacgctgagctcttgctggccgaagtgctcgccgccgacggccatgctgctgatcactccgggatgcaccgcgcgcttgtcgagtccgtggtggccgtgctcccttccacggacgacgcgcccctccccgccgcgttcctctgccacctcctccacgtcgccatcaccatcggcgcatccgccaagacgtgccacgacctggagctccgcgtggcggcggtgctcgaccaggccaccgcgggcgacctgctgaccgtcgcgctcgacggcgccggtgagcgcgtccagaacgtcgacgccgtgcgccgcatcatcaccgccttcgtggagcgcgactctgcggcgtcatcgggcggcggcgcgaacggccggaaccggagggcgtccctgagcggagccggggcgctgcagggcggcggtggcgcgatgcagacggtggcgaagaccgtggacgaggtcgcggcggagatcgcgacggaggagtcgctgccgatctccaagttcgtggggctcgccggcgcggtgccgaaggaggcgcgcgcgacgcacgactgcctgtaccgcgccgtcgacatctacctgaaggcgcacccggcgctggaggagatggagagggagaaggtgtgcagcgtgatggacccgctgaagctgtcgtaccagggtcgcctccacgcgtcacagaacaatcggctcccgctgcaggccgtgctgagcgcgctctactacgaccggctcaagctccgcagcggagacgagggcggcggcgggtgggacgcgtatgggaatggcgtgatgaggtcgtcggcggcggggtcggcgaggaagcaggcgaaggaggaggcgtcgctggcgagggagaacgaggcgctgcggtcggagctggcgcggatgcgggcgtacgtgtcggggatgcagcagcagagcaaggggtcgtcgtcgtcgagggggaagaagggctcgtggttgcggacgttgagccggctgaacccgttcaaggccggcatctggggcaaggacacgtcgggcatcgtcgacgggaagacggacgccatgaattccgtcaagtccaagaggaggaggttctccattagctaggctagcttagtgttgagatgatccatgtcatctcgtgctagctacatatatgcgttgtcaatgactgtatattgattgattggttattcgcaagaaacatgactgttcttgtgtagtctactgtaaattgtaagtttgtgtccgcaaaaacgaactaatgtttggattggattggtcaaaagtc

SEQ ID NO: 14392 - DNA, 1680 bp, Oryza sativa
  ref <308>: DATABASE ACCESSION NUMBER: AK064986
  ref <309>: DATABASE ENTRY DATE: 2001-12-06
gtagcagcagcggccggccatcatcagtgatcctctacaatcatcgactttcagcaaattaagatggctgctgccttctcctccaccgttggagctccggcgtccactccgaccaacttcctggggaagaagctgaagaagcaggtgacatcggcggtgaactaccatggcaagagctccaacatcaacaggttcaaggtgatggccaaggagctggacgagggcaagcagaccgaccaggacaggtggaagggtctcgcctacgacatctccgatgaccagcaggacatcaccagggggaagggtttcgtcgactcccttttccaggctcccacgggtgatggcacccacgaggccgtcctcagctcctacgagtacctcagccagggtctcagaacgtacgacttcgacaacaccatgggaggcttctacatcgcccctgctttcatggacaagctcgtcgtccacatctccaagaacttcatgaccctccccaacatcaaggtcccactcatcctgggtatctggggaggcaagggtcagggaaaatccttccagtgtgagctcgtcttcgccaagatggggatcaaccccatcatgatgagcgccggagagctggagagcggcaacgccggagagccggcgaagctgatcaggcagcggtaccgtgaggcggcagacatcatcaagaaggggaagatgtgctgcctcttcatcaacgatctggacgcgggtgcaggtcgcatgggaggcaccacccagtacacggtgaacaaccagatggtgaacgccaccctgatgaacatcgccgacaacccaaccaacgtgcagctccccgggatgtacaacaaggaggacaacccccgtgtccccatcatcgtcaccggcaacgacttctccacgctgtacgcgccgctcatccgtgacgggcgtatggagaagttctactgggctcccacccgcgacgaccgtgtcggcgtctgcaagggtatcttccgcaccgacaacgtccccgacgaggacatcgtcaagatcgtcgacagcttcccaggccaatccatcgatttcttcggcgctcttcgtgcccgtgtttacgacgacgaggtgcgcaagtgggtgtcggacacgggtgtggagaacattggcaagaggctggtgaactcgagggagggcccaccggagttcgagcagcccaagatgacgatcgaaaagctcatggagtacggatacatgcttgtgaaggagcaggagaacgtcaagcgtgtgcagctggctgagcagtacttgagcgaggctgctcttggtgacgctaactccgacgccatgaagactggttccttctacggttctgcgccatccagctgaataaaagatctctagctattcgcatcccatcgatgcatcgtaggcggcctgcataggaggaggagggcaaggagcacagcaagcaggtaacctgcctgtgccggaaggttgcaccgaccctgttgccaagaacttcgacccaacggcgaggagcgacgacggcagctgcctttacaccttttaagcaggccggcttgacgcttgctattaattatttctcctttttatgttttctctttgttctgtgtatcagatcgcgcccaagccatagctgggcatgacaagtttttgttaataataatataatataaaggt

SEQ ID NO: 14393 - DNA, 3332 bp, Oryza sativa
  ref <308>: DATABASE ACCESSION NUMBER: AK064987
  ref <309>: DATABASE ENTRY DATE: 2001-12-06
gctcgatccccaaatcccccaaaccctagctcgccggagcagtggagggcctcgccgccgtgctgcctcttggcccctccgtgtgatgccactgagtgcgcgtgggtgggtgtgcgtgttgtagctctttcatggcgtcgcagcctcccgccgccgtggaggctcgtctcgcggatctctgcaaggagctgggagtggacgagggcgtcgccggcgaggccgcggcggtgctggaggaggggaagggcgcgctcctcgcgtcgccgtcgttcgggagcaaatcgcccgaggatgctgagaagctgtgcttcgcgttcgtgctgtactgcgtctccaagctgaaggagaccaaggcgggttcctccggcgttaggctctgggagatcttgaagggttgcaagctcaagtatgatgatttcttcaaggaatcacagcggcttgcttcaaggatcgaccaggttttgggaagccgttatgggtcagattgggaagctcggctagagctgaagcaattggagaatttagtaaatctattggcagatgcaagccggttctattgcaaagcatttaatgagctattcttgagcccaagtactgatcaggagcctggatcaactacaaatattcctgattatatccgttttgggtggctgctcttcttaattcttcgctcaaaatcacccgaactgtttaaggacctggtatcctgcatccatggactagttgccatattggccatacttttaattcacgtacctgctaaatttaggagcttcacaattgaaggttcttctcacttaatcaaacaaactgagaaaggcgtggatcttcttccatcgttatgtcacaactatcatacctctgaagaccgcttgaaagaaatgatgggaaaatcttacaaagtgatagaggtcttttttagcaggaaagcaataaatgcttcagagttcaaaacagtgaatttggataaaatagatacagatggcctgatgtatttcaaagatcttgtcgatgatgagatttttcagtcaaatttggaaaaactggagaagctaagtagtaccaccggctgccaaggggagcttgatttggaaatgtttttgaccagcaatgactatgtactcaatgctgaaaactcttctggtagttccgctaattttggctgctcaaagcgtgtgtttgaaacactagcctctcctacaaagacaataaagaatatgttggctgcccctagttccccttcatcacctgccaatgggggctcaatcaagattgtgcagatgacaccagttacttctgccatgacaactgctaagtggctacgtgatgtgatatcttcattgcccgataaaccttcctctaagcttgaagagttcctttcgtcctgcgatacggatttgacaagtgatgtagtaaaaagggtcagcataattttggaagctatttttccaaccaagtctatagatcggggtacttccataggcctcaattgtgcaaacgcatttgatattccatgggcagaagcaagaaaaatggaggcttccaagttgtattatagggtgctggaggcaatctgcagagcagagtcacagaacaataatgtaaataatttaaccccattgttgtcaaatgaacgttttcatcgatgcttgattgcatgttcagctgagctagtattggcaacacataagacagtcatcatgatgtttcctgctgtcctggagagtactggtttaactgcatttgatttgagcaaaataattgagaactttgtgagacatgaagaaacccttccaagagaattgaaaaggcatttaaattcattagaagaacagctattggaaagcatgtcatgggagaaaggttcatcgttatataattcactggttgttgccaggccatcactttctacagaaataaacagccttggtcttttggctgaaccaatgccatctcttgatggcatagtagcacggcagagtattcaccctgatggcttgccacctactccctcaaaaagatggccttctgctggcccagatggcaactgttatcctcaatcaccaaagagattatgcaccgaatctaggaactcattggtagagcgcaattcgcagacaccacccccaaagcaaagccaaacagggttaagtattttgaaagcaaaataccatcctctccaggcaacattcgcaagccccactgtcagtaatcctgttagtgggaatgaaaaatgtgctgtagtaggggtccagatcttcttttccaaaatcttgaagttggctgctattagaataagaaacctatgtgaaaggctacgacatgaagagctgactgtgagcgtctataatatctttaagcagattcttgaccaacagacagctttatttttcaacagacacgttgaccaaatcattctttgctgcctctatggtgttgccaaggtttctcaattatcattgacgttcaaggagatcgtcaacaattataagagggagccacaatgtaaaccagaagttttcagaagtatctttgttgggagtacaaatcgcaatggtggatttggatcacgtcatgttgatatcattgttttttataatcaagtatttgttcccacggtcaaacctttgctggtggctctaatgccttctagtactcgtcctgaagacaagaggaacactaatagccaaattcctggatcacccaagtcatctcctttctcaaatttaccagatatgtccccgaagaaagtctcatcttctcataatgtgtatgtctctcctctacgacaaactaagatggatgcattgctttcaccaagttcacggagtttctacgcgtgcatcggtgaaagcactcaagcttttcagagcccatccaaggatctggctgctataaatagccgcctaaattaccctaccaggagaatcaacacacgaataaacttcgacatggtgagtgactcggtggtggctggtagtctgggccaacccaatggtggttctgcctcttcggatcctgctgctgcatttagccccctctcaaagaagagcaaaacggactcttgatccaaataaatgggtccatccatctgtatagagctcataatcccacagattgtttctttggttcttctgaataagtgggtgaagcaaagtgcttctcgactgtaaatgttgtgctagtgttgtaataggctgtagcagtgtaaaaggcggctgattgtctagaattaactaatggggtgtatcatttcattccccagccgattcattaggagcgaaggctatgtaaaatgctacttctttttcagtgtgtaaataagttctgcc

SEQ ID NO: 14394 - DNA, 2685 bp, Oryza sativa
  ref <308>: DATABASE ACCESSION NUMBER: AK098874
  ref <309>: DATABASE ENTRY DATE: 2002-08-28
gacaatcacttctccccccggaatatctccgccaagagaagagaagagacacccaacaacccaaaacctagcgcctctgcgctcgaggcccccccgaatccgcgaatccgccgactcccatggcgagccagggagagccctcctcctcctccgatccgaaggggaagaaggatttctcgacggcgatcctcgagaggaagaagtcgccgaaccggctggtggtcgacgaggccaccaacgatgataactccgtcatcgggatgcaccccgacaccatggagaagctccagcttttccgcggcgacactgtgctgctcaagggtaagaagagaaaagacaccatctgcattgttcttgctgatgacacctgcgaggagccgaagatcagaatgaacaaggttgtcaggaagaacctgagagtacgacttggtgatgtcgtgtctgttcatcaatgcccagatgtcaaatacggcaagcgtgtgcacatacttccaattgatgatactgttgagggcatcaccggaaacttgtttgatgccttcctgaaaccgtacttccttgaagcataccgtcctttgaggaaaggagaccttttccttgttaggggtgggatgagaagtgttgaattcaaagttatagagactgaccctgcagagtactgcattgttgcacctgatacggagatattctgtgatggtgagcctattaagagggaggatgaggaaagacttgatgaagttggttacgatgatgttggtggagttaggaagcagatggcccaaatcagagaacttgttgagctcccattgcgccatccccaacttttcaagtctattggtgtgaagcctccaaagggcatactgctttatggaccccctggctctggaaagaccctcattgctagagctgttgctaatgaaacaggtgctttcttctttctgattaatggcccggagattatgtcaaagctagcaggagaaagtgagagtaatctcaggaaggcatttgaagaagctgagaagaatgcaccatcaatcattttcatcgatgagatagactccatagcaccaaagagagagaagacccatggagaagttgagaggcgcatcgtttcacagctgttgactcttatggatgggctcaaagctcgttcccatgtcattgtcatgggtgctacaaaccggccaaacagtattgatcctgctctcagaaggtttggtaggttcgatcgggagattgacattggtgttcctgatgaagttgggcggcttgaagttcttcggattcacaccaaaaacatgaagctggctgaagatgttgacctggaacacattgccaaagacactcatgggtatgtgggtgctgatcttgctgctctttgcactgaggctgctctccaatgcatccgtgagaagatggatattatagatcttgaggatgagaccatagatgctgagatacttaactcgatggctgttacaaatgatcacttcaagactgcactagggacaagcaacccgtctgctctccgtgaaactgttgttgaagttccaaatgtctcttgggaggatattggtggactggagaatgtcaaacgggagctgcaggagactgtccaatatccagtggagcatcctgagaaatttgagaagtttggcatgtctccgtccaaaggtgttctgttctatggccctcctggctgtggtaagactttgttggccaaggcaattgctaacgagtgccaggctaacttcattagtgtcaagggacctgagctgcttaccatgtggtttggtgagagtgaggccaatgtgcgtgagatttttgacaaggctaggcagtcagctccttgtgtcctcttctttgatgagcttgactcaattgctacccagagaggaagcagtgttggtgatgccggaggtgctgctgatagagtgctgaaccagttgttgactgagatggacggcatgaacgcgaagaaaaccgtgttcattattggtgctactaacaggccagatatcattgaccctgccttgctaaggccagggcgtcttgatcagcttatctacattcctctgcctgatgatcaatctaggctgcagatcttcaaagcttgcctccggaagtcacctgtggccaaggatgtagacctgaatgctcttgccaaatacacccaaggtttcagtggtgctgatattacagaaatctgccagcgtgcatgcaaatacgccatcagagagaacattgaaaaggacatcgagatggagaagcggaggaaggacaaccctgaagccatggaggaggacgaggttgatgatattgctgagatcaaggcggctcacttcgaggagtcgatgaagtacgcacgccggagtgtgagtgacgccgacatccgcaagtaccaggccttcgcccagactctgcagcagtctcgtgggttcggcaccgagtttaggttcgctgaccagccagcgtctggcgccggcgccgccgctgaccccttcgcatccgctgccgccgcagctgacgatgatgatttatatagttagatcgctgtgctatttatatttaacctccgtgcttttgttcagtatgtctatttcgctttggtaaactttatcatatgtaacatacggggaaacagtgtaccatttttaagttaatattttgagaggtactgaaccg

SEQ ID NO: 14395 - DNA, 3566 bp, Oryza sativa
  ref <308>: DATABASE ACCESSION NUMBER: AK064988
  ref <309>: DATABASE ENTRY DATE: 2001-12-06
gactgtgcaaccgataagagccagcctcggccttctcctccttcctccttcctgcgactgcgagcgggagcccgcggctaccaacccggcggcggcggcggcggcggagaggagaaagctgtgtggaacacggagaggtggagagcgtctccggtctcttccaaagtttccacccgaggaggagatcaaatcttggcctctcgagtcaggccccccgcgtccgcgtgggaatctttccagattcgcgcgcacgctccgtggacgcggatcgggagcggggagggggacgtaatggtggtggaggggaatggccgcgccgactcgatcaccattggcgtctgcgtcatggagaagaaggtgttctgctctcctatggagcagattcttgataggctccgtgcatttggagaattcgagattataatatttggggataaagttattctcgaggatcctattgagatttggccaaaatgcgattgcttgattgccttctattcatctggtttccctcttaaaaaagctgaggcttatgctgctttacgaaggccttttttagtgaatgaattggagccacaacacctacttcacgaccgcagaaaagtatatgagcatctggagaagtatggaattcctgtacccaattatgctcttgtcaatagagaatatccgtaccaagagttagactactttattgagcaagaagattttgttgaggttcatggaaagcgatttatgaagcccttcgtggagaaacctgtcaatggggatgaccatagaataatgatatattatcctaattctgctggtggtggaatgaaggaactgttccgaaaggttggtaaccgatctagtgaatttcatcctgatgtcaggagagtgaggcgtgaaggatcttacatttacgaggagttcatgcctactggtgggacggatgttaaagtttacacagttggcccaggatatgcacatgctgaggcacgtaaatcaccagttgttgatggtgttgttatgaggaaccctgatgggaaagaagtacggtatcctgtgcttttgacccctacagagaaacaaatgtcaagagacgtgtgcagtgcttttaggcagatggtttgtggttttgatctcttaaggtgtgatggaagatcatatgtttgtgacgttaatggatggagctttgtgaagaactcgtacaagtattatgacgatgctgcatgcatcttacgaaagatatttctagatgcaaaggcacctcatctttcttcaaccatccctccaagccttccttggaaatctaatgaaccagttcagcccactgaaggtcttacacgacaaggaagtggaataattggcacatttgggcagtcagaagaattacgttctgtcattgttgtgatacgccatggcgatcggacaccaaagcagaaagtgaaattgaaagttactgaggaaaaactcctgaatttgatgttgaaatacaatggtggaaagccaagagctgagacaaaactgaaaagtgccgtgcaactacaagacttgctagatgccacaaggcagcttgtaccaccaacaaggtctggccgggaaagtgacagtgatgctgaggatttggagcatattgaaaagcttcgtcaagtcaaagcagtactggaggagggtgggcatttctctggtatttatagaaaagtgcaactaaagccactgaaatggattagagttccaaagcgctgtggtgatggtgaagaggaacgaccaattgaagcactgatgattctaaaatatggcggtgtactcactcatgctgggagaaagcaggctgaagagttgggtaggtttttcagaaacaatatatatccaggtgaaggaactggtttgcttcgccttcatagcacgtacagacatgatttaaaaatatacagttcagatgaaggccgtgtgcagatgtcagcagcagcatttgccaaaggccttcttgatttggaagggcaactaacacctatactggtctctctagtaagtaaagactcatctatgctagatggattggaagatgctagcatcgagatggatgaagcaaaggctagattgcatgagatcatcattacaaatgctaaagcaaagaataccaatgaaccagtggagtttccatggatggttgatggtgcaggattgcctgcaaatgcttcgcagcttctccctaagatggccaagttgacgaaagaagtaactgcacaagtcaagctacttgctgaagatgaagatgagaagcttgcattaacaaactcgttttctagatatgaccaagcaaaggcttttggaaaaacaacaattgatgtagctcgtattgctgccgggttgccttgtggtagtgagagcttcctcttgatgtttgctcgatggaaaaaacttgagagggatttatataatgaaagaaaggaccgatttgacattacacaaatcccagatgtctatgactcctgcaaatatgacctcctgcataatgcacatcttaaccttgaaggtttggaagagcttttcaaagttgctcaacttcttgctgatggcgtaattccaaacgagtatgggatcaacccaaagcaaaaactaaaaattggctcaaagatagcacgtcggttacttggaaaaattttaattgatctacggaacactcgtgaagaagcaataagtgtttcagatccaaaatttacagaagatgaagctacattcttaccaacgaaagaatcagagtaccaacaaaaacttcaaactagaaatgaggatggaagaagatctagttccacaagtgagaaatcattggatcaggaagatgaagatgatagagaaactaaataccgcttagatcctaagtatgctaatgtaaagacacctgacagacatgtccggacaaggctttatttcacatcagaatctcacatacactccttaatgaatgtccttcgctattgcaacttggatgaatgtctacaaggggaggatagccttgtctgccaaagcgctttagaccgactgcatagaaccagggagcttgactacatgagtaatattgtgcttagaatgtttgaaaatactgaggttcctttagaagatgagaaaaggttccggattgaaatgacatttagtcgtggtgctgatcttagtcctctagaggataaaaccagtgaaaatacttccttgctccaggagcacaccctgccgataatggggcctgagagactgcaggaagttggttcctgcctaacactggacaagtttgagaaaatggtgcgaccatttgcgatgcctcctgaagacttccctccagctgctgcgccacaagccttttctggctacttcaaaggctctggaatgcttgaaagactcgctagtctctggccttttcacaagggcgcgactaatgggaaataagtgaaaaagctacaaaatggtagaattgatccatgtgaatatttctcaacttttagcatctggtggcaacaccatttgcccaattttggtaactttgtcgaatgtttcagagactggatcctttataaatgctcttgccc

SEQ ID NO: 14396 - DNA, 1465 bp, Oryza sativa
  ref <308>: DATABASE ACCESSION NUMBER: AK064989
  ref <309>: DATABASE ENTRY DATE: 2001-12-06
gatgtgtatgtgtggggtgtgtggggttataagaagtgggtgtcctgaaaggctactctgcaccccaagtgcttggattttgcagctgctcccctgatccggttcagataggctcttcttgacaggatcaccatgtctgcctttgtgggaaaatacgcagatgagctgatcaagacggccaagtacatcgcgacgccggggaagggcatcctcgccgccgacgagtcgacgggcaccatcggcaagcgcctggccagcatcaacgtggagaacgtggagcccaaccgccaggcgctccgggagctcctcttcacgacgcccggcgcgttccagtacctctccggcgtcatcctcttcgaggagacgctctaccagagcacggccgccggcacgccgttcgtcgacgtgctcaaggccggcggcgtcgtgccggggatcaaggtggacaagggcaccgtggacatcgccggcaccaacggcgagaccaccacccagggcctcgactccctgggcgcgcgctgcgccaagtactacgaggccggcgcccgcttcgccaagtggcgggccgtgctcaagatcggcgccgccggcgagccgtccgagctcgccgtcaagcagaacgccgagggcctcgcccggtacgcgctcatctgccaggagaacggcctcgtccccatcgtcgagcccgagatcctcaccgacggcgcccacgacatcaagacctgcgccgccgtcaccgagcgcgtcctcgccgccgtctacaagtctctcaacgaccacaaggtcctcctcgagggcaccctcctcaagcccaacatggtcacccctggctccgacagcccaaaggttggcgcggaggtgataggggagtacacggtggcggcgctgcggcgcacggtgccaccggcggtgcccgggatagtgttcctctccggcgggcagagcgaggaggaggcgtcgcagaacctgaacgccatgaacaagctggaggtgctcaagccatggacgctcaccttctccttcggccgtgccctgcagcagagcaccatcaagaagtggggcggcaagaaggagaacgtcgccgccgctcaggctgccttcctcgcccggtgcaaggccaactccgaggccacgctcggcaagtacggcggcgccgccggcgacgccgccacgtccgagagcttgtacgtcaagggctacacctactagaattcgtcccaatcactgggtggcgcctatgcggccgtgcctatgacagtagtagggtctcggtccaatccgcgtggcccacgtggcggtgcggattgcatcaagattcgtgcggatatacatgtgttcctttctgctgtatactctcgattctctgcttccttcccctctagctcttatattttaacaaaagctgcgtctaaatgttcatctctttgcagtttatttgcaatgcaaactaatatgaatacttctg

SEQ ID NO: 14397 - DNA, 3272 bp, Oryza sativa
  ref <308>: DATABASE ACCESSION NUMBER: AK064990
  ref <309>: DATABASE ENTRY DATE: 2001-12-06
gagttgcatttcccatttcgattcgagactcgaaaacccaccacccctctctccctccctctcgctcgcctcggctcggctcgccgtctgtctctctttcagatcacatcaaagcgggcaccagcaccagcaccagcaccaactcctctctagggtttggtaaaaacctccatttcctccgcggatcgaagggaggctagggttccgatcgagaggggaagctttcgggtactcgtttcagccatgatgtcgcggtcgtacaccaaccttctcgatctcgcggaggggaacttcgcggcgttgggcccgggaggcggcggcggcgggaggcggaggtcggggtcgttcgggctgaagcggatgtcgcgggtgatgacggtgcccgggacgctgtcggagctggacggggaggacgactcggagcacgcggcgacgaacagcgtcgcctccgacgtgccctcgtcggtggcgggggatcgagtcatagtggtctccaaccagctgcccgtcgtcgcacgccgccgtcccgacggccgcgggtggtccttctcatgggacgacgactcgctgctcctccagctccgcgacggcattcccgatgagatggaggtgttcttcgtcggttccctccgcgccgaaatccccgtcgccgaccaggaagaggtctcccaggcgctgctcgatcgcttccgatgtgctccggtgttcctccccgaccccctcaacgaacggttttaccaccgcttctgcaagcgccacctatggcctctgttccactacatgctccctttctcctcctccgcatccccgagtccctcctcctcctcctcctcctcctcctccccctcatcctcatccggcagtggccacttcgaccgcggcgcgtgggaggcctacgtgctcgcgaacaagttcttcttcgagaaggtcgtggaggtcatcaacccagaagacgactacgtatgggttcacgactaccatctcatggcgctgcccaccttccttcgccgccgcttcaaccgcctgcgcatcggcttcttcctccacagccccttcccctcgtcggagatctaccggaccctccctgttcgcgaggagatcctaaaggcgctgctcaattgtgaccttattggattccacacttttgactatgccagacatttcctctcttgttgtagtaggatgctgggaattgaataccagtcaaagcgtggatacattgggttggattactttgggcgtaccgttgggatcaaaatcatgccagtgggagttcatatgggtcaattgaagacggttctgagcttgcccgacagggaatggagggtctccgagctgcagcagcaatttgaggggaagactgtgttgctcggtgtggatgacatggatatcttcaagggtatcaacttgaagcttcttgccttcgagaatatgttgaggacacatcccaagtggcaggggcgggcagtgttggtgcaaattgctaatccggcccgtggaaagggtaaggatcttgaagccatccaggctgagattcatgagagctgcaagaggattaatggagagtttggccagtcaggatacagccctgttgtcttcattgaccgtgatgtgtcaagtgtggagaagattgcctactacacaatagcagaatgtgtggtggtgactgctgtgagggatgggatgaacttgacaccatatgaatatattgtctgtaggcaggggtctgactccacatcagaagtgaatggaccaaagaagagcatgctggtggtatcagaattcattgggtgctcaccatctctgagtggtgctatccgggttaacccatggaatatagaggcaaccgcagaggcactgaatgaggccatatcaatgtcggaacaggagaaacacctaaggcatgagaaacattaccgttatgtcagcacccacgatgttgcttattggtcgaaaagtttcatccaagatttggagagggcttgcaaggaccacttcaggaggacatgttggggcatcgggttggggtttggttttagggtggtggccttagatccccatttcacaaagcttaacatggattcaattgttatggcttatgagcggtcagagagtagggctatatttcttgattatgatggaacactggtgccacagacttccatcagtaggacacctagtgcggaagttttgaggatcatcaataccctgtgctcagataggaggaacaaagtttttcttgtcagtgggagacgcagggacaaattgggagaatggttttcctcttgtccagatctgggcattgcagcagagcatggttacttcttaaggtggactagagacgaagagtggcaaacatgtacccagacctctgacttcgggtggatggaaatggccaagccagtgatgaatctgtatacagaagcaactgatggatcttacattgatcctaaggaaagtgctttggtgtggcatcaccaggatgctgacccaggatttggatcctcccaggcaaaggagttacttgatcatctggaaagtgtattagcaaatgaacctgtttctgtcaaaagtggccagttcattgttgaagtcaaacctcagggagtaagcaagggagtagtagctgagaagatactcgtctcaatgaaggagagaggaaagcaggctgactttgtattatgcattggtgatgacaggtcggatgaggacatgtttgaaaacattgctgataccattaaaaagggtatggttgctacaaacacatcattgtttgcatgcactgtgggacaaaaaccaagcaaggccaaattttacctggatgatacgtttgaagtggtcaccatgctgagcgcactggcagatgctactgaaccagaacctgagactgatcttaccgatgagtttgatgaactggccgtgtctgtctcctcagttgatattgatgatgaacaaacgcccagtgataaactgatcggaggatagtagtcaaggttgcttatatctgcagattgtcatgattaattcaaccatctctatacaatttttgatgaatgtgaaagctgggtactcaaagaatgactaacaccaggccctacgaatgctccagtgtgaagttaataccgtggagtgctcgattctccactgggggcaaaagccaatacaatcttgtgctggaaaagtaggtccatatgtccatagctgacttcacttttctttgcacgtttctgttttaactttttccatatcaagtaaaatggaaagcttcacgg

SEQ ID NO: 14398 - DNA, 1024 bp, Oryza sativa
  ref <308>: DATABASE ACCESSION NUMBER: AK098875
  ref <309>: DATABASE ENTRY DATE: 2002-08-28
gaggagcagcaacgagaaaaggcggaggcggcggcgcaaccgacaaggaaaagcaaagcgagagcaggaaaacctcgccggcggcgacaccaccaccaccagcaggcagggatggcccggtacgaccgcgcgatcaccgtcttctcccccgacggccacctcttccaggtggagtacgccctcgaggccgtccgcaagggcaacgccgccgtcggcgtccgcggcaccgacaccgtcgtcctcggcgtcgagaagaaatccacccccaagctccaggactccaggtccatgcgcaagatcgccagcctcgacacccacatcgcgcttgcctgcgcggggctcaaggcggacgcccgcgtgctcatcaaccgggcgcgcgtcgagtgccagagccaccgcctcaccgtcgaggaccccgtcaccgtcgagtacatcacgcgctacatcgccggactgcagcagaagtacacccagagcggcggggtgcgccccttcggcctctccaccctcatcgtcggcttcgacccctacaccgagaagcccgccctctaccagaccgacccatccggcaccttctccgcctggaaggccaacgccaccggccgcaactccaactccatgcgcgagttcctcgagaagaattacaaggacacctccggcaaggagaccatcaagcttgccatccgagccctccttgaggttgtcgagagcggtggcaagaacatcgagattgcggtgatgacacacaaggatggcctccgcgagctggaggaggctgagatcgacgagtacgtggctgagattgaagcagagaaggctgccgccgaggccgcgaagaagggcgccccgaaagaaacctgacctgatcatcatgattcagcaaagcataatctctcttagcatgtgttgtttcttttctgttcttgtttgagaggaacgcagaactgtttggttcaactgaagtggatatggctatttgctgatcagcctacctggagtaaatcctcatgctatatgctttgcg

SEQ ID NO: 14399 - DNA, 2272 bp, Oryza sativa
  misc_feature (2230)..(2230): "n"=any one base of a, t, c, or g
  ref <308>: DATABASE ACCESSION NUMBER: AK064991
  ref <309>: DATABASE ENTRY DATE: 2001-12-06
gagtaaacatctctcttgcctctctctccatctgactgctcgaccagcagcaataggctctggtttcctcttcttgcaagttgcatgctccctagtccctagacttgaacagttgagcccttcctgattttgtggttctagaccacctctggcttgcagcgagaagcaacgttcgctcgcatgacgttccagctccaagattaggtaggttcttggtttcctccggattttccagcttcgtttccatgatctttgagaaaagtttgcgaatgcactttgtcgatttttttaaactgcagtagaggtacgctgatatcagaggctaaatatcggatgacgcattgcaattgcaaccctttcctaagtttttttctttctttctgatggcacaagttggaggaactgttctaaacacagaataatactacctctttcgatgcgaaaagtatgccaatttggccgtacattacgccaagttgtgctcttgctctgatgttgatcggtcccctacgaaccaagggataagagttttgcttccttttgtccctccactgtgtttgcgttcggtgtggtgctgcgcgccagcctgcagaagaagaagaagaagaagaagaagagaagatagtggtggtgggttcaatcagagcggttcttggtgtctgaagaaacgcacaaagccgaagtggaaggaagaataaagggtgaggtgagctaagtcgtaggctgtctgccgcgcgcgtaccatgggttgtgggctgtcgagggagaaggacgccggcggcggcccacggcggcggccggggaggcgtcggcgacgtggtcgtgttcctcccggggctccgggtgccgaggagcgtggacttctcccaggcgctcgccggtcgcctcgacgaggcctcgtcgaggctgtcgtcgctgcgggcgcgggtcgtcgacatggcaatgcaagaatcggcggcggcgctgaagccgaagcggcgggcggcggcgcggcacggttcgagcactgctaatctcctacaggctctggaagactatctgccagtgctgctaggattggtgaaggaaggtagcgaattgcggcacggagtgcacttcgtctggactaaccaagaggataatgctgaggaaacggccatggcagatgcatggtatgaagtgttgtccgttctgcatttgatggccatggtctgcttgttgcaggccaattctctgcttcttcccaggtcatacggatggttatgcgccaagggtttctgaagagagcagacgagctactgttgatgttttcttgaaggcatctggctacctagactgcgcaattagacaagtactaccccaaatatcgtcggagttaaggagacaacttccagtagatctggctgaaggaaatctcaaagctcttagcctgcaagctctgggtcagggagtcgacatgcaacttggtctggcaattgatagcccaaaggccactctagcggtaaaacggcgcttagcttgcgagatggtcaaatattggcatcaaattcaggagagcattccagaaattccggtatcagatggatgggggaaaaagcatttattgtttgttaagtggaagtatgttgaagcaaaggctgcagcatactatttccatggtttgattctagacgagggaaacacagagaaatctcatggaatggcagtagctgccttgcaagcttcagaagaatttctgaaagaaagcaaaagggcttctgaagccttccatgcaactcctccaacatcaaggagccccactcctttcggaacagctaagtacatgcttgacaagattccaaaagatgcttcaagcaaggtcaagatcaatcaggacctgtatacgcaagagagggtcattggaacaccgcctccattgccggattttgcgttggctctaaaacctgacgactacgatcttcctccattagatccactttggaacaaagaagacagccgtcagtagcagtatattcagcaagaatgtgaatgttgtctttcagaggttcaggctctagtataccatgtcgaagccagacgtggtacgaatgaagtgtacaaaatttgtcccaacaaattgtggtgtcagcaaaatttaaacaaggcctggagataatctcaagagcattgtacaggcgaatcttattctgacaaaggaaatgctttgccaaaaaaaaaagaagaaaaaaactaaccatttcaaaagattccnaaaaagaaataaaaaatataaaacatttaaaaaaaatcaaat

SEQ ID NO: 14400 - DNA, 2840 bp, Oryza sativa
  ref <308>: DATABASE ACCESSION NUMBER: AK064992
  ref <309>: DATABASE ENTRY DATE: 2001-12-06
ggctcgccgccattgctcgccgcggcgagagcacgcgaggtcacgaggaggagaagaaaaagcggaatcgagaagctaccaaacgcgagcggagatggggttacctactgctgctgcgcccgcgtgctgcttcccctccacttcgtcgtcgtccccgcggctactgctcctcccgctccaaccaccaccaccacagccgccgcggcgacggcggcggcttgtttcccccggggtttgcttcggttctccgctgccgctgcacgcccgcttccactggccccacgcggtggcatcctcctccatgcgccgccgcgggcggcgacgcagggccacggcccctcccgccgcggcagccgcaggggaggccaccggcgacggcggcggctctggtcccggcgccgaggataagagagttgaaacggacctcaaaacacttgctagaagattttggaaagttgctgccccttactggtggtcagaagataaagtgcaagcgaggctgaggcttgctgcagtatttgctcttacattagcaactactggaattagtgttggatttaactttctgggtcgtgacttctacaatgcccttgctgacaaggaccaggaacaatttaccaagcaactgctgtattacttgggaggttttgctgtaggaataccgttctttgtcttgagagactatgcaagggagaccctttctttaagatggcgatcttggatgacaagttattacatgaagcgctactttaaaaatagaactttctataagattcaatctcaatcactaattgataacccggatcaacggatcaatgatgatctcagtgcattcactggaaccgcgcttgcattttctctgacatttttaaatgctgccgtggacttgatatcattcagtaacatcctttatgggatctatccaccattattcattgttcttattgtctactcccttgggggcactggaattagtatcttccttggtaaaaatttggtcaacttgaacttcatgcaagaaaagaaagaagcagattttcgttatggacttgtccgagttagagaaaatgctgaatcaattgctttttatggcggtgaagaaaatgaattgcaacttttgttggatcgattcaggagggcttttgaaaaccttagcgaattgctaatagcatctcgtaatctggagtttttcaccaatggctaccgttatttaatccagatcctgccagctgcagttgttgctccgatgtacttctcaggaaaaattgaatttggagtaataaatcaatcagtgtctgctttcaatcatatccttagtgatttttctctcattgtgttccagtttcagtcaattagtgcattctcggcggttattgatcgtctaggtgaatttgatgatctgttggatggaaatggttcatctttatccaagcctgataacattgatgggatcaacataattttcaagagcactggtcctactgtactgagttccaatggatcaccgacacaatctaatccatccatggttcttgagatttgtaatttgacattattaacacccaggagtggaaacattcttattactgacctcactatggaactcaaagaaaaggaccacctactggtaatggggcccagtggaagtgggaaaacctctttgttacgtgctttggctggcctttggaccagtggtactggggacatcatataccatgtgagaggttccatggagcttcaaacatcaaattcaggtcctgatgagccatccaacatacagtcaaacggtgaagaactgctacaaagttcaaagcagagaagggataatggtatattctttgttccacagagaccatatatggttttgggaacccttcgtcagcaattgctctatcctacatggactgaagatgtttgtcattcatcaaataatgatcctcaaagtacagaccctcttacctttgaagtctccacatcagatggagttggttccaagtctgagatgcccacaactgatgaactgatcagagtacttgaggctgttaagttaggctatatattgcctcgtttcaatggtttggattctatgcatgattgggccagcgctctctctctgggggagcaacagcgtcttgcatttgctcggttgttacttgcaaaaccaactttagtcctccttgatgagtccacaagtgcactagatgatatgaatgagcgtcatctatacagtcagattgaagctgcagggattacttacataagcattggtcaccggaaaacactgcacaagttccacaacaaggtcttgtacatttcaaattccgattcaacggatagcaacccacgtaattggtacctaaagcccacagaacagatgtcgattgaagagtcatcctcatttgcttcataagaatttcatgatttgagcaacatttgcccctgagcagttttgtcgcaagatttcacccatacgtgaagtgtatggtgcccagccaagtacccaaaatatgtcatgctgattgttctaaagatgtgatgcttgagtagttgagttgtatgaccaaaattgctagtatgctacaaaccaactcgaggcgtggcacagattttagcacctaaaggttgaaagggaagctcatctgttcttggatcgttataccacgaagttcagaatgaacatcatatgtagatatgcagtcctctgatctttttgagtttcttttagaaatgacgacggaatatctgaaactgtctctttgttattacgtgtgtggtgtgtccttgtaactatactgggaattacagctcttatatacatgcagtgtgtgcagactccgacc

SEQ ID NO: 14401 - DNA, 2608 bp, Oryza sativa
  ref <308>: DATABASE ACCESSION NUMBER: AK064993
  ref <309>: DATABASE ENTRY DATE: 2001-12-06
tatccgccgtcgctcccgctctagcgccgccgtcgcaatcaccttctcccccaatcgtatctgccgctgcttccgctctccaccttcacacagtcgaccgacgtcagtagtccgctatcgatgcagcgtctggcgtttggatctgctcgtctccgccgccggttacgccgcctctccgtcgatctcctacgtggtcccgtttgctccatagcggactccgcctgcaagtccgccggccatcgcatgatcctgacggcagctagatccagtaccctgtccacccgtctctccttcatcaccgagggacatcacaatctagaaaaggtagacaaaaaatcgtatgtggcgtttgattaccggagattcccagaaattgtgtgtgaggtttggaagttctcaagtctgttggtagccattcgtttgtgtagcaagtaagcaacatttgctaggacagggcatttgtcgtaatcaggctatcccttgtcgcaggttgcagctttcacgaacatatatcagtaaacatactgctgcattcaatcaacatattatcttgtcatctccatatttacacgagggattagttagcttgttcagtgctggtatgctaaactatagacgcatttgattttacatactgcctgctgcatgtacctgggaataatgaacattatttgctgccaatttcctttaacaaccaattttcttcctttagtttccttcaatattataatttgtgtttgtctttgatcttaaattaaaatcaggccatatggttgcatgaaatcaggcccatatcaatacttatgtctccataaattatatatgtatatatatgttctctcaaatacttatagaagattaataaaatgtcatcttaggaaattaatttttctaccattccatgtacacttagttcagtaccgatgattgaatagtagtgcatctgcattattttattctttctgttcatgaaattcatattattgcagatcatttcggtacatgataactattgctcctcgaagactgggtcgccgttgaaggctttcaattttggcaagttctgaattcgagctcctcgaatactgggtcgccgttgaaggctttcaattttggcaagttctgaattcgagctcgatgaccgggtccttgttgaaggctttcaattttggcatgttctgaattcgagcatgggagtgcaaccatgatcattcgcatgacctgtcactgactcactgtcacttaacctgtggatgcatggatgggccaacggttgtcttgtcagatagatcctatgggactgcccctatgctcatcttcctccatctgtggagcgacaagtacctttgctatattccttttttagatttacaaatcaattcctaaaaaaagaacttcagtacacaaatggtctctctgaaccatgaatttttcttcagttaaaaatggaatagatatactacgtgaagaaatcatgcttataaatctctaatctctcccttgtatggctgaatgattgatttgttttgaaaggcattgcgataattattgtatatttgcactgtggtagattcataatccatacttattttctgaacatgttcacattggactactttttggatgtttagtatagtgcatgctgccatgtaccagcaggcatgtggagaagcatttgtcttcataacttgcaaatatgtgaaatatcaattgaggggtagtggagcgtatatagaaattgaggggtagtgaaatatgtttttgcaggaatttagcaaatgttctctttaacaactgaaactcatttgttgggggttgactgggtgtaatgcaactgaacgaatctagacaaatatattgattttccggaaactgtttttcatcaaaatattacgttgcattgtccatattaccttgatagtgtcatgttgctcaaccaaattaccatgtttacgccttttctttttacctgatgttctgcttattttgctctatggtagtgattatatgcaactacgccagtcctgtcctctgctttacattattcatattactagagattactagactgtttatgtttccaaagagcagcagcgtgcgaatagagatatttaggtatatgatctttgtatcatatattcatgtatcatgtattcagtagttaatattgtggcaaactcttaggctgaatctgggcctgcttgaaagcttggtccatagatcagaaagggtttttttggacccacgaaaaatacaagtgtaatatacttacctgtgtaaagaattttgatgctgtcaatctagaaaaatagatactcttaagtaaccaatacagacccactaacagggtggataccagggtgacggtcgcctcagattcggagctgagggaatggtgtaggaggaagcggatggatcgagctgctacacccccgcacttcgctgtctcgatgtgccccgtcattggccgcttcgccatggcggcggggtgacgagattcttaagtgtatcacgaatactcaaagttatattctatattgtaccgattaccgaatattttttttatttctctatgaccacaacaaattaatggaataattctctaccg

SEQ ID NO: 14402 - DNA, 2529 bp, Oryza sativa
  ref <308>: DATABASE ACCESSION NUMBER: AK064994
  ref <309>: DATABASE ENTRY DATE: 2001-12-06
gagatcatccaaccaatagctaaccacgaaagtgcaagtgagactaaccttgtacctgtagtgagtactggtgatgatggctgcgagtaacggagaggaacctcctagcacatccatggcaacaagttcttctccattgcccatggtcgctcaactgatggtcaccacagaccgtgctgtaagccagcagctgaaggatctagtgaataaggaaaactccactaccatggtggcggcgttgtccttaagtagagaggcttatgaggtggcgatggcgttgaagaacggggaggagcatcggcaagggagatgcagcggcaagggagatgcagcggcaatgttgatgatgatggcgtccaaaaaagaagacgccgcaaagccttccactgcgtccatgaaccccctgttgctatcactagcatcgcagggtcgtctaaatgattatgatgcagagtcgggcatggatctggacggggtcaccactgaagggaacactgcactccatgttgtggccacctgcggtgatggcccgggctacttgaggagtgcaggcgtcatctacagcaggtcccaacatctcatgttagtgcagaacaacaacggtgacacacctctgcactgcgctgtccgggctggccattccaaaatggttgatcatctaattgatctggttgaaactaaggacaactcccctagcagcgcgacactggaggaactcctgagaaaggaaaactgccgtaaggagacggcctttcatgatgccgtctgcattggaaataaggatataatcaccaaccttcttaaatattattcagaattggccggcttccttatggatgcaacaggtacttcaccgttgtacctagctgtcttgcatcaacaggtcgacattgcaaagttattgcatcaaatgacagacgggaatctttcgtactctggcccaaatagacaaaatgcattgcacgcagccgttctacaagaccaagtgatgaccaaaatgttgttgaactggaacaatggcctcacagagcaatcggacgaaaatgggagcacgccactccatttcgctgcatcacttctacggagaggaatatacaatacggtcatccctgtgctgagagccaacccagttcagttgtataagcaagactctgaaggattgtaccccatacacgtcgctgcctcctccggtgccaatctgacagtcaagtcctttattagagagcgacctgagatcgctggtttacgcgattctaaggggaggactttccttcatgttgccgttgaaagggaaagatggaatgtagttgtgtatgcttgccatactcaatcgttggctaggattttgaatatgcaagacaacgatggaaacactgcattgcacatagcagtgaagcatgggaataaggctatcttctgttctctactgatgaataaggaggtaaacttaaatatatcaaataataaggggcaaactgctttagatatatcgcagagtaagattcttgcaggatatttctatggatggaaccctaacaaactgatattgcgggcactaacgttttgcaatgcaagaggtggttgtcgtcgggtagatcacctgcaggaacaatatattattcatcaaaaacaagtagatgaagtgagggaatcggacaaaatgacaaattcaacacaaactttgggtattgcctcagtgctgattgttactgtcacgtttggcgtaatgtttgccataccaggaggttacaaagcagacgatcacaataatggtggcacaccaacacttgctggaagttatatatttgatgcattcatcatggctaacacaatagcattcatttgctcgagcttggctatcatcaacctcatgtactctggaatgcctatggttagtctaccacttcgccgtcggcactttaacatatctctactcctggccttcagttcagtgacaagtttgggtactgcctttgcactaggtatgtatttagtgctggccccagtgactcgatgcactgcaattgcaatctgtgcaatgatgatgattgcatcactgtgcttatatacggagcctttaaatggcgttcgttttgcaatagcactatatgttaggaggggcaatcgggtattgctagttattgcacagattctacttattcgaacgctaattacatattggccctgtgtgataatctttggctgggcagcgatttcaacaaaagatgggcacacaagacatggatgagtcgtcattagatgcacccgaccagagagacagagagatgaccaaaagtatgtagtaagtttgaaatttaatctatatttgtagttgccaatcattattcacgtgatatctctccagaattaatatttgattcgaaaaaatatgtagctacatgctgtgctcagctcagatattgtaatttctttttgttatttctatttttaacattcagaccctgttaatttccttttattaaaccatcatggtacgtactgtcaatgaatacttgaggcctgttcgcc

SEQ ID NO: 14403 - DNA, 1211 bp, Oryza sativa
  ref <308>: DATABASE ACCESSION NUMBER: AK098876
  ref <309>: DATABASE ENTRY DATE: 2002-08-28
ggtctcctctcgtctcgtctccccgctagggttcaggccatggcgcacggccgcgccgccgccgtacgccgccccaagtcgtcgtcggcgtcgtccgcgggggcggctgccgaacggaagcggaagcgcgccgccgccgccaagaccgtttccctcaagaaccagatccgctccaccgagcgcctgctccgcaaggaccttcctaatgacattagggtagctcaagagaagaaactggaagaattgaagcggcaacaagagcttcagaatcaactggctattcaacgaacagttcagctgagagatagaaagataaaattctttgagaggcgaaagattgagaggatgatcaggcgccttgagaagcagcaacgttcaaatgccgatgatgccagcaataaactgtcaaaattaaaggaagatcttgagtatgttaggtttttcccaaagaatgagaaatatgtctcactgttttctggagggaataccccagatatgttagagaagaggaataagtggcgtaaacagataaaagaaaatttgatggctgctgcagaaaatggaaaagacttggaagagacagcaagcgatgatgatactgtggatgtgagtgatgacgacttcttcatgtcggggagttcaagtgatgaagaggctgatgatgaatggactgacaaaagtgccaaagaaccagcttccagtgcttcaggtaaggcagcgtctggcatgtcaagcgatgaaaagaatcagcgtcagagagatgctcgagttcttatgccaccacctcgttcattagcaccaaatagaactagaccaggggtgaaacacgtgttatccagctcaagcaatacttcaaatagcacaagtggtggcactttcaaaaataggagagcagcaaatcagcctggagatcataacagcaacctgagttcaaattctgatgctcataaaccacgtcgcaaaaggagacatcggaagaaaaagaagctggcatgaatattctggagcgtgaggtggaagctgattttattcccgcaccaaagtgtgtactaaggctggttactatcaaaagaatggagacaacatgtgtgccctgaggaagttgctgattttgtgcgccctctctcgatgtaaaatgaatctcctatcgctcttcactcaatcactcatttgttttacagtaaccatccaaaaagttccgattattaact

SEQ ID NO: 14404 - DNA, 2181 bp, Oryza sativa
  ref <308>: DATABASE ACCESSION NUMBER: AK064995
  ref <309>: DATABASE ENTRY DATE: 2001-12-06
gggcttcggcttctctctctctctctctctctctcctcgaaaaccccaacacacacaacgcgaaccccactccgcgatggcgtccgccggcgatcgccgcggcggcggggggcctcccggctccggcgacgactccgggggtggttgggagactgttgagaagagggtaaagaaaccagcgcaacaagttgggaaggggcaatggggacaatggaattctccaaatgctgcacctgcacctactgcaccacggagtggctctggagcttttcatcattctggaaacactttggttcgacattctgatcgtaggccagcaagaggcactcctaggccaccaccacaaaacaggtctatagaggcagaactgcaagcaccgcacggagttgtgactgcacctctggcaaatggttggcagtggggagccaggtcttgcccacctggtactgaaagcaaggagggtggtcttcctttgtctggttgtgatcctgaaacagacaatgctgaaggttatgacacatcggacgatgataatgatgatgatatgagtgacgatttgagtgatgactatgattctgatgcaagtgagaaaagttttgagactcggaaaaatcacaagttgttcaaaggtttcttcgaagtcctggaggcgttaagtgtagaacagttaaatgaaccaactaggcaatggcattgcccagcatgcaaaaatggacctggtgcaattgactggtacaaagggctacaacctttgatgactcatgccaaaacaaagggttctataaaggtcaagcgtcacagagaattggctagtttattggaagaagagctatctcgcaggggaacttcagtggtaccatctggcgaacaatttaggaaatggaaaggattgcgggaaagcactgatcgtgagattgtttggccaccaatggtggttgttatgaacactgtattggaacaagatgaggatgataagtggaaaggtatggggaaccaagagctaattgattatttcagtgaatatgctgcaagcaaagcacgccatgcctatggtccaaatgggcaccgtggcatgagtgtgctaatctttgacagctcggctgtgggctatatggaagcagaacgtttgcatgatcactttgttcgtcaaagaacagacaggaatacatggaacagtgctcaccaaggttacattcttacctggtgggaaaaggcagctgtatggtttcttagctacaaaagatgacatggagacattcaatagacattgccacggaaaatcccgtttgaaatatgagatgagatcttataatgagatggtggttacccaaatgaagcagatgagcgaagacaaccagcaactgaattacctgaagaacaaaatggttaagaaagagcagcactctaaattagtagaggatacattgagtgttgttacccagaaacttagggagacaatggaagagaatactattgtacgaaataaagccaaagaaaagcacttggagtatgagaaagagatgaagtaccaggaggaatttttccatgatcaaatcgaaaaaaattcacaaggccacagaggagaaagaaatcaagtttgagaagttgctgcaagaggagcgagcaaaggctagacaaagtgatgttgactctggaagtactgaagatcgcaggcaaaggaaggaaaagattcagaacttcatagactgccaggtgaaggatgttgaggaatttgaagccgaacgagacaaactgatcaaattgcatgaagagaagaaggtgaagctcaagaaggagtacctggcgaaggaatttgagcttgagaaggagctggacacagccctcacttccctgatggataaacacaagccggacatcttcaaatcctccacctcgccttcgacatgaagaactgcggcttaccatacatttcctgctcatctacaatagctaagactcccatttcctaagtacccgtaaaacttctagcgatgcgaaagcatcattctgtttgggtggatgcatgcctttggaaggaaacctgaaccagttccgtattatatggagtactatcagtttatggttgctgatgaactgatgactgtgcgctgcgcttttacagcaagcgtggaaatcgaatatatatctagtttatctcatcattctgctctgcgttgcatc

SEQ ID NO: 14405 - DNA, 1755 bp, Oryza sativa
  ref <308>: DATABASE ACCESSION NUMBER: AK064996
  ref <309>: DATABASE ENTRY DATE: 2001-12-06
caaggaacctgctcgatcgctccggcgatgatggctgccgcatttcctctgtccaccgccgcaccgccgtcgccgccgctcgtcctccgccgttccgccgccgccgcctactcaccttcctctcccttcgagctctaccgcaaccaccgccgccccgcgcgccgggtgcactgtgccgcctccgcctccgccgcggcacggcggcgcgatgcttgctgcgcgctgcggccgccggccgctgctcggggtggcgcagccgcggcccaggggcaggcgggggcggcgccccacggtggcgcgggggaggggtccctgtggatggtgttcctcgccaccgcggtggccgtgtgcgggtccttcgagttcggcacctgcgtggggtattcggcgccagcgcaagctggaatcgtgaacgactttgggctctccaattcagagtacggcgtatttgggtctgtgttgacaattggagcaatgattggcgctctgactagcggtcgccttgcagacagtcttgggcgcaaaacgaccatggggttggcagcaattattggcattgttggttggtttaccatatattttgccaatggtgctacgatgctctatcttggaagagtcttgctcggctattgtactggagttctttcctatgtggtgcctgtgttcatatctgaaatagccccaaaggatcttcgagggggtcttgcatcttcaaatcagttgttcatctgctcaggatgttcagctgcttacattattggggcacttctttcatggcgctcgttggttctagtaggattagtgccttgtgctttcctccttgttgggcttctgtttattccagaatctcctaggtggctggccaatacagggagagtcaaagaattcaatgcttcactgcaaaagcttagaggggagaatgctcacatatctgaagaggctgctgggattagagaatatatcgaatcacttcgtagcttacctgaggccagggttcaagatttgtttcagagaaagaatttgtttgcagtcattgtgggtgttggcctgatggtctttcagcagctgggaggaataaatgccttgggattttatacaagctatatcttttcctctgcagggttttctggaaagcttgggaccaccttgattggaatttttcagattccactcacattgtttggtgcccttctcatggatagaagtggaagaagagcccttctactggtctctgcgtctggaacatttctgggctgctttctgactggattatcgttctacttcaaggcacaaggagtgtatgcacaactggttccaacattggctctttatggcatatcggtatattacgctgcatactcagttggaatgggacctgttccttgggttatcatgtctgagatattctccattgaaataaaagcaatagctggaagcttggtgacgctggttagctggattggttccttcgcaatttcctactcattcaatttcctcatggattggaactctgcaggtaccttctttctgttctctgcggcgagcttggtcacggtgttgttcgtggcaaggttagtgccagaaactaaagggaaggcactcgaagagatccaagaatcgttcacatgacagctcgaggaggatttgtatgtagaacgctcgttatcctctcaaattatttgtatcagtgtgttcatattactatatatatactaacttctgttttctgttggcatttcaattcctttttctgct

SEQ ID NO: 14406 - DNA, 2804 bp, Oryza sativa
  ref <308>: DATABASE ACCESSION NUMBER: AK064997
  ref <309>: DATABASE ENTRY DATE: 2001-12-06
gggagtttaatcacaagaagaagaagagagagaaaaaaagagagagaagaaatcacaccgcattagcagcagcaaaagatttcctcgtttcgcttcacgaatttttgttgccctcgcccaatccacagcgcgaggagagggagttctcgcggcgatttctcgtcgcccctctcggccgctgccgggatcgcagctcgcaagttttggaaaggaaacaggttgatgaagttggtcaaagggagcaaggtggaggtgttgcaggaagcggaggtgcccctaggttcttggaggggtgctgagattgtattaggcaatgggcagagcttctatgtgagatatgatccttctccagttgactcttgcgccgctgtcgagagggtgcagagaaggttgataaggccttgcccccctcgagacgattcagtatgctgggctgtgggcgacatccttgaggcctttgatagctactcatggaagattgctgagatggtgagagtgcttggcaaggatttctatctcgtcaggctcctcggatcttcgctggagctgagaacacatgcgtcggaacttcggttgaggaagcattggaaagatggcaaatggactgttcttcagaaggattctacaaagtgcttcggtggttcattcagaggtcaaccaaaatctggaaatcttggaagcaattttggcaagcaaaggcagccatattgtgcaatggacaacaatcttctactgaagaaccaaaaagctttggagggtgataagtctagaggcatgaagagaaaatcatctgctattacacacccaacccagtgcagtgaagtgactagaggcatgaagagattacagacaccccatagagatggaaggcacgcagcgctggttgctggagtttctcctcgtttggctgaaaagggccgaagtcggaggcttgtaaagcatccttctgtaggtccatgtcgatggaggagtctgccacatggtttgctgtatgttaaatgtggcaacattccatcgaacttctgttggtaccttgtttgtttttgttattccttttgctttagtattatcttttctgctgccttttcttgtgattggccactaaatttctcgagaacattatgaagtgcataatttccataagtttacaccacattcatagaaaataaacaaaagtacatggtaggcacatctggatcaattaccactaaaaaaaggaagatgaacttattttcatattgacatattttgatatatttttttctctttagaatgtgaggcaactgagaggagtacctgcagattttgcatgacatggtaaatagtgtttacaattggtaagtttaaatttgtaggtcagtaatgataatacaattataaacatcgtagttctaaccatgtgatttttaacacctatttgcaatatgcacattaccctttgttaccaaaaacagaaattacagagggatcttcaatctgaatatgacctgcaaaggctttgtaagaggccttatttcaaggtatatatggtgactactgaattaatgtatgcaccatggcattgttgatcactgaggcatctagctggcttgttgaattccatcacaagtcactccttagtgcatgacttattatagttgactcacatggttgcttagtgttgtttgaatgagttttaccatctaatatttctacatatggatgcacaaatattgtattagacatatggatgcttcccacagtgctctatcgttgtttcatgatatcctaggaagctcaatttctatgttcagaagagtgtgatgctgaattgtttttgcttaggagagagtgtgcagtcagctcaactttcctatgcagataagttgtttgcagtatgaaaagcagggaaaatttccaaaagattactggtggtgtcactttgtcaacaacaactacttgtgttactggtggtcaataccttcaagaactcacgtgagtttgctaagttgaggacctgcaactgacttccaattaaacagaagttaaggtaggcaggcgcaccttgcaattcgcagcagcaagtcaggtgaggatgcaccatattgtttgcctcacctgtactcgtatctgcaaaatataatttacctcttttaatgttcatctggaaaattactctttaattcagatgcttcacaaggactcaggaggttctcacgcaaaacgtgtgtcatggtgtttgtgtgtcaatcattatttgtttttaattgcaagtatttcaagtggcttgtttggcagcaaagtgttacaatttattagagtacaattaattatgtcctgaattaatgatcaaagtacgagacacgcactgaaaaaggctagagagttcttggccgtcttctgttctgtgattgtggcatcttgcatgcagctggtatactttgatggctcctagctgcaattctttaagttgtagtacagtgtaatatgccattacttgttccggatgtactgaaagatgtaaagttgctagatctgcattgctacgaataatttgttcaggttgcacgcatttgacaagttcccttttcagaagaagcattatatggtgcacctggtgttttcagatgagcaagtgagaaacctccgttgaagccaactgcaagcaaagaatatatggaacatgtcctttgtctcattagtttgtattaaaccgatggtgatgcattccttttaattccataaaaatatatgatgtgtttgttattgaactgtgtaataatacagacaaatgtctgttcaaataaagagtcactcttttattc

SEQ ID NO: 14407 - DNA, 1166 bp, Oryza sativa
  ref <308>: DATABASE ACCESSION NUMBER: AK064998
  ref <309>: DATABASE ENTRY DATE: 2001-12-06
gtagcgccgtgcggtgtgacggcattggtggcgcggtgtgcgtcgcggcacacagccgcacaggcgcacagccaggcagccagcccgtcggtctcctctcctctccccctcgcgttttttcttttcgcctccatctttgaaccttctcctcgccttcttcttcctcctcctccctccgctccgcttctctctgaccaataatctgggcaaacccctctctcgcgccttctccctcccacctctataaatccccctccattccaatcccacgggctcaggccgcgccaccagcagcagcacacagggcgcgccagctttagcgagagggagagagggggattttgggcgggggagcgatcgatggcgaagctgtacgtgcaggcggtgcagccggcggatctgaacaagaacacggagtggttcatgtaccccggggtgtggacgacctacatcctcatcctcttcttctcctggctgctcgtcctctccgtcttcggctgcacccccggcatggcgtggacgttcgtcaacctcgcccacttcgcgatgacataccatttttttcactggaagaagggaactccgtttgctgatgaccaggggatgtataatagattgacttggtgggagcaaatggacaatgggaagcagcttactcgcaacagaaaatttctgaccgtggttcctttggtcctatacttgatagccttgcacacgacagattatcaacatcctatgctcttcctcaacaccattgcagttgttgtgctggttgttgcaaaactaccgaacatgcacaaggtccggatctttggaatcaatgctggcaactaggcggcagcatcccacggtttgttatcactaccatgcttcatttgagtggcaggaaacagtatacctagttctgaatggataaccagagtgagtagtttttaagagctgttagtagatgacatgtaatcattgtacagagctaaaggcatggaaatgatgttgttcagcatctagtgaacacacttctttaggctcttatcccaccaaaaagaaactttattttgctgttaatgttgttatatatgtgctcttgttcaagtgtatgtcacatgtgtgtcttatggagaataattttttgtgtacgtaatgtgaggcaggaaagacaatatgcc

SEQ ID NO: 14408 - DNA, 3586 bp, Oryza sativa
  ref <308>: DATABASE ACCESSION NUMBER: AK064999
  ref <309>: DATABASE ENTRY DATE: 2001-12-06
gcttgcctctctctctctctctctctctctttctctctctctctctctcctcctcctcctccgccggagaccacgggcctcaccctgctgctccgagctccccctccggcggcggcgaacatccacggtctggctctaggctgctgctcctcctggggtggggtggggtgtggcctcgtcggccggcgagcaggttcggaggagatagccaggaggcggccgggtggaatcgggctgaagtgtgatggctacagagagcgctgtccggttaattggaggaacggggtctggtaactggagcaaggacttcggtgcatttgactcatcactgggtagtctttcaggagaaggtctggggtttgtggacaataacagtggcgtttatgggggctggagggagtctgtcccaaatcgcagtggaagtgcgccgcctagcatggaagggtctcttgctgctcttggtcatatgataggtcagcagagtgggaacttggaagccactttaggggggaagctgggaaacgtagcggacagttccaaatctgaggagcagctacgtgctgatccggcatactgtgactattatggctccaaggtcaatttgaacccaaggcttccgccaccacttatgtctagggagagcagacgcttcatgaaccgggttggcaaagttaaagaatggagagtggtttctcaagatgacagcaacaaaggttccttgtttattcctcgatctactctgtcaacacacagagaagagcctgaggacgataggtcaccaaggttggattcaagttcagcagaggatgcccaaggttctggtaaaagtggatccaactttgatagccattatacttgtatgaatcttggagattttgcatcggagagttttcagcagaaagccgcttctttgtatgacagttctactcatccatcaaatagcaatactggtgatggtatatctgaccattctgacattaactcatcaacgaatttttcaattgatgctgtcaagacatctgggttgaattcatggacacctgttcctgtgactaacacagtgagaagtacacatagcaacagtatttcatctacatctgttcccagttcatcaagtcctgataacaaccccagtatgcaaacttctcagcaagagaagcctagcatagacatcaagcatgggaatgatgtgcctggcagcggttctattctgactgaactagatactgtgaactccaatatgaagaatctgaggataagtttggatagccatgataccatacatgttaagcagcagtggccggacaatgtcttgcagcagtttggcccctcacctttagtccagggtgatcctattcaaatgattcctcaaggaacacatcttccccatgttccttttgttgagaacttgtcgcatactcaattaaaattaccaactggtgacatgcagcaatttttaccaccgcctggtatgacaacacctttttatgcaccaaattcttttggaagcccttactatcaaaatttgcatccggctagtgtattgccaacaccatttggaactgctggatatgctttgagtggttcagctttaccacctgttatgactagctatgctccccaggtttctgttgctacacctgttgacagccctattactccaagctttagtggtagaccatctggttttccttcaccagggaatcttagtgcaggagcagaatttgttcagccatataaaatgtatggacaacaacttggggttaccatgcagccatccgttcctgacccaaacttctttcagttctttcagcatccttctttactttcatatgctggtataaatcaatacaatacaatgggaccaagggttagtgttgttgggaatcctgctgatagttttgatccccaaaaggtattatcccagcctgcgtatccatctgatcagaggcttcaacttccaagaactggaatttataactctcctgcagccagaagaggaggggccgctccaaattatcaaggcatgacaccatatgttggagcaccaatgacttacccaacaagcccagtgtttcagggacagactttcactggagtattttctcctggtaggagaaatgattctgtgagattccaaactccctcaagaaatatgaccgcttattctggtgttcaagggcagcgagaaagggagaaattcgatgacccaaaggcatgttccttcctggaagaactcaagtctaacagggctcgcagggttgaactatctgatattgcaggccatatagtagaatacagcgctgaccaacatggcagccgattcatccaacagaagttagagaactgcactgctgaagagaaggcatctgtgttttcagaagttctccctcatgcttcatcattaatgactgatgtgtttgggaattatgtgatccaaaagttcttcgaacatggaactcctgaacaaaggagggatcttgccactaagcttgttggtcatgttttacctttgagccttcaaatgtatggatgccgagtaattcaaaaggctcttgaagttatggaacttgaccaaaaaatagaactagttcgtgagcttgatggaaacattatgcgatgtgtccgtgatcaaaatgggaaccatgttatacagaagtgcattgaatgtgttcctacagaacatattggctttgtagtatctgcttttcgggggcaggtggccagcctttcaatgcacccatatggttgccgtgttattcagagagttttggagcactgcggtggtgattcacaaggccagtgcataatagatgagatactggagtcggcttgcgtcctcgcacaagatcagtatggcaactatgttacacagcatgttttggaaagaggaaggggacatgaaaggacccaaattatcagtaaattggctgggcaggttgttaccatgagtcaaaacaaattcgcatcaaatgtgatagagaagtgctttcaacatggggatatgacagagcgagatcttctgatccgggagattgtgaagcagactgagggcaatgataacttgctggcgatgatgaaggaccagtatgcaaactatgtagttcagaagatacttgaaacatgcaacgagcaacagagagagctcctgctcagccgtgtgaagggccatctgcaagcattaaggaagtacacctatggcaagcatattgtgagccgagttgagcaactttgtggtgaaggagacaccgagtcagattcttgaaaaattagcatatttcttcactggaggtgtatgcctggagccctcaagatgaacaacctccagtgcttccagaagggctaacaaaactcttgtctccttcagattgtacataagtgactctcattaggtggtagcctaggtgctagatacagtttagtggtgtgcatcagtgtatctatgttaggggtttgcttatttatagaatcaataatggtactgtaatagttgggtagctgtttgcaaaagaagatttagtggcttgtatgcgataaattatcgactgcttggtaatgtaatcgcttgcttagtggcttgaatcgc

SEQ ID NO: 14409 - DNA, 1817 bp, Oryza sativa
  ref <308>: DATABASE ACCESSION NUMBER: AK065000
  ref <309>: DATABASE ENTRY DATE: 2001-12-06
ttgagtcatcaagagctgaaaaatcttcgtcttcatcatgcgccattttgagctcctcctcttcctcctcctctgctcgccgtgcctcttctcagtctccgatgggaggacggtgcggcccgcgaaacggggcgccccgtcgccccccattcgggcggtgaaccttggaggttggctcgtcacggagggctggatccttccctccctcttcgacgacattccaaacaaagacctcctggatggaacccagctgcaattcaagtcggtgacgcagaacatgtacctgtgcgccgagcagggcggcggcaccatcctggtggcgaaccggacgagcgcctcggggtgggagaccttcaagctgtggaggatcgacgaggacacgttcgacctcagggtgttcgacaacctgttcgtcaccgtcgccggcgacggggtcaccgtcgtggcgacggtggcgtcgccggggcccggggaggcgttccagatcgtgcgcaacggcgacaagactcgcgcgcgcatcagggcacccaatggcatgttcctgcaggcgaagacaagcgactcagttacagcagattatgatggggagacaaattggggcgacgatgacccctctgtgtttgtggtcactagggtaggcggtctacaaggggagtaccaaatatgcaatggatatggtaaagcaaaggccacacaagtgctcagggaacactggcgcacatacatagttgagagcgacttcaagttcatatcaacaagtgggctaaacgcagtgagaattccagttggatggtggattgctagcgaccccaatcctcctgctcctttcgttggaggatccctccaagccttggataatgcattcaaatgggcagagaagtataatttgggagtcattgtggacctgcacgctgcacctgggtcgcagaacccgtttgagcacagtgcctccagagatggttcacaggactggggcaccacggatgccaacatcgcccaaactgtccaagtcatcgatttcctcacacacagatacgcgagtagccccagcctcctggccgtggagctcctgaacgagccactggcacccggggtgactctcccggctctcatgagatactacaaggacggctacaacgccgtccgcaagtacacctcgacggcgtacgtggtcatgtccaaccgcctctccgccagcaacacggagctcctcggcttcgccgccggcttccccggcgccgtcctcgacgtccactactacaacctcttcaccagcagcttcaacggcctcaccgtcgaccagaacatcgactacgtcaggaccaaccgctccgacgaactcagcaccgtcacaaggccgaatgggccgctgacgttcgtgggagagtgggtggctgagtggaatgtgcagggagcatctaaccaggattatcagaggtttgcacaagcccagctagatgtttatggacgagctaccttcggatgggcctattggacttacaagaacgtcaacaaccactggagcatgcagtggaatatccagaatgggatcatctctctcaaaagctagaaataatgactaataattaaatatgtctctagttatcaccaattagaacacgtaaataagcctaaccaaggccaattagtgagtaattactgttgcctaataattggaaatgtgtatgtacttgcagtcatatgtaatccgtgagcaaataagacgttgcggaagcgcagataaaacgtcaggtactcaggttgagtgtaactttctcttgtgaagctgaattaaagaaataaagattcttcttcct

SEQ ID NO: 14410 - DNA, 1583 bp, Oryza sativa
  ref <308>: DATABASE ACCESSION NUMBER: AK065001
  ref <309>: DATABASE ENTRY DATE: 2001-12-06
gaagcttttcccggacaggtctcccggcgccacggcatccaagctgctcgtcgcgctatctatacatgacacgccccgtctccctccttgcttgacaccaattcaacgacctctcgcgactgatcgatcgatcgatcgatcattcgatcgccatgaggctctcggtctccgtcgccgcggtgctcgtcgttcttgcggcgctccggccgccgcgggtggcggtggcgcagaagtacgcggccatcttcaacttcggggactcgctggtggacgccggcaacctcgtcgtggatggcatcccggactacctcgccacggcgcggctgccgtacgggatgacgtacttcgggtaccccaccgggcgttgctccgacggccgcctcgtcgtcgacttcatcgcgcaggaggtggggttgccgctgctgccgccgtcgaaggcgaagaacgcgacgttccaccgcggcgccaacttcgccatcaccggcgcgacgtcgctggacacgccgtacttccaggggcgcgggctggggcacacggtgtggaactccggctctctgcacacccagatcaagtggttccaggacatgaaggcctccatctgcaagtcccctcaagagtgcagggacctgttccggcgatctctgttcatcgtgggggagttcggcggcaacgactacaactcgccgctgttcgcgttccggccactggaggaggtgcacaccttcgtccccgacgtcgttgactccatcggcaagggcatcgagaagctgatcgaggaaggggcggtggagctggtggtgcccggggtgctgccgatcgggtgcttcccggtgtacctctccatcttccggaagcagccggagatgtacggtcgccggagcggctgcatcagggacctcaacacgctgtcctgggtgcacaacgctgcgctgcagcggaagatcgccgagctccggctcaagcaccccggcgtccgcatcatgtacgccgactactacaccccggcgatccagttcgtcctccacgccgagaaatacgggtttttgaggcagacgccgcgggcgtgctgcggggctccgggggtcggggagtacaacttcaacctgacgtccaagtgcggggacccggggtcgtacgcgtgcgacgacccgtcgaaccactggagctgggacggcatccacctcaccgaggcgtcctacggccacatcgccaagggctggctctacggcccgttcgccgaccctcccatcctcgagacccgccaccactgatcgatcgaaaacacgatcggtttgtgatccactcgttcgtttgcatatatgacaagcagacacacaccacatacacacacaccttcatatgcactggagatgtgaaggatagcgaaaggggccggacaggcagaagaacagagaatgtgatggttaatttgttcagattaattagatggttggttggggatgtgttgtagtttcattcatgtaagaagcgttttggtttgtgtatttcgtttgttggtccttggtagagaaagagagagtagatgtaattcctatttcttgagaaattaaaattgctctcat

SEQ ID NO: 14411 - DNA, 2072 bp, Oryza sativa
  ref <308>: DATABASE ACCESSION NUMBER: AK065002
  ref <309>: DATABASE ENTRY DATE: 2001-12-06
gtttgattcttgccgcctcctgcacccttatccacagccgctccctctccctccccctccccctcccccgacctctactcctcgacctacccacctccaatggggtgtcctccgccgccgccgccgccgccaccacttcctccggtgcgtcgccgcctccgctgccaccctgcagaaggaactcacggtgccgcgcaccccaacagccgcgcagagccccggtccagtgaacccgcctacgctgttcgacagaatgcccgagaggagcgtcgcgacggtttccgctgcggataacctgctcgacaaaatgtctcggacgtgcggcgcgggccagcgtggtcggcctctggaggcgcctcctcgggacggcggcgggaagagcgcgagcgccgcgatcgtggcgctggcgcatgccggccggcacgcggaggtcgtcgagctcttctgccggatgcggaggggcggcgtcccagtaagcaggttcgtgctcccgagcgtgctcgcggcttgcgccggcctgcgggacatcgggatgctccgagccgtgcacgccttggtcatcaagtgcggcctgtgccggcatgtcatcgtgggcactgcattggttgacgggtatactgattttggattggtggatgatgcgaggaaggcgttcgatgagataacagacgccaatatagtttcttggagtgtgctcattggtggctatgcccgttcttctcggtgggaagaaacattggatgctttctccgcaatgcggcgtgctggggtgcttccaaatgattctgttcttgtaatggcgattcaggcgtgcggtgcattgggacgcctggtacatgggaagcagctgcatggcttagcagttgtccttggatttgataggaatgctactgtttggaactgcctgatggacatgtatgggaagtgtggtgacattgacagttgcaagatggtttttgagacgatgatcggcagggatcaagtgagttggaacacgctaatctcaagttatgcccgtgttggtctttgtgaagaggcactcgacatgattgtgcagatgcaagagtctggttacattgtcgatcgcttcacccttggcagcggagttacagcttgtgcccgtttggctgatatagatagcggccgtgcattccatggttatttggttagaagattgttggatactgatgtcatccagggcagcgcgcttgttgacatgtatggtaaatgccacaacatggaacttgcacacattgtattcgacaggatggatgagaggaattatgtatcatgggatgcactcttgtctgggtatgttgagaatgagcaggttgatttagcacttgagattttccggcaaatgggttgtgcaaacataaagtataaccagcataattttgctaaccttcttaagctctgtggcagtcagaggtataaagagtatggaaggcaaattcacgggcatgccattaagaccataaacaagatgaatgtggttttggaaacggagcttattgacatgtacgcaaagtgtggctgcattggggtcgctcggctactatttcttcggatgaatgagagaaaccttatttcctggaatgccctactttcaggttatgcagcagatggacagccagttgcaacgataaatatttaccgccaaatggagctggcatgcattaggcctgacaaatacactttggcagggcttttaagcctttgccggtaccaaggactattgcattatggaaggcagatacacgctcatctcatcaagatgggttctgaaatgaacgtggtaatgcaaactatacttgttcatatgtatatcaagtgcatgcgtcagcaggatgctgaaaatgtttgtataatgatcgaagaaaggaattcatatgtgcttgatgcattttcaaaggtctatggagatgactacttgatctgaagaaaagaaaatatctcattttacactggagttagaatgtatgggaatacttttgtcttccttgtggatacaaatcttagatgcaaaatttgtatttcctgtatactaaggactatagtagtttttcgcc

SEQ ID NO: 14412 - DNA, 4865 bp, Oryza sativa
  ref <308>: DATABASE ACCESSION NUMBER: AK065003
  ref <309>: DATABASE ENTRY DATE: 2001-12-06
gatcttttccatcctttgcatcagcgtcgtacgactctctcggcctcccctttcttccttccaccgcccaaaccctagatcggcgccgccgccgccacgcagggccggccagcaccgtgtgggggagcgtccggccgccgccggggtgccttggagatcgatctcctcgccgccgacgacagcttttcttcgccggatgcgttccgtggcggttatcaggactctttttctctcgagatagagaggaaaagctccctctcgatctgctgttggatcggaagaacagcagagagagagaaagcttagcgggatgatggtgcagatcgcgtggatctgtcgccgggaggtgacctggatcggtgtcgtgctctcgccgtgtgggtgagattcaccggcgccggtgcctcggatcctcttcggcggcggcgttgggcctccgatgcgcgaagacctggggctctgaggtcatgaggaggactttattttggggagaggatttgatgagcatggaggatgtgcagtgctccaagtcggaaagctttttttttaccattactgctgccgaggaagctcaatctctgtcgggatggtaattacggaaggggttatcttagtatggtgtggtttatgaaattcagagatcggttatcttattatggtgtggtttataaagtcagagatccataatttcgtcgcttcaggaggataaaggaacacacatcgttttgggtgtccggtaccaaatattgttcatttcaccctctgggttgtctttcaaaaggtgtcagagtgatggttttttttttccttcttcaatcactggtgatatatagttttgcaaactgagctaaaatgcacggccattccaatattccaattgttctgtatttatgtggactcacacgaggattttgaaagacttctactattgtggattaacacgaggattttgaaagattgttactatgcggattcacatgaggatttttaaaagaccgttcattttagaggttggaaaatgttttacgttcatgttcatccggcttcctcttgatatggccggtaaccacaatggaggtgagttatctgtatctacctaagtgatcacatccttatgtttctaatgatggtacaggtcatgtgctgcctctagataaacgcaactcgaatggatggatttattattattatttttttggaatgaatggatttatgagtgctggtaattacaatattgtttgcacggttataaaataaatgcacatgatctttttttcctttaattttgttgaacgggccatctaattctatggtttgcacggttaaactatttggcaccggaatggtagctacataaatagcttaatcttgagaagtattacgattggtctaccgtatagtatcatggtagtaatgcttgattagcatcacgattagtatgctattaggctccctcttacaaggatcacgacttaataactcactgcttctgtatgctggactcctccgcgataaggttggtcgatgtcaggttaatcgctaaaagtctggcaccacagttatttgagttcatcttttggttcactgactacccaggtggaattgatgaagttaattaccttttccatgggtctactcaaacttaattttattataatcttgcaaaagcttcatcttgtcacatcaagtctcttaattacgaacctaggtattttagactatggggacaggtcccgtcgtcaggattacctgaattagccacatcttatcctgatcaactactccatttctatccccaaatccgaacacgccacagggacgtgtgaaaaaagtggtatgtcagcatacctccggtcttctgttgaactgaggaatttcatagaaactgaaccacctcagttaaaatttctgtaaaattcgataaactgcctttaatgccaagtctgatctttggatagtcatacttcggatgtctttttaacctccaaagtacaatgtaattttttatcgtgtggatgaacatgatctaattttttttggatgaatatcatttatacgtctttgcttaatttgtcagatcgtccaatcatcgtggaatccctgagaggtatgcaatgataaggtgtgtctgctatctcatttgaactttaattagattgacgtatgtgcttttctgctaacattgagagtataaaaacctaataaatttacatcacaaatacaaacaactcttattgtaaaagttatatcaagtgatcgcattactcttggtgaaggtcttgtatgcaacacattgtccacaaagaccatggtgcagttcgagttttcatgcacaaaatgtagacaacaacataaacaattgataagcatgataatattaattcgtactattctacatttgataatacaccacaaacaactttatcacatacttacaagatgataaacttgttgtctcatggtatagtaaacttttgcatgcaaaacaaccttttgatatgtcacaataactgaacatttagtacagaactaatagataaaatcacaagtgtatctcagtgtggggacaagaacaaaattaccccaaataatatctttaccttaataaaattgccgcaaataataccttaaattgaacaaaattgccccaagaaatagctatgctagagatatatagcgtttgtatgcagtcaaatcacagaacttcatttacatgaataagattgtaaatcatgatagctattcgaataacgtctcatttcccttatactagaacgactttcaattttatcgtagataaagaaagagccattttatattacaatagtaaaagtctatgtaaaagtctccatgcatgtagtaacacttattcctggcatttcgagtatcatttctgtcctacctgcaataattaaacaagtcacaaattaatggtttgcatattcaaatatttagcatgtaaggagctatagaaaacagataacatgtattacgcaaaatctacaatcaaccataaactgtaattttaatataaagagaatgcaaaaaaattcgtttaaagtgttccagaaattggccctaagcacggggttagcgctatgatttgacacaactcagcctgttaggcgggagggcctgcctagctggtccaaggcagtcaacatcggtgcctaggcggtatggagaagatggcatcaaggcattgccgcaagtgcctaggcgatatggcggatgacaatgcaactaggcggtggccaggtgtgatatagaatcagatcttcgagctcacctgcacctgtgacccaaatcagaggtggctagggaatcattgagcacacggcaagctcacctgcacccgtgacccaaatcagagggaatcattgagcacacggcaacttgatctgcgccggtggggttcgcctctgcccatatcttctccccggaggtctgcacctcccttctcttcgagcattagcaggcagcagcagcagtgatcaaaggaatccacagtcgagcaagcaacattgctgacactggtggattgagcaagagcatgtgatttcaaagaaatatcaagctcggcactggtctgatcagtcaaaacaacacatctttatttctgcatcagaaatggctgctgtattcaaagaatcccagtatggtacatatttggaggccaatctaagtagttcgtgtggtaataaagattctcctcaggttcttcccaggtagaaatttgcaataccaaaatttagccttgttagggcatgctttgccagagagcttattctaataagccgtaattgtttcctctacacttttagaacatcccaagtacgtcgtgactcttgttacttctaataatttatcagaatagttaattttgttaactatgaggaacatgcagattgagtgagttttacaatatatggactagtcttatcaagtatgaaataaaacaatatatatgttgcgttacttctgccagattcttgtcacctgtaatttgcacatacagaattttatacttgaatggctttcatttcatttcacttctaccaaatttgctatgatttggttgaaaaatattatgtgaagtcatgttatcattgtcttcacttggggttttgaggaatggattgattttttgcaggttgcttttgttgggatcattacatccacactgtttctccggacaagattacatcctgttgatgaacaaaatgggaatctttatctggcatgaatatttctcgacttccagtgttctataaacagggagacaatttctttcatcctgcatgggctctcacttccaaattggatactaagatttccatattcctttattgaagctgttgtatggtcatgtgttgtatactacacggtaggctttgcaccaatggttgacaggtatacccaggacatgtacccttttgatcaatatgcctaactagctacatcttttgtatttgttcatgttgatctaacataccatgtgcagattcttttgtttcatgttgctgttattctctatacatcaaatggcattgggccttttcaggataatgggagctattgcacgagacatgaccatggcaatgtaaccttttcagccactcaccatgaagttccacaatgtgaactattatgtcaatttgccaaaggaaatgcaagcaaaagttattcctgagaaaagactacagttgctgtgtgaagtgtgagtacaactccatcacaagtgtgagttcaactgacaactgagctctctgtattgtcgaccctaattcctttctcccaaccactagggccaaaattttgtgaacactctactgtagattgttgagccaactggtgtgtttact

SEQ ID NO: 14413 - DNA, 1533 bp, Oryza sativa
  ref <308>: DATABASE ACCESSION NUMBER: AK065004
  ref <309>: DATABASE ENTRY DATE: 2001-12-06
gccctctcctcctcccctctctccccgtccggcaacgcagcctcaccgttcaggcggcggcgaaggccgcgtcgaccccgcgcagcgcaggcgccatggccgccccggaggcaccctcctgctacgttgggatcgcgcggcagtccgccgccttccgcctcatgaagcaaatggggtgggaagaaggtgaaggccttggtaaagataagcaaggcattaaggggcatgttagagtgaaaaacaagcaggacactcttggtgttggtgtagacagtcctcataacaaatgggtatatgacaccacccaatttgacaatatactaaagaaactgaaagtgcaatccgctactcctgctataaaagaatttgaagatgatgtaagcaattcaccagatagtacaccaaaggaagctaaaccaacaaacaatgaagttaccaaagttacccgaccccaaggaagatataagaaaagagagagggggaaaagtgtgagcggttattcagcaaaagatcttgaaggcatacttgttcgcaaaagtgatgacaattgcaaagtggaccaggaagttgaaccaacatgctgtgatgaacctgatcccatcatctgtcaagatacagtatcgcaagctgatgatgtgaactggtgggggcataaatttggattcaagtcaggcggctttctaggagcaaaatcgcgcaagaacaaatcttctgctacaaaaggtacttcaaatgtccgccagacatttggggaagaagaccaagaaaacctatacaatcttgttcaggacaaagccacatctggaaagcagggtcttggcattaagggtctgccaattaaagttgccggacaccgttggaaagggaacaaaacttcttttggtgatagcgatgaggaaaattcaacccaatccaatgaattatcagagttggaagaagatggtgatgaggaagaatctgctaacgataatgaactaatagacgccaatgtgaatactgtgaaagaaatgtgcgtggatgttaaacaaaaacataaaaccaaggtcaagaaactttgcaaaacaattcttcgtcaggccccagcacaatctatgaaattgaaggaacttaaggtagctgttgaagcacattcagagtctatgttctccaacttctcttgtaggcgtgaagctctattgttcttaaagaggaagctccaaggaagcagaaaattcaatattgatggcaaacgggttcagcttgtatcgtaaattacgaagccgttcgggtgtgacatgaagccattgtggtcatattaggctattcgtgcttctgatgagtgtacgaaagtacggagcacagtatgctctgcggtatagatgtaagaagtaatacccctcacgcatggggggtcaaattttgcaaaacttacgaacggctgagatgctaattgtgtgtacactgttgagcacatttgattttcatcgttcatttccctacagcaaatgtttggcagccggttctgaataccaatgcacgtcaatattgtacctt

SEQ ID NO: 14414 - DNA, 2911 bp, Oryza sativa
  ref <308>: DATABASE ACCESSION NUMBER: AK065005
  ref <309>: DATABASE ENTRY DATE: 2001-12-06
aggctgaagctgagctctctccgtttcaactcttctccaaaggaaaacccaacatttcttcccttctctctctccagctccgcctccttgtcctactcgtcggcggcgctccagctaaaccctagtcccgtcgccgccgccaccgcggttctcctgccgggccccgtgatgccgcttcttgatccaggaaagctgcctctttggtcaccgaactgcaggcaaccactggtcctaacctgagctgcgtcagcggttggatggcctccccagatgcggttgttagttgtgaggccgcatgagttaatgctctactaggcgcagctccggaggcagcagagggcttttgagaaagatgggttcttcaggttgctcagagatagtcgaattggtggatgagtcgaaggatgcccgtcctggtggtgtcacccacctgagggtgagagtgaagccggtgggtcaggagcatggagcgcggtcgtgctccgtcgaggatgatctcgataggctcattagatcgattaatgtgcgcacatccgcacgggcttctgggcagacgagcacggataggaggcttatcgcgctcgggaagtcgccgatatcgagctcggagattgttgagtctgtgagcctgaaacaggccctgaggaagatgtgcatctcgcaggcgtcggagatggccgccatgaagaggatgccgaagccgacggcggtgtcaaataccccagaagctggggcaattaagaagctttatacatctgttgtggttcaaaccaacaaggagcgggatgaaaagaataagtttggaaaagtgtccgttttgcctgagaaggatgtaataagttcatcggtgaagtcaacggaagccaagaacaaggtacggaacaaaagcccagctaagaaaaatgtgcgttcagcatctccaaccacaacaaaggtccagaaaaccagaatccaagatgtgatcagtaataagtcatctgaggcaagtgaagatttgcctgcaggtcctgcggtggctaaacagagaaagggcaaaatgaaaacatctagcccccgtgcagttcctgtgggcggttcacgcctggtgttccggagtaaaacctccaccaagaagaaggtcaaaccagaaccagctgctgcagtggtatctcacaagacttgtgaggcaaaaagttccaattctcaagctaataagaagcacgaggccctacaggatgaacccagaactccaacaccaatcaacaagaaggctgcggctagctctatcagcactgatggagctaattgtggcaccaaaggatgtggtgttggtgagatccatggttcaaagcccagtgagttgtcaagatcgaaggaaaagggtgaatgctcccaaagctcaaagagcagcatgggtgattatagcaccagcacaagcataagcgatgatagttatggtagtttcagtggcaatggctgcaggcctcacatgtcaaaagatgtgagatggggggccattaggcgcatggcaatccaacaagggagcctgggactgaagaacttcaagcttctcaaacaacttggttgtggagatattgggactgtttatctagctgaattggtgggttctgaatgcatgttcgcattgaaagttatggatatcgagtacctgataagtagaaagaagatgcttcgagcacaaactgagagggagatcctgcaaatgctcgaccacccatttcttccaactctgtattcttttttcacgaccgataatctgtcttgcctagtcatggagtattgccctggcggtgacctgcatgttctacgacagaaacagcctaccaggaccttttcagaagctgctgctaggttttatgttgctgaagttctcctagcattggaatatctacatatgttgggggtcatatatcgcgatctgaaaccagaaaacatacttgttcgtgaagatgggcacattatgctctctgatttcgatctgtccctgaggtgctcagtaaatccaatgcttgtaagggcctcatcagtaggaagagatgaacctagtagaccttctggcccttgtgcggaaagctgcattgatccactctgtatccaaccgtcatgggccaattcttcttgcttcacgcctcggctagtttcctctaccccttccaggccacggcggccgaggggtgagcctcagaagaaaccatcactgccacagcttgttgttgagccaactgatgcaaggtcaaattcgttcgtcggtacccatgaatatcttgcaccagagattatcagaggagatggccatggtagctcggtcgactggtggactcttggcatctttctctatgaattactctatggcaggacaccgttcaggggacccggcaatgaggagacactgacaaatgtggtctcgcaggggctgaagttccctgataaccctgctgtcagcttccatgcccgggatttgatcagagggttgcttgtgaaggatccggagtaccggctaggctcaacgaaaggagctgctgagatcaagcggcatcccttcttcgaaggcctgaactgggcattgatccgatggactgcaccgcctgagactccgaaaagcttcgacgcggcaagcctcacgacggcacggaagaagaaggaaggcaagtgcctggagttcaggctgaatggagacgacattgagtttgagctcttctagtggtggtaataatactactttgtattcggaagaacatccatagcatgtagctagaggtagtttcacttccctgcagctttctgttggaaatgagtaaaatcttgtgtcacctgccaatgttggggaagtgaagtatgttcggctgttaaacatgctactactttattccttgttaataccatcaaaataccagattagcacggcttcggc

SEQ ID NO: 14415 - DNA, 1326 bp, Oryza sativa
  ref <308>: DATABASE ACCESSION NUMBER: AK098877
  ref <309>: DATABASE ENTRY DATE: 2002-08-28
gaatctctccccagcgccgccgccgccgccatcctccccgagccctagctctcccctatccctcgccgcacgcaccaccaccaaccatggccggcgcgcaggagtctctggtgttggccggcgtgatgcacggccacaacgacgtggtgacggccatcgcgacccccatcgacaactcgccgttcatcgtctcctcctcccgcgacaagtcgctgctggtgtgggacctcaccaaccccgtccagaacgtcggcgagggcgccggcgcctccgagtacggcgtgcccttccgccgcctcaccggccactcccacctcgtccaggacgtcgtcctcagctccgacggccagttcgcgctctctggctcctgggacggcgagctccgcctctgggacctctccaccggggtcaccacccgccgcttcgtcggccacgacaaagacgtcctctccgtcgccttctccgtcgacaaccgccagatcgtctccgcctcccgcgaccgcaccatcaagctgtggaacaccctcggcgagtgcaagtacaccatcggcggcgacctcggcggcggcgagggccacaacgggtgggtctcctgcgtccgcttctcccccaacaccttccagccaaccatcgtctctggctcctgggaccgcaccgtcaaggtgtggaacctcacgaactgcaagctgcgctgcaacctcgagggccatggcggctacgtcaacgctgtcgcggtcagccccgacggttctctgtgcgcgtccggtggcaaagatggcgttaccctgctgtgggacttggctgagggcaagaggctgtactcgcttgacgcgggttccatcattcactcgctctgcttctcgcccaaccgctactggctctgcgcggcgacccaggactctatcaagatctggggtcttgagtcaaagcacattgtgcaggaccttaagcccgagatccctgtctccaagaaccagatgctctactgcacaagcttgaactggagcgcagatggaagcaccctctatgctggttacacagatggaaccatcaggatctacaagatctcaggtttcagctacgccggctagagatggggagtgttgttttagttatcgcgttctggtaaacgactgtggtatcaccctagtgttctttttggctgtttgaaaggcattaatctgcctgagtacttctgcttaatttacccatctatgtagtagctccagtactgagctcatggatactgtggaatagggatctgttttgcaccatgttttgttttgacttccttttcaatatattgtctgatgaaccatgcgatcc

SEQ ID NO: 14416 - DNA, 1666 bp, Oryza sativa
  ref <308>: DATABASE ACCESSION NUMBER: AK065006
  ref <309>: DATABASE ENTRY DATE: 2001-12-06
gaaccgtcaagagagaagtattcggaaagaagagaaggaaaaaaagaatttttagagagaggaggaaaaaaaatatccccaatcccatcatcccttcacccacccgcacgcgtctcctccgactccgatccgagctccagatctgcggcgccggcgaccaacctctccggcggcgggggcggcggcggagatccacgatgccttcgtcggagcagggggcctcgcccctgcgcagcctcctccgcgtcgacgccctcgtcctcccctccgcttgctcccaccgccttaagccttggtctctccatccccacctcctctcatcctcctaacgccatccaatctctcttctccccgtctctttctcctgctccccgttgccctcccatttcttccccttttcttctcgtagctatagggtgatacacttctctgattattgttgttgttcttcccgtgctgatttggatttaattacaagtatttgtgttggatcggttggacgcgctcactcggtttggtttggtttggattgtattgggttggatcggatcggattagccgcgctatagcgtcaggggatcagctcggctcactgtggtttttgaggtgttagggtttgagtgctaggttgtttgcttgatggatggtcattcctgtggtgatctcgggagagtgtcggaagtgatatccgacggcacctcatcgggtagcgcagacggcggcaagaccttgcctgagaagcattctgcgctggctgatgctacttctggagtggcggcggagaatgccgataatttgtcacaagctgggaagtacatggatttctccagtaccaccagcttgggggtgaagaaaggcttccagaagtgcatgacgtttccgccctctagcggcgaggcacaacagcagcagggttcatgctgtgatgcagataagaatcccaaggatgtgccaacctatgagcgctccgtgtcactgcccccaactttgaagatcatatctgctatgaaaggaagccgccaaaagaatgggatggcttcatcaactgaaagtcgccacgtcaaatgggcccctgacgtgtatgaccccccagtgacatctgtatgtcattcagtgaataacagctaccagcgtcggtccaaatcccggaagaaggacaagaataagcagaagcagaaacaaaagcaaaagggtaggtccaagaaaaaccaccagaatgctatccagagttcagcagtgctccaagctcctggcgaatttgataggctcaaggatgctgaaaccacaagtagtaattcagcaccagacgatctcaacaaacatgagaccgatatattggattatggcatcagcagtcaagacgccaaatgtggaagcagctttttgcgtgaatcggctgctaaaatgcatttctccactgctgaggcttcctgaaagaaaggaaaatgagtcctgcggattctcccttggtatgtaaatatgatggatgtgtagataaataaaatccagtttgttgttgtgtttcctgctgtgtgaggcgttaagagaacttctggcgtgctttgatttggagcagttaccatgactgttggactggtttttgtatgtattgatggacaaagctagtaagcattaatctatgagctgcagttgttttccttgatct

SEQ ID NO: 14417 - DNA, 1522 bp, Oryza sativa
  ref <308>: DATABASE ACCESSION NUMBER: AK098878
  ref <309>: DATABASE ENTRY DATE: 2002-08-28
gctcctcctgttcttgctccttcctcccagtgtctctcaagagcggtgcagggttcacaaggcaggagaaaatgggggagatcaccaatgtcatggagtaccaggccatcgcgaagcagaagcttccgaagatgatctacgactactacgcctctggagctgaggatgagtggactctcaaggagaacagggaggcattctccaggatcttgtttcgtccccgcatcctgatcgatgtctcaaagatcgacatgtccgcaactgttcttgggttcaagatatcaatgcccataatgattgctcccagtgccatgcagaagatggctcaccctgacggagagtatgcaacagccagggcagcttcagcagcaggaactataatgacactgtcatcttgggctacttcaagtgttgaggaggtcgcctcaactggaccaggaatccgtttcttccagctatacgtgtacaaggacaggaatgtggttgagcagcttgtcagaagagccgagagagctgggttcaaggcgatcgcactgaccgtggacactccgcgactgggacgcagggaagctgacatcaagaacaggttcgttctgccaccatacttgacactgaagaatttcgaaggcctggacctcgcagagatggacaagagcaacgattccgggctggcctcctacgtcgccgggcagatcgatcgcacgctcagctggaaggatgtgaagtggctgcagagcatcacgtcgctgccgatcctcgtcaagggcgtcatcaccgcggaggatgcgaggctggccgtgcactccggcgcggcggggatcatcgtgtcgaaccacggcgcgcggcagctggactacgtcccggcgaccatcagcgccctggaggaggtggtcacggcggcggcggggcgcatcccggtgtacctcgacggcggcgtccgccgcggcaccgacgtcttcaaggcgctcgccctcggcgccgccggcgtcttcatcgggaggccggtggtgttcgcgctggcggcggagggggaggccggggtgaggaacgtgctgcggatgatgcgggaggagttcgagctcaccatggcgctcagcggatgcacctcgctcgccgacatcacccgcgcccacatctacaccgacgccgaccgcctcgcccgccccttccccaggttgtgaggacctcgccgccgccgccgccggcgaactctagccaaacaataaacaatatcgacgacgccagagagcacgccgattaattaattaggtaatttttgcaaaagaatctcgtcgatccacacgcgcgcaagcaacacacgtactccgtgcacccctcgtaactgggtcgttcatgctcttaatcccaacgattaattatactggtataatctttgtaatttcgagtactgtacacctatttggcatctgtatatctcgccttaagatatttacggaaccggtttatatactcctttaatttttaattaacggagttcaacatatatataagttacttcatg

SEQ ID NO: 14418 - DNA, 1602 bp, Oryza sativa
  ref <308>: DATABASE ACCESSION NUMBER: AK065007
  ref <309>: DATABASE ENTRY DATE: 2001-12-06
ggggaggggattaggcaacaaaagctcgtcgtccatccgcagatacggaactactcccctatccaacacctccgagtccgagcaacgcaagatggcgtcgtggtcgtcgcccgtcgccgccgccgccttgcaggtccatttcgggtcctcctgcttcttctccgcccgatcgccacgacagaccctcctcctaccacctctcgcccgcaaccctacactgaccatccagccccggccccatcccttccggaacatcaactcctcctcctcctccagctggatgtgccacgccgtcgccgccgaggtcgagggcctcaacatcgccgacgacgtcacccagctcatcggcaagactccaatggtatatctcaacaacatcgtcaagggatgtgttgccaatgtcgctgctaagctcgagattatggagccctgttgcagtgtcaaggacaggataggatacagtatgatttctgatgcggaagagaaaggcttgataactcctggaaagagtgttttggtggaaccaacaagtggaaatacaggcattggtcttgccttcattgctgcttccagaggatataaattaatattgaccatgcctgcatcaatgagcatggagagaagagttctactcaaagcttttggcgctgaacttgtccttactgatgccgcaaaagggatgaagggggctgtagataaggctacagagattttaaataagacacctgatgcctatatgctgcagcagtttgacaaccctgccaacccaaaggtacattatgagactactgggccagaaatctgggaggattctaaagggaaggtggatgtattcattggtggaattggaacaggtggaacaatatctggtgctggccgtttcctgaaagagaaaaatcctggaattaaggttattggtattgagccttctgagagtaacatactctctggtggaaaacctggcccacataagattcaaggcattggggcaggatttgttccaaggaacttggatagtgaagttctcgatgaagtgattgagatatctagtgatgaggctgttgagacagcaaagcaattggctcttcaggaaggattactggttggaatttcatctggggcagcagcagcagctgccattaaagttgcaaaaagaccagaaaatgctggaaagttggtagtggttgtgtttccaagctttggtgagaggtacctttcatctatcctttttcagtcgataagagaagaatgtgagaagttgcaacctgaaccatgagcctaacttcagtgttcacaacatcataattgtttctgagatttctggccattagttttttttttctgagaagtatcataccactccatagctgtttgttcgataaataaaacagttacctttgcacttataatgaggcttgtgagggtactgtgaaatttctctgaacatcttctactcttctcttttatccttaaatcaatctgggagcagtttgtaatacatacgtaaatttaaagctgggtgtttggtaattgtaaacaaatgtttcgaagagccgtgaaacattatcaattagcatgaagcactttaaaagtgctttccgg

SEQ ID NO: 14419 - DNA, 1512 bp, Oryza sativa
  ref <308>: DATABASE ACCESSION NUMBER: AK065008
  ref <309>: DATABASE ENTRY DATE: 2001-12-06
gatcatcttctttggcttctccctcttcactgccctaattacaacccatttgcttatctctctcctctctctctctctctcgctgcagccatagcttagctagagctagagctttcttggtgccgagatgggggtggtcagcttctcctcgacttcctccggcgcgtccacggccaccaccgagtccggcggcgccgtgcggatgtcgccggagccggtggtggcggtggcggcggcggctcaacagctaccggtggtgaagggagttgactcggcggatgaggtggtgacgtcgaggccggcggcggcggcggcgcagcagtcgtcgcggtacaagggggtggtgccgcagccgaacgggaggtggggggcgcagatctacgagcggcacgcgcgggtgtggctcgggacgttccccgacgaggaggcggcggcgcgggcctacgacgtggcggcgctccggtaccgggggcgcgacgcggccaccaacttccccggggccgcggcgtcggccgccgagctcgcgttcctcgccgcgcactccaaggccgagatcgtcgacatgctccggaagcacacctacgccgacgagctccgccaggggctccgccgcggccgcggcatgggcgcccgcgcccagcccacgccgtcgtgggcgcgcgagccgctgttcgagaaggccgtgacgcccagcgacgtcggcaagctcaaccgcctcgtggtgcccaagcagcacgccgagaagcacttcccgctccgccgcgcggcgagctccgactccgcctccgccgccgccaccggcaagggcgtgctcctcaacttcgaggacggcgaggggaaggtgtggcgattccggtactcgtactggaacagcagccagagctacgtgctgaccaaggggtggagccgattcgtgagggagaagggcctccgcgccggcgacaccatagtcttctcccgctcggcgtacggccccgacaagctgctcttcatcgactgcaagaagaacaacgcggcggcggcgaccaccacctgcgccggcgacgagaggccaaccacaagcggcgccgaaccacgcgtcgtgaggctcttcggcgtcgacatcgccggcggcgattgccggaagcgggagagggcggtggagatggggcaagaggtcttcctactgaagaggcaatgcgtggttcatcagcgtactcctgccctaggtgccctgctgttatagcatcaaatcaaattcatatatagatcaaatcaaatcttcttctcttccatcttttttgttgttcatcgtctgttgtttcatcttcgatttagagctgttctatcttcgactttctttttttgttttttgtctttattttgcatagaagtttgtcaggtcagagattgcaaatgatcgatcaagatcgagctgtatatgtacagccttattaggaaattaagtctagagatcattcaagtatgtacaattatctaatagtacatagtaataagttctgtttctttccg

SEQ ID NO: 14420 - DNA, 1653 bp, Oryza sativa
  ref <308>: DATABASE ACCESSION NUMBER: AK065009
  ref <309>: DATABASE ENTRY DATE: 2001-12-06
gtccctttcccaccgccgccgccgccgccgaaaaagaagaagaagccgacgaggaggcgaccatgagggccaaggtaaccaacctccccgccgtctcctcctcctccctaggctgtctacgcccatgtgttgttgcgtcgtcgccgtgcttgttcttggttggtcgggggctgtgattacaaagagagaggctcgagtggtgaattttcacgggaaaccctagcgaggcggcggatctcgccgtgtgcccccctcctccccacgagcaccccgtgtgttcacggcggtggagtggatggaacccgaggtgccgccccatcgcgatgttggcttgggtatctcggtagttgcatccatggctcaccatgctagtactactccctccccgtccaaaatgttattgctacttcctccgtttcataaggttataagttcatttctgggggaggaatggatggcgcgtggtggtgggttgctgtctcgtgagggggtttcctgccacgatgaaggcttcgtttttaacgcatacacttgatatgagccccctttatgatggtattttttatgatggtatttggttggcgagctgaattcctgttcttgcaacatctgatggatggtgcgtgatatttgcttggattacccgtttgtcagttagcataggaaattaggtttatccattagatgctgaagatgctcattaattttgtggtgctcactgtttaaataatactccgtagtactgtctgtaggaaattataactattatatactaatagtagctgttaagttgatcagtaattatgtgatgctcactgtctatatgctattcctgctgtagtttcagtaggaaattatgaatgctttcaattccctgtgaacatgaaattcagttacataactgcattatcggtgattacctaagttaccatttcatagtagttatttttgtggtgcaaagcttatccagggaagtacatcttaatcattcattcatgatttgatagactttgtaatatgaaattgtcattctgtattttgtcaatctgtattgccattttgccatccatgatgcccctacttcagttggtttgttcaacaatgtctatgctggcattcttgaatcacccaagcaatgaatttaaatcaactaaatttgctgtgatgctatgttgcttcttgcttctgcgttccagtttctgttcacccttgtgttctttgagagaaggctactgtgttgtgatcttttgcagtttcttagctatgctaccatgcttatcggctaattttcatcagttaactttctgtgatctgatacttctgtttgtattgtattcagtggaagaagaagcgcatgaggaggctgaagaggaagcgccgaaagatgaggcagagatctaagtaggcgaaggagatgggcgatcatggtgatggcgtgtcgcagtgatccatgtcttcggctgccaagctcgttgatatgtcaagctgcttggcgtggtgccaccattcgactgttgaatggcttatttacctgtgctgttatcatcttatatccctagttttaccaagagttttgcaccaagacatgtcggttcagttatgtgaacttgttatggagccgtatttgctgctaatgtttacctaccgttgagt

SEQ ID NO: 14421 - DNA, 1354 bp, Oryza sativa
  ref <308>: DATABASE ACCESSION NUMBER: AK065010
  ref <309>: DATABASE ENTRY DATE: 2001-12-06
gcttaaaccctagctcccgccgctccgcacagtaagctcacttctcctcctcctcccccttccatggcggccgcccgcgccaccctcccgctcccgcgtgtccccgccccctcgccgaggccccagctcaggcccttcccctccctccccgctcgccgcggcgcggtggcatgcggcgccggctcggcggcggcgggggtcgcggcgtcgctgcggttcggggacgtgatcgaggcgcagcagttcgaccgggacgcgctgacggagatcttcgaggtggcgcgggagatggaggccctggagcgcgggtcctcctcccgcggcgccgggaggagccgcgtcctcgaggggtacctcatggccacgctcttctatgagccgtccacgcgcacgcgcctctccttcgaggccgccatgcggcggctcggcggggaggtgctcaccaccgagaacgcccgcgagttctcctccgccgccaagggcgagaccctggaagataccataaggactgttgagggttattctgatattattgttctgagacattttgaaagtggggctgcaaggagagcagccgccactgcagacattccagttattaatgcaggcgatgggccagggcaacatccaactcaggctttattggatgtctattcaatagagagagaaattggcacactagatggaataaaacttggtttggttggagaccttgctaatggaagaactgttcgttctctagcctatttgattgccaaataccaaaacattaagatatactttgtatctccagatgttgtaaaaatgaaggatgacatcaaggaatacttaacttctcaaggtgttgagtgggaagaaagttcagatttgttggaggtggcatcaaaatgcgatgttatttatcaaacacgcattcaaaaagaaagattcggtgagaggatagatctttatgaagcagctcgtggtaagtacattgtggacaagaaggtcttagatgtgctgccaaaacatgctgttatcatgcatccccttccaaggcttgatgagatcacaatagatgttgacagtgatccgagagctgcatattttagacaggccaaaaacggcctctacatcagaatggcgttgctcaaacttctgcttgttggtcgctgacagctttcttagtgcgtggcgctgtggtgttgatgggggtcaaaaaatgtttgtcttaatcaatggctccaaatcaactgattagtattgtactaggcaccataagttagatccttgcaaggatttaaccatgtctagaactctagatgcataattttcgatgtaacaaaatattctgaaacagagatttgttgctccc

SEQ ID NO: 14422 - DNA, 2798 bp, Oryza sativa
  ref <308>: DATABASE ACCESSION NUMBER: AK065011
  ref <309>: DATABASE ENTRY DATE: 2001-12-06
ttggggcgaacgcgttgaccaccgaagtcaccatcatgcgatttccaccaagatcgccataagccgatcttcgccgtcttcgcccaataacgttgccgtaaaaccccaggcgatactgaaacagatccattgatgcctatccctgctgatatcgatttgccaagcaacaccaggcatacatttgatcatgtgtgcttcttggcacagaatgttcagctatcatctcacatgaaacgcatcaacagatggtcgttgcaacctaaagaaaggatggaaggactttgcagcaaaaaacattggcatacacctacacgcaatttgcatgtttcttttctacaaagcaacccacgttgcactgacagttgatgttcggtgaaaaacaactgttcaccttgtcccacagatatcattttgctatcgctgcactataggcttgcgatattatccatgtgaaactcttgcctaacctgccactatatctatactgatagccactctatcattgacacttaatgtggctcgtatgtttcatgtaaatttaagctagcgtctatatgtatgtctgctgctaaaaaaaaactaaacagacatgtttctgtgcctggttagcaatgtcatctatctgttaacctttccacaacaaaatttcaatgctttcattgttctgtccatttatcaaaaaagaaaactgttattttccttcatggtaaatgtactcaccatataatcaatagccaggtttactgtccccaggcggcgcgcgccctagactctagtttaaatgtatacccaacgcttttggctcaacaaggtggatagagatggaaaataaagaagagtggaggatggaggaggaagatagaacttgcatgtgggtcttacatctaaagtcttggaaaatatgccgaaaactaagaggggtggtgatgatctcgctagaagcttgcataagaacagaaaaacttgcaatggtggaagaactgactcattggcctcaggttgcttgcatggggaccctaatgaggatgtctggactgagctcaatgatgtggttaaatctaatttgtctaaaagtgtcgcgtcgcttagtttgcgcaatggagacacggtcttatttgcatgcacaggtgtagctgtagaccgccaggggcgtcttacaaagttcctcacttctgcaagtttggtagagcttttggttagagctctcaatgatacaaacaaaaaccatggtgacttagagctcgaagtgtaccatgaaggcaatgaagtatgccagggttatttgactgattttgatttggatcacaatctggccatcgtcgaaatctggactgactttgatgttcatgttggacttctccaacatgcggtggaatttctgccccattgtaaggtaatagctatagggcgtgaaatcactggcaaactgatggccaggagggtgcagttaatggatgatttaagtgtatctgaagatagtgaagatcttgactgtaaaatcaaagaggcttgggaaggtgcaccacttttttcttttgatgggaactttgttggcatgaacctttttttggctatgggaagagcctttttcctgccatggggcactattcagaagcattgggcatccctgcaaaacaagacgggacttccagagtcaaacagtttgaaggtttataggtttggaacaagttccacagctgagaaatctaacagccatccagaagtaaacaacgatattctcgacccggagcagattcatatagactctatgggctatccaaagtttccaacacacatgtttgctgatgggatgattttggttaatactttcgaagagactttcggcgatctacgtggtgaaggtgtatggagtaaactcagtaaaaaatcttgttctaacatagaccgcagtgttgtcgcactagcttcattcagtggagagagaaggttttttgcatgcacaggcttttttgttgaatggaatggttctacagttattttgacatcagcaagcttggttagaagttctggcgatgagaacaagattgttgacaacttgaggattgaagtgttgcttccaaacaaacaacgcgtagaagggatgttacagcattgtaatcttcattacaatgttgctctagtcagtgtgggttaccgtgctcttcgcccagcacatggtcagcttgattggtggggcaagagtagtaaggtagtggctgtagggcgttgcttcaagtcaggtgcattgatggctgcaagtggaacggtaaccccctggacaggcacactcgattgcgacttcctcgaacgttcgtcatgtaaaatcacaaaggctgggattggaggccctgttgttactcttgatggggattgtattggtatgaacttctatgatacgagaataggaacccctttcctgtcgtgggaggtgattgttgatattgtagcatcctttgaggaaaaaaggtggccagtgcctatgccatattgatgccacccggactgtgtgtaggatgagtctgaagatgatgaagagttggggttttcatccacatttggctgcaagctgaagtacaattacataaatggagagaaaagcgtgttcttttagttgctgttagatgtagaagaaacctaacctgaacttgttgtcaatctcactatatcctaaagcctgaacttttatataggaaaaacaagtgaagccagaacttgttgtcaatctcactatatcctaaagcctgaacttttatgtaggaaaaaaaaaagttaagccagaacttgttgtcaatctcact

SEQ ID NO: 14423 - DNA, 1109 bp, Oryza sativa
  ref <308>: DATABASE ACCESSION NUMBER: AK065012
  ref <309>: DATABASE ENTRY DATE: 2001-12-06
ggtctcccactcgcagccttctcctcctcctcactcccccacacgagctccgccgcctccccatcccccccgggaaccctacctcctccccgcgcggccggtgatggcgtcgaccccgccgccgccgccggtgataggcaaggcgggcaacctcacggtcttcatcacgccgccgtcgccggcggaggcggaggcggaggggtcgccggactccccgcggtcggagttcaccaccaccagcggatccccccgcgcggccgaggattcgacgccgcctccctctccgccgcgggccgagcagccgccggtcaaggaggaggcgccggcggcctccccgcagctggccaccccgccgccggtgaagacggtctcaccgccgctgcccgccgcgaagctctcctccgccgccgcccctcggcctccgccgccggtgcaggtgccactgccttccgcgaagctctcggcccctaggcccccgccgacgccgccgccggtgcaggtgccgccgccgcagttcgagaaggcggaggcgaggcccgatggatccatgctcgccttgttctgggacacggtcgcgcgcgtgcaagaagcgcacgccagcttggacgagtacatctcgaactggttcgggctggatcaatccaagtaccagtgggctctcaacgagtactatgagagcaacggaaaggatatggagtcagggaaagctgcgaagccgaaggaactcggtagtaaaatgtaggtctaaaaagctggattacatctgtatatgtcaatggggacatctcttcgattctcgccaattcagttcgattttatgtcgtatctgtctaccatgcagcaattcctttgtttgcttcatttgtgtagctaagctagagaactgtgtgaagtttcactgggaagttgatacctcttctgctgcaactagcaggcccggacacaatctgtaatctgttcgtgccaaagcgttgaaaaaagtccagtgcggcaaaaagcattttgttggctcctcgcaccaatgtgtagccctacgtattctttacaacattttgcgttgtaattgcatggtgctaatattctgcgaatgttttctgtgctattttttc

SEQ ID NO: 14424 - DNA, 907 bp, Oryza sativa
  ref <308>: DATABASE ACCESSION NUMBER: AK065013
  ref <309>: DATABASE ENTRY DATE: 2001-12-06
gagcagagcagaggtagcggcggcgttctcctgctcccgccgcattcgctcaccgacaccggtgagggtgaatccatcccatccggcctccagtttcgtctcctcgatcgccccgccgcttgcttgcgccgatccccatcctgcgcccggcgtcctcctgcttcccaccgcatcgtcgctcgccgctccccatcccaccactaatggtctctctccggctcatcgccgcattcgcgcccgctccgccaccgccaccgccaccgcggccccgacgagcgccgccgtccgcggcgcgcctggcgagcaacggcatagcctttgtcactgtggcagccgtagccgctgcctcgccgccagcgatcgccgcgctggccgccgagccggccaacgcgctctcgctgcccacttgggccgtccacgtctccagcgtcgccgagtgggtgacggctatggcgctggtttgggactacggtgagaggacggggctcaagggttggaaaggcctctcttggggaatggttccacttcttggtggagcgatgtgcgcttgcacgtggcatttcttctataattcggagtctcttgaagtgcttgtagcgctccaaggtgctctaacagtgattggtaacattacaatgtgcatagctgcatttcgcatcttcaaagcatcccaggaaagctcaaaaagttcatagagttacacctgacatgaaatggcaaacggcagatgctgcgaaggaagaagataaaagctgctgatggcttgcagctacttcagaaagatgtttgtatgtatcaattctacaaatgccagctaaagccaccctgaaatttgtgtattgacttggtttttttctagacaatgagtgtatttactcagataagaagaaaaattacctcacctgct

SEQ ID NO: 14425 - DNA, 1646 bp, Oryza sativa
  ref <308>: DATABASE ACCESSION NUMBER: AK065014
  ref <309>: DATABASE ENTRY DATE: 2001-12-06
cccgcacgcccgccgaccacctcaccacgacgcctttccgctcgcctttcctccccaaaaacgcggcacgaagcgatccttccttccttgtttccgaaaattcgccacgaagaaacacgtacgaaatccgcagggcagcttagcgttttcttcttctccgatccgatcggattcccctgcccccgatcgcgggagctgccatggcagaaggcgacgcctacgccgcctcggccgcggcctccgcggcgtcgccgcggacccccgcgccgccggagacgccgtcgacgcagaagaggaggcagcgcgggctcgtgtcgcgggtgtggaaggggatattcgggcggcgcgaggacgtcgagaagctgctccaggcgctctccaaggaggaggaggccgtgcgctcccgcctccgccgccgcgcccgcgcctcccgccagtccgcccacaacgtcctcgccatcgccgccgcgctcgagattgcggctgttggatatgcgattatgactacaagatcaccggacctcagctggcagatgagagcaacccgggtgctgcccatgttcctgattcctgctttagctgctctcatttactcaactattacaagcgtcacgaaaatgcttgacaacagagatcaacatactcttgaaaacctccgtgctgaaagacaggctaagattgatgagttgaaggagagaacgaattactacactactcaacaacttatacagagatatgatcttgatcctgctgcaaaagctgctgcagcaactgttttggcatctaaactgggtgctgattctggattgagagtcttcttgggagatgagtcgaatagggatgcaacattgagtaaaagtaatgatgcccaaactactggaccgaggcaaagaaaaccaggacacttgagcaacagcactggaaggacatacggccctgagtcattaggcggttcatatgcctatgatggtaatgaaggtgtcaccactccaaatcagaggactgttgaccacttcagaggtccagctggtaatgatgggggatggctcgcacgagcagctgctctgcttgtaggggaagatccaactcagtgctatgcgttaatatgtggcaactgccatatgcataatggtcttgcaaggaaagaggactttgcattcattacgtattactgcccgcactgtaatgccctcaatggaccacggcagcatgatgagcatgaaatggtatctcctggtaaggagactcctatttctcattccgatggcagcattggccacgccggtgcaaaccttgcaaactcaggtgccggcagccctatcgtgaaagacttacccacggttgaagaattacctgcggaaagttctgttgctactaacttaccatctgccgaagaactacctgcagaaagtcctattgccaacaacttaccagcagttgaagaattagctgcagagagtcctgttgccagtagcacacctgctattgaagaactacctgcagaaggtaccgtggagaaggcaagtattgatcatcctgccagttgatcttttgtaaagtaactgcatatgtatttgttcatggagggcttttaaatggctcacggtggttttatagtttgctgcactgctcgttgctcagaaagc

SEQ ID NO: 14426 - DNA, 1818 bp, Oryza sativa
  ref <308>: DATABASE ACCESSION NUMBER: AK065015
  ref <309>: DATABASE ENTRY DATE: 2001-12-06
gggccatcgcatttgtgaagaaaaaaaaataaaaaaaaaataaaaatccccttgccctattccccacccaccaccagctcgccgctcctcgccgcctccgccgcggggcgtcattctctccggtgcgccgccgccgcgtcgggccccgaaatccgcctccccccaccactgttcttcgagagaggcctcccgttaactcgacggctgcgcccgcccagtcggagatgaagcaggtgtcctgtagtgttgtaaataaatgtttggcctacaatccatgcctctcaagaaactactatcaacggtctcataccgtgaagttgcaaagatcacaagctggccagataattttgcctcgcaaattgaggaaatctacgctatggcagaccaacttcactcagaggcagattgcaacgcattgttcctctgacctgagtacctcctgcagagaagaattgcccagctatttaacagttaatgttttgaaagatcagtcatgtgcaagacaaggaatctttcgtaaagtgattgtcatcttgaatcctaattctggatttcgcagctctcgtgaagttttctaccagaaagtacaaccaacattggagctttcaggctttatgatgcaagttgttgaaacagcgtatgctggtcatgcacatgctcttgcttctactgttgatctcagcacatgtcctgatggtatcatatgtgttggaggtgatggaattgtgaatgaggttttgaatggtctacttggtagagatgatttggaagaggctattcaactgccaattgggataattccggctggttctgagaactcgttagtgtggactgttcttggtatcagagatcctgtttccgctgcaactactttagccaagggtggtatcactccaatagacgtgttctctgtcaaacggacccaagctggaattactcatttcggtttgacagcttcctactatggttttgtggctgatgttctgcaactatctgaaaaattccgtctgcactttggccccttccgttatgtcatcgctggtgttcttaaatttctatcattacctcaatacagatttgaggtcaactatctccctttgtcacccaggagaaatcacaaattactacctgtgactgaaaagtgtaatgatcatcttgctgctgatagcagtgctgaagataactgggttactaggaaaggagaatttcttggcatttttgtgtgcaatcatttctgcaagcctgcacagggattactctcaccggttatcgcgccaaaagctcagcataatgacggcagtctagacttgattcttgtccatggaagtggaagactcagattattctgcttctttatcgcctatcagttttgctggcatcttcttctgccttatgtggaatatgtcaaggtaaaacatgttaaggtcaggccaattggcaaaacccacaatgggtgcggtgttgacggagagcttattcttggggagggccaaacagaatggcagtgctcactgctcccagcacaaggcagattgcttggccggcatcgcagcgcatctgagtagatttctaaccaccaaaggtccaaattcaagtgtcaaactgaggaaccacttcaatgtatgaattaaattaaatcggagaaattatgcatcagagaatgcttctttctaccattatatttcactattttttgagaggttgtaaatgaggggaaattatgggttttggggagcttctaacccccaccattggccaattgtatattctgaaatgaaaaaaaaaagaagaaaaatctctacttctgactttacatgg

SEQ ID NO: 14427 - DNA, 1254 bp, Oryza sativa
  ref <308>: DATABASE ACCESSION NUMBER: AK098879
  ref <309>: DATABASE ENTRY DATE: 2002-08-28
gtagcttacagctcacagcaatcagctaagccagtagccaatcctcactcactactcatcttctcttcccatctttgttgcttgcattcagagatcatccaatcggccatggctgatgaaatccagcatctgaccagggccttctcagggctcggtggcctcggcgtggacgagccggcgatggtgtcggcgctggccaagtggcgcaggcagccggagaagctgtccgggttcaggaagagcttcaatggcttcttcaaggatcatggcggcgtcatcgagaagtgcgaggaggagtacatgctccacctcgccgccgagttctcgcggttcaagaacctgatggtgatgtgggcgatgcacccgtgggagcgcgacgcgcggctggcgcaccacgtgctccaccaggcgcacccggcggccatcgtcgtggagatcgcttgcacccggacggcggaggagctcctcggcgctcgcaaggcgtaccaggcgctgttccaccactccctcgaggaggacgtcgcctaccgcgccagggacaagccctactgcggcctgctggtcgggctggtgagcgcgtaccggtacgagggcccgagggtgagcgaggagacggcgcgcgcggaggcgaaggcgctcgtcgccgcggtgaagagcgccggccacgcggcggcgaagctggtggagaacgacgacgtcgtcaggatcctcaccacccggagcaagccgcacctcgtcgagaccttcaagcactacaaggaaatccatggccgccacatcgaagaggatcttgggcacgaggagacactgagggaggcggcgctgtgcctggcgacgccggcgaggtacttcagcgaggtggtggcggcggcggtgagcgacggcgccgaccaccacgcgaaggaggcgctgacgcgggtggcggtgacgcgggcggacgtggacatggacgccatccgcgcggcctaccacgagcagttcggcgggaggctggaggacgccgtcgccgggaaggcgcacggctactacagagacgcgctcctctcgctcgtcgccggcggcaagtgacccggccgatcagccattgctcctccgatctgtcgcctcgccttgtcagtgcgtcgccatcgtgtacgttgttgctgctgctgttgttgttgttgtgtttttgttgcatgcgtggatcgagacttgtaaacttagcatttcgcagcagagctgttggtatggaataaggtcgatttaatttttctt

SEQ ID NO: 14428 - DNA, 1946 bp, Oryza sativa
  ref <308>: DATABASE ACCESSION NUMBER: AK098880
  ref <309>: DATABASE ENTRY DATE: 2002-08-28
gacaacttgtaggcagcttctctctgcatacaagaggaggtctctccttcttcagcgactccctcaagatcttgcccaaacttgctgagatctgtaagagcagtaggcgaagatggtgaagatctgctgcatcggagctgggtacgtgggcgggccgaccatggcggtgatcgccctcaagtgcccggcgatcgaggtggtggtcgtcgacatctccaagccgcgcatcgacgcctggaacagcgagcagctgccgatctacgagccggggctcgacgaggtggtcaaggagtgcaggggcaggaacctcttcttcagcacggacgtcgagaagcacgtcgcggaggcggacatcatcttcgtgtccgtgaacacgccgaccaagacgcgcggcctcggcgccggcaaggcggccgacctcacctactgggagagcgcggcgaggatgatctccgacgtgtccaagtccgacaagatcgtcgtcgagaagtccaccgtgccggtcaagacggccgaggcgatcgagaagatcctgacgcacaacagcaagggcatcaactaccagatcctctccaacccggagttcctcgccgagggcaccgctattgacgacctgttcaagcccgaccgcgtcctcatcggcggccgcgagacggcggaggggaggaaggccgtgcaggcgctcaagtcggtgtacgcgcactgggtgcccgaggacaggatcatcaccaccaacctctggtccgccgagctctccaagctcgccgcgaacgcgttcctggcgcagaggatctcgtcggtgaacgccatctcggcgctctgcgaggccaccggcgcgaacgtcaccgaggtggcgtacgccgtcggcaaggactcgaggattggccccaaattcctcaacgccagcgttggattcggcggctcctgcttccagaaggacatcctgaatctggtgtacatctgcgaatgcaatggcctccccgaggttgcgaactactggaagcaggtgatcaagatcaacgactaccagaagagccggttcgtgaaccgggtggtgtcgtccatgttcaacacggtgtcgggcaagaagatcgccgtgctggggttcgcgttcaagaaggacaccggcgacacgagggagacgccggcgatcgacgtgtgccacggcctgctcggcgacaaggcgcagatcagcatctacgacccgcaggtgacggaggaccagatccagcgggacctcgccatgggcaagttcgactgggaccacccgatgcacctgcagccgacgagccccacggcgttcaagcaggtgagcgtggtgtgggacgcgtacgaggccaccaagaacgcccatggcctctgcatcctcaccgagtgggacgagttcaagacgctcgactaccagaagatctacgacaacatgcagaagccggcgttcgtcttcgacggccgcaacgtcgtcgacccggagaagctcagggagatcggcttcatcgtctactccatcggcaagccgctcgacgcctggctcaaggacatgcccgccgtggcatgataagattcatgtgaattttaatcgatcgattcgattctcaacctcgattcgagctgcaggaattcgacttggaagaagagcaatgcaagatgggttggccacttaaaattctttatagttcgttttttttttttttgcaggagacgacactaccattttctcaggcataaaaaagttgggtgttcttgttagtaaaatcatcgtcatcgctgttgaagttttttttttcatcgtttgcactgttctagatcactataatccccaccccactccccctccccctccccctccccctgtcatcatggctctttctgtttgagggccatctgaacgaaaatttacctgtattattcagtcaacttgttatagcagattggttattccattgtac

SEQ ID NO: 14429 - DNA, 1019 bp, Oryza sativa
  ref <308>: DATABASE ACCESSION NUMBER: AK098881
  ref <309>: DATABASE ENTRY DATE: 2002-08-28
ggtgtttggtaagcctcgtctcgaaatggcgacttgctccgctgcttgcgctcgcccagccgtcgtcgtcttcgcgtcgccggccgccgcgcggcggcgcgccgcctcctccgtctacctccctggtcggcctctgcgcggcggcggcgtcgtgcgatgcagcgctgggcctgtaagcggtgggatgatctcgaagaaggtggcggagctgtgggcggcggcgaggagcgcgtcgccggtggcggtgatcgccgcggtggccggagcggcggtggtctacaaggtggggtccagtctcctcgcgccgcctcctccgccggcgaggccccgggaggagcccagcgaggaggccccgccgcctccggagccggtgcaggtgggggagatcacggcggaggagttgctgcagtacgacgggtccgaccccgagaagccgttgctcatggcgatcaaggggcagatctatgacgtctcccagagcagattgttctatggacctggtggaccatatgcattgtttgctggtaaagatgccagtagggcgttggcgaagatgtcctttgagccacaagatctgactgatgatatatctggcctaagtttacttgaactcagtgcccttcaggactgggagtacaagttcagcagcaagtacgtgaaggttggaaccataaaaaaggtgctcgtagaacagggtggcgatagcactgccgatgcaatagaggaggcagctgtcgatggtgaagacagcatcctgactgctaagatgtctaatcaattactatatgaggaagaaatggaagtcggtagtgatgatccatgaaggcttcaggagttgaaaactgaattgccttctagcagctaacttcacgcatcaagaattcaagacaaataatcgcagaatgatgtttcatgaattcatgtgtctataggtgtagattacaagaagatactgcattactgctgtcgatttccctttgtcaatactcaaggatatgttgccgtaatgccatgttatt

SEQ ID NO: 14430 - DNA, 2448 bp, Oryza sativa
  ref <308>: DATABASE ACCESSION NUMBER: AK065016
  ref <309>: DATABASE ENTRY DATE: 2001-12-06
gatgttagccacagaatgcatccccatcccaagcctctcagggcgcaggctccggcgaacccaaccctagtccggtagcccccgacgccgccccaccgcgccgacgccgcgcatcctccccgcggccctcggaggcatctcctcgcccgtcgtccctcggcgcctcgccatcgccggcggtctgcctccgctgctcggcggctcgcccgacgcacccacgagtatcttccccttccctggcgtaaaagaaaatctcccgtctcgtctcctccgctctttgcgccgtctcgctgctgaacaggggaggggcggcgatctccatctgccgagcagagcaggagaggggatcctggtcatcatttgttgaaaaatggccacagaagatacttctcacatttctggtagttctgagtcaacaattccattgctagaacagcttgctgaagtatttggcaagctgaaatctcacacagaaacatccttgcaattgcaaaacggcatcaattgggaagatatcaaagcacatttcctgaaccttgagaagtcgtacaaaagtaagtgcgatgaacttgcagagaagcagaaggcattagaagaaaagaaagctgaatcctgtaggcttattgcagagaaggaagctaatgtttctgcaaaagagcgtgctttcctgaaccagtttcaggagctaagggatacagctgtctctgccctttcagaggtgcgacaaaaatataaggtggagcttgctggtatacttgatgccaatggaagcaaagataaaaaggtaagaacctcaaccaatgacatgaatgcgttgtgtgcttcagaggagaatacaactgctagtgggctgggtgaaccatctgaagcttcacctgttgatgttaagccacgtcctgtattgaagcaactatgtgagcagatggatacagcaggccttctgaaatttctttcagaaaattggaaaaaactttctagccttcgtgatgaactttctgctgcactaagatgtgctactgaccctgcacgctttgtgcttggttccttggagggtttcttcccatctgaccatactagttcacctgggaataaacagattattctccaaggccagcgtagaagctgcattattttgatggaagctataacacctgcactagctacgaaggagccaggtgacaaccacccttggagctctgaaattagggagctggccaaggcgattgcagaagagtggaagagtaagctagctgaggttgacctcgatgcttctgatggctactcattggaagcacaggcattcctgcagcttcttacaacatttaatgttgattcggtgcttgacgaggatgaactatgcaagcttgtagttgccgtctctcgtcgcaagcagactgctgagcttttgtcgctccctttgtcttaatgagagaataccagatattatcaaggaattggttaatagacacaggcaaattgatgcagttcaatttatacatgcctttgggctttctgagagcttccctcctgcacctctgctgaagacatatgtggaggaattaaaagattcacttggcaataatggggatggcaacgcggcttctctgaaggatgacccaaagactcgggaactacttgcattgagggctgtaataaaatgcattgaagagtataagcttcagaaggactatcctcttggacctctccagaagcgtgttgctgagctaaaatctaagggtgagaaaaggccattggaagctgggcgccataatgcaaagaagcctcgcactttcggcaattcagctgctcgcaggccaccaaatcctgttggttcagctggtcgcagaccttcaggcccggctggtacttggcagcggccccctccaccaatgccttcctatcctgatcgatatggacatgcagatcggtaccattacactgcaccctctgcaacatatgatcctcctgcttatgcttcttacagcgaaccatacagtgcctcaaagccataccagtacacaccaggctcagtagctcctgcatcatacaactcgaatcagttcaaagtagcttatggtggacctggtgccccgccaacagcaggcggctacggaagctacaacgatgcagcagggcagtctacttcgagtagctattcgggttattctggttaccacccttcactaccaaggttataacttgcatttgctatgctacgctggttatgataaagcacaatctggctatcaatctcgttcagagttcagaccccagatgtaacctttagatatactctagtggattttgtagctgtaactggtgtagatcttgatcttccaaggctggtcgtgtgagaagccggtcgattttagagactttttttttgtcctgctacatgtatccagttgaatactgttgcgtgtacctaacctgttttgaatattctcc

SEQ ID NO: 14431 - DNA, 1627 bp, Oryza sativa
  ref <308>: DATABASE ACCESSION NUMBER: AK065017
  ref <309>: DATABASE ENTRY DATE: 2001-12-06
acatcgccagctcgtccgcttgccccgcaccgcaaccgcggcgcggaggaggagagctctcgcgccgcgcgtgcgcgcgcgcgtgcgggcgtgcgcgggcgatcgaatccgatcgccatgaccggcgccgacgagccgtccatcacccgctggaccttcgaggacttcgaggtctactacgaggtgcgcctcggcatccgccgcgagcccgggggagatgaagacggcgacggcgacggcggcggaggtcgcggctacgcgccgcttggatccggctccgcgggcagcacccgccccacccgccgacctggccgtcttcgagcagttcgagcggctggagaggaaggtggagctgcggaatggagcaattgaagctgggcctccgcagaaatccctacttccttcttttgaatctgcagaaatgcgcaatttagctgagacattgttgagggatatcattcgtgggagtccagatgtcaaatgggaaagcattaaaggtttggagaatgcaaagcgtcttctgaaagaagcagttgtgatgcctataaaataccccaagtacttcaaaggtctgctatcaccttggaaaggtatattgctttttggtccaccaggaacaggaaagacaatgctagcaaaagctgtggctactgagtgcaaaacaaccttcttcaatatttcagcctcatcaattgtcagtaaatggcgtggtgattcggagaaactagtgaaagtcttatttgagcttgcaaggcatcatgcaccatccaccatttttctcgatgagattgatgctattattagccaacgtggtgaagctcgtagtgaacatgaagccagtcggcgattgaagactgagctattaatacagatggatgggttaactaagacagatgatctcgtttttgttctagccgccacaaatttgccatgggaactggatgcagcaatgttgcgccgtttggagaaacgtattcttgttcccttaccagagcaagaagctagacatgccatgtttgaagagctcttgccatctgttcctggcacaatgaatatcccatatgatgttcttgtggagaaaactgaaggatattcaggctctgatatacgccttgtgtgcaaggaggcggcaatgcaaccccttagaaggttaatgtcggttcttgaaggaaggcaagaagaagtgcctgaggatgagttgcctgaagttggtccagtaacgacagaagacattgagcttgcactaaggaatacacggccatctgctcatcttcatgtacatagatacgaaaaattcaatcaagactatggcagtcatgtcctcagctaaaggtgagttgcaaaagcaaaggttatttgcacaacatagattgctgaatttcctccttgaagcttgaactgttccctagtattgtggaaatcctcctgacggaatcttgccgataagacttttcatttgcacctagtatggttgatagaatgctgaattaccgctgatgtatttacaactaatgagcattctctttacacaatatttgttcctgtaccatgtatattatcatttgtttgacgaataataagctatttgggtaatccttgccctttcggaatatgagagaaacattgt

SEQ ID NO: 14432 - DNA, 3475 bp, Oryza sativa
  ref <308>: DATABASE ACCESSION NUMBER: AK065018
  ref <309>: DATABASE ENTRY DATE: 2001-12-06
gagcaaagttcagagttcacaaaccaccacacccagcggcaccatagacaccaagcagaacaggctgctgagctccggccgaccgaaggtgctccattctctctcctcatcattattgatatttgcaggatcgatcacttgaggtaacatgggcctcacgtgtgatacacaaactgcaaaactggccattatactactagcattcatactgctatgtcatgggattggcaacgtcgattgccgtgggaacagagccgatcagctctcactgcttgatttcaagaagggcatcaccaacgatccatatggagccttggccacttggaacaccagcacacatttctgtaggtggcaaggtgtcaagtgcacctccactgggccatggcgcgtcatggcgctcaatctctccagccaaagtttgacaggccaaataaggtcctctctcggaaacctatccttccttaatatacttgacctcggcgataataacttacttggctccttacctcgccttggcaatcttaagcaacttcaggcactctatctgtataaaaacaatttgacagggataattcctgatgaacttacaaattgttccagcttaacgtacatagacctctcaggaaatgccctaactggtgcacttcctccaaatttaggctctctgtccaatctagcttatctttatctttctgcgaacaagctaactggaaccatcccgcaggcccttggcaacatcaccaccttggtagaaatctatcttgatacaaatcgattcgaagggggcattccagacaagctttggcaattgccgaacttgacaattttggccctaggtcaaaacatgctatcgggtgatatcccatttaacttctccagcctttctcttcaacttttaagcttggaatacaatatgttcggcaaggtattgccacaaaacattagtgatatggtacctaatctccaaattcttcgcttggattacaatatgttccaaggtcaaatcccatcttctctaggaaatgctttgcagctaacagaaataagtatggcaaacaactacttcaccgggcaaattcctagctctttcggaaagctttctaaactctcctatattagtctcgaaaataatagcctagaggcttctgatggccaaggctgggagttcctacacgcgttgagaaactgtagtaatctagaactgttgtcactggctcaaaatcagctacaaggagaaataccgaattcgattggggaccttccgctcaaacttcaacagctagtgctgagtgaaaataagctatcaggataagttccagcaagcataggaaaccttcagggcctgtttaggttaagtctagatttgaacaatcttactggcaaaatagatgagtgggttccaaagcttacaaaactgcaaaaattacttctccacaggaacaactttagcgggtcgattccatcgtctatagcagagcttcctcgtttgtcaacgctttcactagcatataatgcatttgatggtcccataccatcctcattgggaaacctttcaggactccagaagttatatctaagtcataataatctcgaaggtgtcatacctccagagcttagttaccttaaacaactaataaatctaagtttatcagaaaacaagcttactggggagatccctggcactttgagccagtgtaaagacctggcaaacatccaaatgggcaataacttccttactggcaatatcccagtaacttttggcgacctaaagagcctgggcgtactcaatctttcccataacagcttgtcgggcacaattccgactacactaaatgatctaccagtcatgagcaaactggacctttcatacaatcgtctccaaggaaaaataccaatgactggaatatttgcaaatcctactgttgtttcggtccagggaaacataggactatgtggaggagtgatggatctccgtatgcccccatgccaagttgtttcccagagaagaaaaacacagtactatttgattagagtattgatccctatatttggcttcatgtcactcatattagtggtctacttcttacttcttgagaagatgaagccaagagaaaaatatatatcctcgcaatcttttggtgagaatttccttaaagtctcatataatgatctagctcaagccacaagaaacttctcggaggctaaccttattggcaaaggaagctatggtacggtgtacagaggtaagttgaaggaatgtaagttggaagtacccgtgaaggtttttgaccttgagatgcgaggtgccgaaagaagcttcatatcggaatgtgaagctctcagaagcattcaacatagaaatcttcttccaatcataactgcatgctcgaccgtggacagtacgggcaacgttttcaaagctttagtttacgagtacatgcctaatggcaacttggacacttggatacatgacaaagagggtgggaaagctcccggacgtttgggtttaagacaaacaattagcatatgtgttaacatagccgatgcactggactatttacaccatgaatgcggaagaacaactatccattgtgatttgaaacccagcaatatacttttagctgatgacatgaatgctcttttgggagattttggcattgcaagattttatatcgactcttggtcgacatcaacaggttcgaatagtacagtcggtgttaagggtaccatagggtatattcctccagagtacgcgggaggtggtcatccatctacttctggggatgtttatagtttcgggatagtgatcctggagcttataacaggaaaaagaccgactgatcctatgttcaaagacggactcgacattatcagctttgtcgagagtaactttccacaccagatatttcaagtgattgatgctcgactcgcagaaaagtccatggactccaatcaaacaaatatgacactggaaaatgctgtccaccagtgcttgatatctctgctacaacttgcgctttcttgtacgcgcaaattaccaagtgatcgcatgaacatgaaacaaatagccaacaagatgcattcaatcaagacgacatatgttggattggaagctaagaaatatggtccggcatgtaatgaacaagatgcatgaaaccccacgcgttattacaggcgaccctgagtcgcgcacaacaattgcaacatattgataagtgtatagtccaacaagaagaaaatggttcttgtgtgttagaagttaagataattaaggtgataatatgaagcaccaaagcgtaccttctaacggtgataatatgaagattggtgattgtgactttatgtcatggtttatttataacaatatattacttcaataatgtaatagtatatgtatacgtagataatgatgttgtacctagcatgatcttgtattatatgcaagttgaactaataaaaaaccatttctgcaggc

SEQ ID NO: 14433 - DNA, 2378 bp, Oryza sativa
  ref <308>: DATABASE ACCESSION NUMBER: AK065019
  ref <309>: DATABASE ENTRY DATE: 2001-12-06
gtctccacccccaccttcgcccacctcgcatcgaccatggcgccgccgtgctccatctcctccgcctcccacctcctcatcactgcctccctccccaagccctccctccgcccacctcgcctcccccaccccaagcccctccccgccgccctcctcgccctcgccgccgccgcccccacgctccccgccctcgccgacgtgcccgcgccacccccctccccgacccaggatgtccaggtactagaggccccctccccggccgccaaccctttctccaacgccctcctcaccgcgcctaagcccacctcctccgccgccgccgacctccccgagggcgcccagtggcgctacagcgagttcctcagcgccgtcaagaagggcaaggtcgagcgcgtcaggttctccaaggatggtggcctactccagctcaccgccatcgacggccgccgcgccaccgtcgtcgtccccaacgaccccgatctcattgacatcctcgccaccaacggcgtcgacatctccgtcgccgagggcgacgccgccggccccggcggattcctcgccttcgtcggcaacctcctcttccccttcctcgctttcgctggcctcttcttcctcttccgccgcgcccagggcggccccggcgctggacctggcggcctcggcgggcccatggacttcggccgctccaagagcaagttccaggaggtgcccgagactggcgtcaccttcgtcgacgtcgccggcgccgaccaggccaagctcgagctgcaggaggtcgtcgatttcctcaagaaccccgacaagtacaccgcgctcggggccaagatccccaagggatgcctgctcgtcggcccgcccggaaccgggaagacactgctggcgcgtgccgtcgccggggaggccggagtgccattcttctcctgcgccgcgtccgagttcgttgagctgttcgtcggtgtcggtgcctccagggtcagggacctgttcgagaaggccaaggccaaggccccttgcatcgtcttcattgatgaaattgatgccgtcgggaggcagcgtggtgctgggctcggagggggaaatgatgagagggagcagaccattaaccagctcttgactgagatggatggatttgccggcaatagcggtgtcattgtgctcgccgcgacaaacaggcctgatgtgctcgacgcggctcttcttcgccctgggaggttcgatcggcaggtcaccgtagacaggccggatgtcgccgggcgtgtcaagattcttgaggttcactcgagaggaaaggctctggcaaaagatgtcgactttgagaaaattgcccggagaacccctggtttcactggagctgatcttcaaaacttgatgaatgaggctgctattcttgctgctcgtcgtgatctgaaggagattagcaaggatgagatctctgatgctttggagaggatcattgctgggcctgagaagaaaaatgctgttgtttcagaagagaagaggagacttgtggcttaccatgaggctggtcatgcccttgttggtgccctcatgcctgaatatgaccctgttgctaagatttccatcattcctcgtggtcaagctggtggactcacattctttgctccaagcgaggagaggcttgagtctggattgtacagcaggagctacctagagaaccaaatggccgtagctcttggtggaagggttgccgaagaggtgatctttggccaagaaaatgtgacaactggggcctccaacgattttatgcaggtttcacgtgttgcaagacaaatggttgaaagatttggattcagcaagaagatcgggcaagttgcgattggtggacctggtggaaatcctttcttgggccagcagatgtcgagccagaaggactactcgatggccaccgcggatgttgtggatgctgaggtgagggagctcgtggagaaggcctactcaagagcaacgcagatcatcacgacacacatcgacatcctccacaagcttgctcagcttctgatggagaaggagacggtggacggggaagagttcatgagcctgttcatcgacggtcaggcagagttgtttgtcgcttaattgcgttgtgtgttcatccccttgggtgaaatggagaaggcgaatttgtaggaagcacatcaatttaggcgagatgtttttgcatatacttgtatagttcattgtaaagaatggcaaatactgacattgatcaagtaaacagttggtgcttacgattatagcaccgctaactaaacatgattccactgtgctcgctgtacatctgcactgaagacatgtcgcagttgcaggcttgcagctatttcatccgtgtggactttaatatgtttgaatccagatct

SEQ ID NO: 14434 - DNA, 2818 bp, Oryza sativa
  ref <308>: DATABASE ACCESSION NUMBER: AK065020
  ref <309>: DATABASE ENTRY DATE: 2001-12-06
gacctctcgcccccgaaatccacacctcacaacgccccttacgcccacgcgagcgaacccacaagaaacacgcgcaaaatctcccctcccgccgcgaattcgctcggtttgatcgcccgaagatcgaagtgtttcgcgcgggattcgtgctctgcagcttaagtttagtgcggccttctagctgctcggatttgattgattgattgattggcgggtggtcagtcgatttaagttggttggattggtggtagcgcgaaatccgaatttcggaagttggtttggtggggggaaggggaattgcggttttgtggagtttgatttttggtggtttagaggttgggggaggtcgcggcgaggatgtccgtgccggcgattgccgtgtacaccagcccgccgggggcggtctacacgtcgtcgtcgtcgtcggagcttgaggcgagctcccggggctcggcgccgtgcgccaccgcggctcccccgtcgccggcgagctcccaccgccaccaggccatcgctggtgggctatcctgcctcttctcctcacctaccgccgcccctcgcgccgccgcggctcaggacgagctgggcgcgctctggcacgatagatccggcgaggcgacggccgtcggcggcgggggcgggggcgggggctactcctacccgcagccgtcgtcgccgttcaagtggcgggacatgctccaccacagccccgtgccgctgttccacagcccggcctcctcgccggcgtcacggagcccctcggcgtcctggctcgccggccgcgagcgcgagcggctcttctccagcttcgtgcgcaacgcgctcggctcctgcgtcgattacgcgccggtcgccgcgctgccgctcggcgtctcggctgctgtcggtgtcggtgccggcgagctcgcgttcgagctcgacgagcacctctccgaggcggagccgtcgtgcgagccgtacgctcgcgacctcctcgccggcgcccaggctcgccaccgcatcttccacgacgagctcgtcgtcaaggccttcttcgaggctgagagggcgcaccgaggccagacgcgggcgagtggtgatccgtacttgcagcattgtgtggagaccgccgtgcttctagccaagataggcgcaaacgcgaccgtcgtctctgccggactcctgcatgacaccattgatgatagcttcatggattatgatcagattttccggatgtttggtgccggcgtggctgatctagttgaaggggtctccaagttaagccacttgagcaaacttgctcgggacaacaatactgcaagcagaaccgttgaagcagaccgcctgcatacaatgtttcttgcaatggctgatgcaagagcagttctgataaagctagcagatcgtctacacaacatgaagacaatagaagctttgcctttggtcaaacaacaaagattcgctaaggagactatggagatatttgtgccgttggctaatcggttaggaatcgctagctggaaagaccagctggaaaatatttgctttaagcatttgaacccagaggagcacaaggagctttcctccaaacttgtcatatcttttgacgaagcacttcttacatctactctggataaacttgataaaggtctaagagatgaaggtatttcgtatcacagtctttctgggaggcacaagagcctgtacagcatatactccaagatgataaagaagaacttaacgatggatgatgttcatgacattcatggtctacgtcttgtggttgatacagagcaggattgttaccaagctcttgacattgtccataagctctggccccgagttgctggacgatttaaggactatatcctgcatccaaaattgaatgggtatcggtcattgcacactgtcatcatgtgtgagggcatacacccatttgaagttcagatccgaacaaaagaaatgcatctacaagcagagtatggatttgctgcacactggagatacaaggaaggtggttgcaagcactcttttgtactccaaatggtggaatgggcaagatgggtgctcacatggcaatgcgaagcaatgagcaaagagcggtcctcaggtttaggccgctctgatgccattaggccaccatgtccatttccctcgcattcggaggactgcccttattcttacactcgccagtgcaaccacgatggacccatctttgtgattatgcttgaacatgataagatgtctgtccaagagcttcctgcgaactcaactgtagtcgatctgatggagagagtgggggccaatagtccaagatgcagcccttacagcttcccactgaaagaggaattgcgcccgagggttaaccacaagcccataagtgaccctaaccggaaactgtgcatgggagatgtggtggagctgacgcctgcgctcccacacaagtcgctaactgagtatcgggaagagatccagcgcatgtatgaacgaggcgggtttgccctcgccaccacccgggacggtccggcaagctgacggtgtcacgactaccatgttaacctcctgttgtacaatgccctcaacctccatttgcttccttgtatatatcccagatactaattcttgcaggagagagccaaatgaacacccccagctgaattgtcaaaggtgtggagttaggtgttcagtgttctgatccaagctgtctataacagtaaacagtttacaagctgatcaaatctgtactagaaattcagatcctcccaagattcaggagggggggacattcactgccttgtccgtgtgttgttgtaatacatctactgtatattccagtggc

SEQ ID NO: 14435 - DNA, 1401 bp, Oryza sativa
  ref <308>: DATABASE ACCESSION NUMBER: AK098882
  ref <309>: DATABASE ENTRY DATE: 2002-08-28
attgtgttctctccccccacccttccaatcccaatctcttctcttcccctctcgttagggttaggtttttattttctctctctcgatttctctcttcgcttccacttcccaaaattctcgagtcaaacctcgtggcgttcggccatggcgacggcggcggtgctcggatcccacgacgccctcgacaaccggatgcatctgggggccttcgccgtgtccccggcgtcgaagccgaggcggaggcggcacagcaaggcggcgtcgccgccccccaaggtggcggcggtgagctcgccgccggtggttaagtcggcggcgagggtggcgtcgcctcctcccaaggctgcggcggcggcggcggtgcctcaggggcgtcgctcgccggtggcgaggaagcaagggtcgccgacgaaggagttgccgaagcagaggctcgtgatgggggagatccggatcctcaagcgcggcgaggagccgccggtttcccctccgtcgcctgctccggttgcggcgcaggccgcggcggttgaccagcgggcgccccgtgttccggctgtggcgcaagccgcgccgactgaccagaaggcgcctcgccccgccagatcgaagcagcagcagcacacggccgctgtgccgacgaagatcaagtccgtcgccgacgcgccagtctacgccggcccggccttctcctcggcttcgcctgagccgagctccctccccttcccggccttcatccgtcgcgccgaggccgaggcgacccgcggcctccgctgcctcctccgcatcggcgagctcccttgacggcctctctcaccgccgtcttccccggagccgtgagccgtgcacgctcctctcctcgtttctcctcctcttctctgatggatggattgcttggtggtttcgatccgatcgaaagcttgtccggatcagatcccggctgcgttccgatcaaactctcccggtattttttcagaggacgagtttgggggaacgcatctgccggtggttggatttggtagtggttaggttttcaaaagtttcgtggtggaattatgttgggggtttgcttctacgaagaacaacactaggttgattagttctttgtcttttgagtttggtttttaggtggtgtcttggttgggaaaaattggggttagtttggtggaaatttaggctggcttggtgttgctgatctgttagtacagcagtagtggtaataatagtagaggtttggttagatgaataattcgtcggtagtgattgtgatttgtggtttggtgagcgtgagttcaatgtcaggtgaagaatagtagcactaaattcgtgttaggtattatgtccagtgtcaaaggcaagacatatatagttcttattatcagtaattaagttatgttaggtgct

SEQ ID NO: 14436 - DNA, 2356 bp, Oryza sativa
  ref <308>: DATABASE ACCESSION NUMBER: AK065021
  ref <309>: DATABASE ENTRY DATE: 2001-12-06
gacatgtcagttagaacccaagaggagagctcgtcgatcgattcccccgcgaaacagaaatctcgctctcgccgccgccgccgccccgcgtctcctcctcctcctccctggccggcggcgtgaatttgaactactccgtccggccagcctccgccgctccatgccatattcatcccctcctccttaaatcctagcaccctgacacctccagtcgccttccctagccctatcaacccttgtgtttgtgaatggttggatggattccatctcggtgaatgatctcgcgggatttttttttgggcacaattgcgatccgatccgggtatcccaccgatcgaccgaagccgggagggcacgggcgatcaactggtccgaaacaatgtgcttgctgatgtcacaatgtatataggattggcaacatgatcagaggctatgagcatggttatgtgctgaaaataacctctgttggtgatgtcgcagatatcagtattctggaaaatggcataaaatgtgggcatccagttctgttaattgctggtaatattgatcaggacactgtttcaatccagtccttgtggccaataagattggaagtgtatcggagtatggagactgcaagaaaacctggatgatatcactttccaattggaggctgaaagtgagctcaaaggagaagaaattttgggtggaagatgctttgaatgcaatggaagtgttatggttggtacccactatagtccatatcagaaggatgcagtggagaaagctattgctgttgctggtgtctatactcttttgaggctggcatctaaagttgacttcatcatagaatctcgagaatgattagcagaaggttgaggttgaaattgtaaggaaggccttcagtataatccctgaaaagagagttacttttgcaaaaggaacataataggcggtgagttgaggtgtcgcttggagcattctgcattggtggcaaattaagacattcctggcttgagagttgagacgtggttgtcgacgccatagagagcgagaacgtacacctggtcttctgcaacctgcaaaccaatggcagctagctctggtaatctctgcacctgatcccatgcacgcctttgactgtgctatcttgcaaatctagcatagggataccacgttgcagaatatggattctgattgagcaacggcacttggcttttctgtgaaactgtggcaactaaatcttttgcttacatacagataggacggctgcacttagcaacactacacccgtagctaagtgaagtgatttcatgaatgggtgtagcgttttctttaaccttcagtaaaagaatacttgatgccaaataggagtagttttcaacttaacatagggatagaaagtaaagtaaaatgggggtgaggggttcattggatactcaagagaagtctgtgattatgtaaggcccggaattttaaacaggtgcgtgcgcatttggcttgtcacacacacataggatgcccccctctgcttggctgcgtgttcgcttgtttctgcgtgcgcctgcacagctgcaaattttcaccagtgccagcagttgggaggtagcagtagcagtggtaaactagcaaaggcaaattcacagtggggggcctggctatccatccatctccttgaccttttttacctggagcatggaaggaaattccaaaaaccctcttgagctctttcgtgcttagacaaaaagaaaataccgtttgctccaagtccaaaccattgtacttttactgtaaggcaacccaagcacacatatagatactgctacattatgtctgcgtatgcatatagtgaccgttgttttgggtctttgtggttggtaaccactccttgcactgacagtatgactctacttattagacctgtgctgccgtgcattagatgtagtagtagtataacgttactgctagtagtattttgtttgtgaaggttagtaaaataattgatggattgtaaacaaagtctaccactatagtagcagtagtaatacaagaatagtaaaaaaacacaagatccgggtcggccggcctaggggtggaaggtggccgtccacgctccgtgcaaatgtgatcttcttcttcatcctagagaagaggagaggccaacggccggccattaatattccctcttcgatgcctgcataaaaagctgtgtactgtactactacccctctctctctctctctctctctgcctcactggcacctgtagtttagcgccgttgcacgctgcctctgtgtgtgtgacctggctggctggggctgtatgactttgcctatttggtgcctcgctgtactcttgggcccggggtctacttgcg

SEQ ID NO: 14437 - DNA, 2075 bp, Oryza sativa
  ref <308>: DATABASE ACCESSION NUMBER: AK065022
  ref <309>: DATABASE ENTRY DATE: 2001-12-06
tatagtagcagtgaccacacaagcttacctgagcttgagagctcagcattatcttctcagtcttgttctcccttcacagtttcagatttatgctctttggctgtcaagactcgagcagtctgttgccttcaccttgtgcttatgttgaggatagaggctctgttgtattatcctgtcacaaggccaagatggaaaattaatgctagtcaagatgccacgcaagaaactggcctgattgatgcagaaattaattcttatgcctatagtgaaaggaagaacaggaaatacaacggcgcctacatcgataaagatggtgtatcaaggaccttcgatcgaaagaaaatatcaagaaaaagggggggtgctatgagaggccggggctggaagtatggctctggttttgtagatggagtcttccctgtgctcagtccaatggcacaggatatcttagaatttgttcagaagggaacagacgttgcaaaaatctgggaatctttggataacattccttccacacacaatctttttgatgatcttgtgaatgtcgctgtccaattccgtatgaacaagaaatgggatctgatcattccatggatataggtctgcgagtggatcctgtacaggagctcattccgtcctgacatcatctgctacaacctgctcatagaatcctatggcaagaagcgtcagctgaacaaggcagagtcaatctacatggctcttctggaagctcagtgtgtgccaactgaagacacctatgctcttctcctgcgcgcttactgcaacgctggatcgctgcaccgagcagaaggcgtgatctcggagatgcgcgagcacgggattcctccaaatgctactgtatataatgcttacttggatggattactgaaggcaagatgtaccgaaaaggcggtcgaggtgtaccaaaggatgaagagagaacggtgcagagctaacacggagacattcaccctgatgatcaatgtgtacgggaaggcaaagcaaccaatgtcatcgatgaaagttttcaacgagatgaagtcgattgggtgcaagcctaatatctgcacttacactgccctggtgaatgcatttgcgagggaaggcctgtgcgagaaggctgaagaagtgttcgaggagatgcagcaggcagggcacgagcctgacgtgtatgcttacaatgccctcatggaagcttacagccgcgctggattgccgcaaggcgcatcggagatcttctccttgatgcagcacatggggtgtgagcctgacagagcttcatacaacatcttggtagatgcatatggaagagccggccttcatgaagatgcggaggcggtgttcgaggagctgaagcagcgggggatgtcgccgacgatgaagtcccacatgctgctgctggcggcgcacgccaggtccggcaacgcgacgaggtgcgaggaggtgatggcgcagctgcacaagtccggcctcaccccggacaccttcgcgctgaacgccatgctcaacgcctacgcccgcgccggccgcctcgacgacatggagcgcctcttcgccgccatggagcgccgcggcgacgccgacgtgggcacgtacaacgtggcggtgaacgcgtacgggcgcgccgggtacgtggggaggatggaggcggcgttcgcggcggtggcggcgagggggctcgccgccgacgtggtgacgtggacggcgaggatgggggcgtacgcgaggaggaaggagtacgggcggtgcgtggggatggtggaggagatggtggacgccggctgctacccggacgccggcacggcgagggtgctgctggcggcgtgctccgacgagcgccaggtggagcaggtcaccgccatcgtcaggtccatgcacaagaagcccaagacactcttcaccatataataataaaaaaaaacccaacactttgcatatataattgcattattattacatgtataataatacagtataaatgtacattacaatactaccttagttttcttttaatgtatgccgccattaattctaaagtagcggctaaccattcaaaaaaaaacaaaaaaaaaacg

SEQ ID NO: 14438 - DNA, 4889 bp, Oryza sativa
  ref <308>: DATABASE ACCESSION NUMBER: AK065023
  ref <309>: DATABASE ENTRY DATE: 2001-12-06
gagctcctcccccggtaggtggactaccggcgagctccacccttacgcacggacgccggcgagctcctcccctggcgcgcggacggaaggcgagctcctcccccatccgcgaacgccggatagctcctccccggcgcgcggactgaatgtgagctcatcccccgcaggcggacggcaggcgagctcctccaccgcgcacggacgccggcgagctcgcgggacggccagcaggctcctcccccgcgcgtggatgaccggtgagctcctcacccggcaggcggacggccggcgagtcttccctcacgcgcggacgccggtgagctcctcacatagtaggcggacggccggcgagctcctttcccacgagaggacgccggcgagctcctccccctgcgcatggatggccggcaacctcgcgggacttccggtgggctcctcccccgcgcgtggacggccggcgagctcctcccccgtacgtgcaccgtcgccgtcgccgccgccctgcctctagtgttggaaggtgagagcagtgtaaaagatgagagagagtgggggaagaggtgaggatgacatgtagggcccacatgtccgtgggtcccactatttcttttttttaatgacacgtcggtcccacaatttttttattacttttgtgccagataagcgacacgtcgacgacacgtgggacgaagaccgagtcaacaccgtcatataggcgccacgtcaaccaaaacctcttccaaaaccacccagggatgggatatagtttgcatcggttttaatagttgggggagtcaatatacctggttttgttttgtggttggaggttatgaatcatactcggaccatagttgagggagtccaactatactttttccgatgatatacacgtgcttgtttctagtgggacgtatcagatagcccgcaatcatattccgacccaattgaaatctgataccgggctgggccgtatccattactagaatgaatatacggcccaattgaaagcttacaggcacggcgtgagcgcggcgtggcttagcccaaatcgaccgaccgatcgattccaggagcgtcgagcgcctccgccgcgctccgccgcgctccgccgccgccgctgctctccccgcccctcgcggggaagtcgcgcgaggcgtcgtcggcggagagcgcgctgtggtgcgccgccgccgccgcggcagcctacgcccttgtccgtgttgaatagtactactaccatataaacagtccgtcgccggaggttctgctagggtttcggctagcggggtgtgaggtgggccgtccgccgccgcctcggcttggagcttggccaccccctcggcaaggccggcgccgcgctgctccgccgccttcccctctcccagccagcgcgcgccgccgccttccctgagttcctccctgacggatcccgcaggttccttgctattagtaatcgttaatttttttactgggtgatttcatgttcttgtaaagaatttcagggtagaaatccgagtaatttcttctctctctgttgatgttttttttccttcaaattttctgttcatgcgtatctacatgtttgtacagccaaacttgaaactgtgcatgcgcatcaccttcatgcccaaaatttacatgaattccttccaaacatagtaaaggaaatggtaaccaaacaatgcattccttccaaacacagtaaaggaaatgataaccaaacaatttcttcctttcattactgtttgcggtttcagactcttaccaaacaccaccttaatttaaatcttgctccagttttgcaccttatttgacatgtatgcactgttgtatattacccagccccattgttaaagaggaacgtagtagatgtgtactactataccacagtatattatcttttggggtttgaaagtaagccttgtttccatgaaaaaaatgttccgacatccttcctttgtatcgaagaccttgtttcaattagttgtttacatatttaacgcaagctcacttgtgtggtacgaattctgtaatgctattatgtgctgcaagtataatatattttaccattcttttatgtagtgaaacctgaagtttttagccaatggtttctgagatcagctgtattattcagatttgtgtagtgaaacctgaagtttagccaatggtttctgagatcagttgtattattcggatttatgctgtgaaacctgaagtttagccaaaggtttctgagatcagttgtattcttcggaggagggataacaatatttatgttcttgcagttggctgactatcatttgagaatggactcacgatcaccaaaaattccaaggagaagtcctgattccaaggataaggactctgataggaacaaggaaagagatgccaagaatgattgggactcatcaagagcatatggctctgagactgattgcaaggaggaaatgtgtgatagcaataagaggaagggtttgaccatgggggaaattgttgttgacaatagcagatcagtggatagttgtcatgaaactgaattgcatgtgttaagagatgatcggcaggataaatctgtagagataaaagatattttgcatgatggagttgcaaaaagtgactatgctcaacgccagatagacttggatagtgaaagaaggaatggtacgggagataactcaagggtggatgtcctgagagatgacaaattagacagcggaagggacagaaactggagcgacagaacacgggagcctgaaggatctaaggactatgtgaggaatcgtcagtggcaagattctaaggaggcaaatgattctgaatggaagaatgcacatgaaagactagatggtgggagtttccatgggcgagctggttaccggcgagattctaggggtagatctgaaagtattagaggttcttcaacctatggaggtcggtatgacagttctgattcaatagagatccgaccaaataacaatcttgattttggacgagagggctctgtttctggaagaagatatgatgtgggagctcatcgggatgcaacacctggaacgaatggtgataaatccgccaatcctgaagcagatcaaagtggtagtaccagcacgatttctcaatttcctcaacatggtcctaaaggtgatagatcctcaagaggaagaggtagaccaaatagcagggattctcaaagagttggaggcacattaccaattatgccccctccttttggtcctcttggtctgccaccaggaccaatgcaacatattgggccaaatattccccactctccaggccctcttctacctggtgtttttgtgccgccattccctgggcctcttgtgtggcctggggcacgaggtgttgatgtgaatatgctttctgttccacccaatcttcccatccctccagttgctgctgaacatagattcgctccaagtatgggagctgggcctggtcataatattcacctaaaccaaatcggctctggaataggtgctccgacaaatgtgtctggattgagtttccatcaattgggcacgcaaagtcgtgaaatggcacatgataaaccgcctgctggtggtggttggacgccacatagaaacagtggaccaaccagaaaagctccttcaaggggtgagcagaatgattactcacagaactttgtggacactggcatgcgacctcaaaatttcattagagaactggatcttacaagtgtagcagaggactatccaaaattgagagaactcatccagaggaaagatgaaattgttgccaattctgcttcaccaccaatgtattataagtgtgatctgaggcaacatgttctttctccagaattttttggtacaaagtttgatgttattcttgtggatcctccatgggaggagtatgttcaccgggcaccaggaatcacagatcacatagagtattggaatgctgaggagattatgaatttaaagattgaggctatagcagatactccatcttttgtcttcctttgggttggtgatggtgtaggtcttgagcagggccgtcaatgcttaaagaagtggggatttcgtagatgtgaggatgtttgctgggtaaaaaccaacaagaaaaatgcaacacccagtctgcggcatgactctcatacaatactgcaacactcaaaggagcattgcttgatgggtattaaaggaacagtgcgacgtagcactgatggacatgttatccacgctaatattgacacagatataataatagctgaagaaccaaccgatggctcaactaaaaagcctgaagacatgtacagaataattgagcatttcgctcttggaaagaggcgccttgaactctttggagaggatcataacattcgtcctggttggcttactctcgggaaaggtttatcgtattccaacttcaacaaagaggcttatatcaagaactttgcagacaaggatgggaaagtatggcagggaggcggtggacgaaatcctcctccggaggctccccatctagttgtgacgacacctgagattgagggcctcaggccaaagtcacccccacagaagaactaagggcagcagccattgggctctataggtgtggttgcaagtgcacttacaagcgagcaacctggtagaatatccccgagatcagtagttaccgtgattggttcagacttgagaggctaattttttcgtacctgtagctttattacatcgcatttcctcttattgaagtttagccgaggtggtgcggatggatattcagtctaacagactcaatgaacgctttgttgtatgacttgtacagtactggctgctcgaacaggatggttcagcttccagaaatttggcaacgctccatttcaaagaaaatcattcagtatttgcctt

SEQ ID NO: 14439 - DNA, 2100 bp, Oryza sativa
  ref <308>: DATABASE ACCESSION NUMBER: AK065024
  ref <309>: DATABASE ENTRY DATE: 2001-12-06
ggggagccaggaaccagcagggctgctcctcctataaagccacccacccgccctcccgagtcccatttttgctgccctgtggagcctcaaattctactcgcgttttcatgactgccctatagatcagctcctgattggaaggactgtagttccatgagatagaagggcatattgaagtagaatttggcctttggtgaatctaaatggacagtggcttgggaagaagttcagagacatccttgaaagccttgccatcaatggcaagtaatgcaacaaggaatactgatcctgaccaacagggtgttcgattcagttccatggaccagcctccatgttttgcaagacctggtcaatcgttccctgcttttcctccactctttggggttcagtcttccagcttgtatttacctgatgacattgaagctaaaatcggtaaccagttcgaatcaaatccttccccgaataatcctacaatggattgggaccctcaggcaatgctgagcaacttatccttccttgagcagaagatcaagcaggtaaaagacatcgtgcagtctatgagtaatcgtgagagccaagttgctggtggttccagcgaggcacaagcaaagcagcagcttgtcactgctgatctcacttgtattataattcagcttatttcaacagctggttccttgcttccttcgatgaagaacccaatcagcagcaacccggcactcagacatctcagtaacacactttgtgctcctatgatcctgggcaccaattgtaacctgcgaccaagcgcaaacgacgaagccacaattcctgacattagcaagacccatgactatgaggagctgatgaatagccttaatactactcaggcagaaagcgatgagatgatgaactgccaaaatccttgtggtggggaagggtcagaaccgattccaatggaagaccatgatgtgaaggagagtgatgatggtggtgagagagagaatctcccccctgggtcttatgtagtattgcaattagagaaggaggagattttagcaccacatactcacttctgcttgatctgtggcaagggttttaaaagagatgctaatcttaggatgcacatgaggggccatggagacgagtacaaaactgctgcagctcttgcgaaaccttcgaaagattctagcttagagtctgcaccagttacaaggtactcgtgcccatatgttggctgcaagcggaacaaagagcacaagaagttccagcctctcaagacaatcctgtgtgtgaagaaccactacaagagaagccactgtgacaagagctacacctgcagccgttgcaacaccaagaagttctcagttatcgcggacttgaagactcatgaaaagcactgtggccgcgacaagtggctatgctcgtgtggaactaccttctcaagaaaagacaagttatttgggcatgttgcttttttccaagggcacacgcctgcactccctatggatgatatcaaagtaacaggagcatcagagcaacctcaaggcagcgaggcgatgaacaccatggtggggagcgctgggtataacttccccggtagctcatcggacgacatcccaaatcttgacatgaagatggctgatgatccacgctatttctcgccattgagctttgatccttgcttcggtgggcttgatgacttcactcgacctggatttgacatctctgagaatcccttctccttcttgccctcaggatcatgcagcttcgggcagcagaacggagacagctgatcgaggccaacgttaacgatgacggcaatggccttgcctacctttgtgtaccttgtctagccctattcttcctctgttgaaggagccattttaggtcattccttcttcctgaagtgtactttattttatgatcatcagtaatgatcaagtactttttatctttccttatagattgagatagcccaatcttggtatatatatgcaagaagcgtttctaattatctgaattggtgccattgttgtagtgcctacaccttgtcataacatgacatcaacatgtacatgacaataaaattctctttctgatgagcccgctccagtaaaaccc

SEQ ID NO: 14440 - DNA, 3843 bp, Oryza sativa
  ref <308>: DATABASE ACCESSION NUMBER: AK065025
  ref <309>: DATABASE ENTRY DATE: 2001-12-06
aaaaaaaaaaaaaaaaactcgaccaccacctccaccactcacacctcgatccggccatggcggcctagccctagcacctagggttcgcgcccccaccaccctccccgccgtctcggagaccgcgcgcccccagctcccgcctcgctgtcgcgccgcctgattccgccgccggcgccgaatgctacgccgtttggtggtggtggtggtcgtcgtcgcctgattccgcgatctcgtgagctccggggggtgcgcggttgcggcggcggcgcctgagaggaaggctggactcgtccgcggcggcggcggctgcgggctagtgtcggtggcgatttgagggcggcggtttgggttagccgtcgccgagagtgaaggtgctgtgttttgagtgcttgggatgagctgcgtgttgatctgatgaactcggggtcggcggcgttcttcggtttctccgctcacttgctcccgccgttggcgaaaatccggttcttcggatcgagttgcggtcgcctgggtgtttttcatcagttttgggtgaaaatactcgagctctgaggggggtgattggtttccaagtttgattgatttaaagagtttgtgtggaattttttcggggagatgaaggggaggatttgctgcgacggtccaggttttggttagttgttgagggagaaaaaaatggaagatatttctgggcgcaagagaggaaggcaggtgtttgctgctgctgctgggagcatgatgggaagctgaccagcagcttctccggtatcctggtgcggcggagtttcgtgctctttggcgacgggtgcactggtgattggagatgaagctctctccgccggcgtcggcggatatgccgcaggccttgccggagaacgacggggaacaaagatgtctgaactcggagctgtggcatgcatgcgctgggccccttgtgtctttgccagtggtcaggagcagggtcgtctactttccacagggccatagcgagcaggttgcggcatcaactaataaggaagttgatgctcaaatcccaaattatccaaacttacctcctcagttaatctgccagcttcataatgtcaccatgcatgctgatgcagagacagatgaagtttatgctcagatgacattgcaaccattgagcccggaagagcaaaaggagcctttccttccaatggagttgggtgctgctagcaagcaacccactaattacttctgcaagacattgactgcaagtgacacgagcactcatggtggtttctctgttccccgccgggcagctgagaaagtcttccctccactattctctgtaggatttttcacagcagcctccggcacaggagctgattgcaagagatttgcatgataatgaatggaaatttcgccatatatttcgtggtcagcctaaaaggcatctcctgacaacaggctggagtgtgtttgtgagtgcgaaaagactagtagcaggagactctgttatatttatctggaatgataacaatcaacttcttttgggaatacgtcgtgcaaatcgccaacagactgttatgccctcttccgtgttgtcaagcgatagcatgcatataggtcttcttgcagcagcagctcatgctgcagccacaaatagtcgcttcactattttctataaccccagggctagcccttctgaatttgtgattccattggccaagtatgtgaaagctgtttaccacacacgtgtatctgttggaatgcgttttagaatgcttttcgagacagaggagtcaagtgtcaggcgatacatgggtacaatcaccagcataagtgatctagattcagtgcgctggccaaactcacactggcgttctgttaaggttggttgggatgagtccaccactggtgataaacagccaagggtttctctttgggagattgagcctttgacaacctttccgatgtaccccagtgcttttcctttaagacttaagcgtccgtgggcttcaggactgcctatgcatggcatgttcaatggtgggggaaatgacgattttgcacgctattcttctctcatgtggcttcgagacggaaatagaggaacccagtccctaaattttcaaggacatggagtctcaccatggcttcagccaagaatagattctccattgctgggccttaagccagacacgtaccagcaaatggctgcagcagcactggaagaaattcgatatggggacccttcaaagcagcatccagctactctgcaataccaacagactcataatctgaacagtggattaaattctctgtttgcaagccatgttctagggcaggtgcagtttcaacctcagcagtcacccctgcaagttgttcagcaaggccattgtcagaacactggtgactctgggttccttcaaggtcagcttccacggctgcagttgcataacactcagcagctgctaaaggagcaagagttgcagcagcagcaaagacagcatgttttacaagagcaatctagtcaagagatgcaacagcagctcccatctagtgatcatcatgttgctgatgtagcttctgagtctggatctgctcctcaggcacaatcatcattgcttagtggatcatcattctacaatcagaacctcttagaaggaaatagtgatccccctttacatctacacaacaatttccacaacttctctaaccaggaagcctcaaaccttcttattttgcctcgaagtagccaattaatggcatcagatgggtggccttcaaagcgattaactttagaatctgctgttcatcctgaagctccgtccatgcaccccaagattgagaaagtaaatcaccagggtatatctcattttcctggcgcctttccaccacaatcagcaagaggctgttccatcgtccaggattgcagggcagatgctgagaaccgcctactttcatcatcatttgaactccaggatggcatgacaagcatcataactgatgctaacagagaaactgatactatggccatacctttgttgagatatagtggtgcagatttgacaactgaaaacaccttagcaacctccaattgtttaggtgaatctgggacgttcaatcctcttaataacatatctgtaaatccatcacaaggagcaacctttgtgaaggtttacaaatcagggtcccttgggagatcacttgacatctccagattcagcagctactgcgagttacgtagtgagcttgagcgtctctttggtcttgaaggccaactggaggaccctgtaagatcaggctggcagcttgtatttgtcgaccgggaaaatgacattcttctcgtcggcgacgatccatggcaggagtttgcaaatagcgtatggtgcatcaaaatactctcgccacaggaggtgcagcagttggttcgtggtggagacggccttctgtcctcacctggagcaaggatgcagcagagcaatgcctgcgacgactattctgcaagccacaacatgcagaatatcgccggaaacattgcatctgtagcgcctctggactactgagatgtagaccagaatcaaaactaagcacccttaagactgcagggtcaccattcgtgatcgcctgcattccatgcgatcttcactagtcctgtccgaatcagtagcaactcagtcaataatatagctagatgatccgttgtattccatctgatcatggacatgctgtatgatagctgctttagctctattaaatctctaatggcaggcaactaggcaagaacagttctatgatgaatgatggcagtcgctgtagaattgaccttattctgtagctataatatgatgtctagaactgatgattccaatttcc

SEQ ID NO: 14441 - DNA, 2421 bp, Oryza sativa
  ref <308>: DATABASE ACCESSION NUMBER: AK065026
  ref <309>: DATABASE ENTRY DATE: 2001-12-06
gttccctcctccactcgatctgctacctcctggacacggcgacgtacggctgatccgtcgtccggtggctggggttcctggcgggagacgccggtcgtgcagaggtgctcttaaatttataataatgaaggattttatgaaactttatcatcagcgggaaatccagctgcttgtgctcctcagcttcacactccaaatgttcctctttttcaccggcagtcttcggaggcgcaacaccaatgtgttcctcagggtttctatctggacagcttatttgggagcagacttcacagcagtttatgctcttggttacctctcacgacacgatgatattcagaggcaaatgtcagggggaacccagccactagctttcttttgggcatcattcctcctcatccatcttggtgggcaggacagcatcaccgcattttcaatggcagacaacaacttgtggctgaggcatctcttgaacttggtggtgcaagtagtcctagctgcatatgttttctggaaatcgccagcaaggcacagtgcagagcttctagtttcaggtgtccttgtgttcattgccggagttaccaagtatggagaaaggacactgtctctcaagtatggaaggtttaaaagtctcgagagctcaactggagatcactacaagaaacggtttccggaattaaacgattcggatcatggctattctaaggtagttttggatgctctatgttcaatgctaaatgtccacaatgtctttgcagcgcgtaacccatttgttaatggtccagaatctaattccccagttgttattgctcgagacacggtacagggaaccaaaaaaatgctcaaggtggtggagcttgagcttgcaatcatgtacgatgacctctacacaaaggctcttgtgctgagaacaaggataggcatgattctccgatgcacctctcacgcatgttccctccttgcttttgcactgttccttacatgtgacaaacggaggtacaacggagttgatgttgcgatcacctattcgctgtttatcggaggctttttccttgatctttctgcagtgtttatcttcataatgtctccatggacttgggcgtggttgaaggctcagaaatgcgaccggctggctagcttgtcctggttccttttttccagtgatattggctggccagagaaaaggccacggtggtcgaattccatcggacagtacaagttgctgaactgggtttctggtggagaccagccaagatcatacaaccagaaagtggtggctctagtgagaagattgtcgggtttagtcggtgttggaaaagaagatttgttctggctgagcaagacgttggacactgagcatgtggaggccgatgaaaagacgatggagtttgtcgtaaaggggattagtagcttgagcgatgaagtctccgagcaacaacaatggcagcatcttggcccattgctgaaaaagatacgggtctgttttgtcgcagatatgggatgtgctattgtggtgatgcacatattcactcaagtatatttgaatgcagtagaagccgcggcagcgggagacgaaggagggggagatgcagatgatatggtggaggtgtgccgaaaactgtccaactacatgatgtacctctttgtcaaccacccttccatgcttccgctcaatgccagctccgaagccaccgtggttgagtttgcgaaatcgagagaggaactgtctaggacacaacaaggaagcaagatgaccctggatgagctatacaacattatacagcagaataaggatggtgtgtcaaggcaaggaacaatggaggaaatgtacaagatgatactagaagaggatgtccaaccaagctggggtgcagtggaggagatggcagcaatgtggctgcggttcctcatcttcgccgccggcaggtccaatggtaaggtgcacgcggcggagctggccagcggaggggagctcatcaccttcgcctggctgctcatggcccgggaagggctcggcgaatccgagaggagaagggtccggctgacgtccaccatatcgtccatttcgtctgctgattctgctggtgctgcagctgatttgaaggaagcatatgcgttctttttcaactgattaaagtttgaaagtttgattagtactttagctgatttgagtagctttgtttgttgttccctacatctttataatctaaagctatgtatgaagtagagttaggattaataaccagcaatcttcctgtgataagagataatgcatggctgatatgatttgggctttctatagctgccagcccctatatatatcccagattttctccttccttttctcttgactgtaaccgtatctgtgtaatacttcgccatatatacagttgtaagaagttgaacaagattgtcatttatact

SEQ ID NO: 14442 - DNA, 779 bp, Oryza sativa
  ref <308>: DATABASE ACCESSION NUMBER: AK065027
  ref <309>: DATABASE ENTRY DATE: 2001-12-06
ggtgagtggtctactctgaggcagaggtcaccaaaaatgggtggccatggctaccactaccactaggagcaacagcagcagcaggcaccgaggcgtgcacgtcgagctccagcacggcgtgcagcttggactccaccttggccgtcctccacagcacgtgcccggacgctcgccggagcatcccgctgccgccgaccaccgccagctccctgacctcctcggaggtgtcgtcgcggccggcgatgaggatggtgctcccgttgtatggcccgtcggtgagtaccaccgtgatgtcgacgatgaacaccggcctcgccatggacgccagcatgtacgtcccctgcgcccgcccaacctccctggacgccaggcttgggccctccgtcaccacgtcgtcgatgatcaccgtgtccccgaagttgttccccggcgacatggacgggttcgccggccccggccccttcaccaccaccaccgacgtctgccccgccccgcccacgatgtcgtgcatgtacacccgcagccgcaccgcctgccgacgcgcctcgcccagcggcgccacggcggccgcgacggcgaggatgagagccacggcggcgacaagctgccgacggtgctctggaacactggagctacccatttgatctttatgtttggttcactcgcaagacgaaaaatggagatgcaattatatttctatagctgaaggacgaatttttaattatgaatgcaggtgccgccaatgcgtgtactaaaatgaaatgaaacatttatcgatc

SEQ ID NO: 14443 - DNA, 2619 bp, Oryza sativa
  ref <308>: DATABASE ACCESSION NUMBER: AK065028
  ref <309>: DATABASE ENTRY DATE: 2001-12-06
tgggcccacctacagttgattctcttatcttcctcctcgcgttcgcgtcttctcttctcttcgctccgctcgctcatcggcaatggaggccacggcgctcacgctctcctcccgccccgccgccgccagccgctcgccggcgaagggaaccttcgcctccctccacccccgccgccgcttctccgcgcacgctgtccacctccgcgcggcccagagcgcctccctgcgcgccccctccccgggggcgaggaggagacggaggagggggagcgggctggtggtgcgggcggagatgttcgggcagctcaccaccggcctggagtccgcctggaacaagctgcgtggcgtcgatgtactaacaaaggagaatatcgttgagccaatgcgggatataagaagagcacttctggaagctgatgttagtttgcctgtagtgagaagatttgtttcgtctataagtgaaaaggctctgggttctgatcttataagaggagtccgaccggaacagcaattggtgaagattgtgcatgatgaacttgtaaaactgatgggtggagaagtatcagatctggtatttgcaaaaagtggccccacagtaatcttactggcaggcctgcaaggtgttgggaagactactgtttgcgcaaagcttgcattttacctgaagaaattgatacttatgccagagttaggtgacagggaaagagttgtatgctggtcgctgcagatgtttacaggcctgcagccattgatcaactcactatacttggtgaacaggtcggtgtaccagtttactcagaaggaacagaagccaaacctgcacaaataaccaagaatgccgtggaagaggccaaaagaaagaatattgatgccattgtaatggatactgctggaagactgcagattgacaaatcaatgatggttgaattgaaagaagtgaagaaggcagttaatcctacggaagttctgcttgttgttgatgctatgactggacaggaagctgcaggtatgcaactgttccacttgctatttaagtccctctttttgctactaaaggccaacactatttgttcgtatagcagaaatgcaacgaacaaccagaattttttcaacggttctcaaattctactatatgacaaattcttacagcgcgacatgttctatctgctatatttatacgagcttaagaagtattattgtttgatagagttgcaacagccacttacaatacttctctgagatgcagcattggtcaccaccttcaatattgagattggtatcactggtgctatattgactaaactggatggtgattcgaggggtggagcagcactaagtgttaaagaggtccttatttgccagaaaactttcctaccatcatatctacaaatgcttctgccacttttatatttttgctttgaagttactctgcatctatgttggtcaaaactgcaaattcctattgtccacatgcttctttcatcaattgacaatttactgcaaatctccgcactagtcttctcacttttatgctgtatttatataaaaaaaatctagtgtttatcatctggctacctacttgaatgtatatacggtcaacattaaatcgttcgtagtaagctgtgtttgcatgcttgctgctttgcccttcaacgaatattaatgcttaacggaccatgcaggtgtctggaaagcccatcaagtttgtagggcgtggagaacgaatggaggaccttgagcttttttatcctgaccgtatggcacaacgtgttttgggaatgggcgatgtactttcatttgttgaaaaagcacaagaagtcatgcgtcaagaagatgctgtagaattacagaagaagatcatgagtgcaaaattcgacttcaatgacttcctaaagcaatcacagaatgttgcaaaaatgggttccatgagccgtgtagttggaatgattccaggcatgaacaaggttactcctgcacaaattcgagaagccgagaaaagacttgcatttgtggagtctatgatcaatgcaatgactgccgaggaaagggaaaagccagaattactggctgaatcacgtgacaggaggataagagtggctgaagagtccggaaagagtgaacaagaggtgagccagttggttgcccagcttttccaaatgcgtgctcagatgcagaagctgatgggtgtgatgaccggacaagaagcacttccaggcatggggaatctcatggaatctcttaacgccgatgagaaggcacctcctggcactgcacggcggaagaggaggcacagcaagacgaggcagagggagctggatgcagtccctagttcttgagctggtgagcgttgtagttcagagttactgctcttttgcttcagagacccggatctgagaaaaaagagatgaaaaaaaaatgttgtcttgctaccttttttagtttgtacgtaggagatctgcaggaagttcataggaaacagtaatttcctaccaaattgtaatgttacttagccagtcctactcagcaatgcaatcggttcactcgaatgctcggactttttacattacattaatcatgaatgtatatgttgtagaaggatcaggttcatttcaaaacttc

SEQ ID NO: 14444 - DNA, 3310 bp, Oryza sativa
  ref <308>: DATABASE ACCESSION NUMBER: AK065029
  ref <309>: DATABASE ENTRY DATE: 2001-12-06
gacccacacacccacactctctacccccaaacttgccctccaatctatctccgccgccgccgccgcctccgccgcgagagggcgtcgccgagctgcgcgggaggctcgcctcccgcagcatctggccggattcgtcgtagtcgaggcagctgtaagcgagagagagggagatggccgcggccgccgggaaggcggcgatggagcggcaccagtcgatcgacgcgcagctgcggctgctcgcgccggggaaggtatccgaggacgacaagctcgtcgagtacgacgccctcctcgtcgaccgcttcctcgacatcctccaggacctgcacggccctcacctccgcgaattcgtgcaggagtgctacgagctgtcggcggagtacgagaacgacagggacgaggcgcggctcgacgagctggggaggaagctcaccagcctgccgccgggggactccatcgtcgtctccagctccttctcgcacatgctcaacctcgccaacctcgccgaggaggtgcagatcgcgcaccgccgccggatcaagctcaagcgcggggacttcgccgacgaggcctccgcgcccaccgagtccgacatcgaggagacgctcaagcgcctcgtcacccagctcggcaagtcgagggaggaggtgttcgatgcgctcaagaaccagaccgttgacctcgtgttcaccgcgcatccaacgcagtccgtcaggaggtccctgctccagaagcacgggaggatccggaattgcctgaggcagttatatgcgaaagacatcactgctgatgacaagcaggagcttgatgaggccctgcagagggagattcaagcagctttcagaactgatgaaatccgcaggactcctcccactcctcaggatgaaatgcgcgccgggatgagttattttcatgaaactatatggaagggtgtaccaaagttcttgcgccgcattgatactgctctgaaaaatattgggattaatgagcgtcttccttacaatgctcctctcatccagttctcatcctggatgggtggtgaccgtgatggaaacccaagagttacaccagaggttacaagagatgtatgcttgttggcaagaatgatggctgctaacctgtacttctctcagatagaagatctgatgtttgagctctctatgtggcgctgcagtgatgaacttcgaattcgtgcagatgatttgcattgctcctccagaaaagctgcaaagcactatatagaattctggaagcaaattcctccaaatgagccttatcgtgtcatacttggtggtgtcagggataaattgtactatacgcgtgaacgtactcgccatctattgacaactggagtttctgaaattccagaggaggcaacgtttactaatgttgaagagtttctggagccgcttgagctgtgctacagatcattatgtgcttgtggtgacaaacctatagctgatggaagccttcttgatttcttgcgtcaagtatcaacttttgggctggctcttgtaaaacttgacataaggcaggagtctgatcgacacactgatgtccttgatgccataactacatatcttgggattggatcttacgctgaatggtctgaggagaaacgccaggattggcttttgtccgaactaaggggcaaacgtcctttgtttggtcctgatcttcctcagactgaagaaattgctgatgttttaggaacatttcacgtccttgctgagctcccggcagattgttttggtgcttacatcatctcaatggcaactgcaccatctgatgtgcttgctgtggagcttctacagcgggagtgccatataaaacagcctctgcgagttgttcccctatttgagaaacttgcagatcttgaagcagctccagcagcggtggcacgactattttcaatagactggtacatgaataggattaatggcaagcaggaggtcatgattggatactcagactctggcaaggatgctggtcgtctttctgcagcatggcaaatgtacaaagcacaagaggagcttgtcaaggtggcaaagcattatggtgtaaagttgacaatgttccatggaagaggtggaacagttggcagaggaggtggtcccagtcatcttgccatattatctcaaccaccagacacgatacatggatcacttcgtgtaacagtacagggcgaggttattgaacactcgtttggagaggaacacttgtgctttagaactctgcagcgctttactgcagctactcttgagcatggaatgcatcctccaatttcccccaaaccagaatggcgtgctctaatggatgagatggctgttgtggcaacaaaggaatatcgatcaatcgtcttcaaggagccacggtttgttgaatacttccgatcggcaacacctgagacagaatatggcaggatgaacattggtagccgaccatcaaagagaaagcctagtggtggcattgaatctctccgtgcaattccttggatttttgcttggacacaaactaggtttcatcttcctgtatggcttggatttggtggagcgttcaaacatataatgcagaaggatatcaggaacatccatacactgaaagaaatgtacaatgagtggccattcttcagggtcaccttggacttgcttgagatggttttcgccaagggagatccaggaattgctgctttatatgacaaattgcttgtggcaggtgatctgcaatcctttggagagcagctgagaaacaactttgaagagacaaaacagctactccttcaggttgccggtcacaaggatattctggaaggggatccttacctgaagcagcgtctgcggctgcgtgagtcgtacatcactaccttgaacgtttgccaagcctacaccctgaagcggataagggaccctagcttcgaggtgatgtcgcagccggccttgtcgaaggagttcgtcgacagcaaccagcctgccgagctggtccaactgaacgctgcgagcgagtacgcacctggcctggaggacaccctcatcctgacgatgaagggcattgctgccggcatgcagaacacaggctagattgtccacaagaatgcttccagcaggtgcaatcaatcaatcatcaataactccttccatgatgagatggtgaatatgtttaactagtacgttcgccgatgctagtgaattctggagacttttttttgctcgcacgttttcttttggttgtgtacttgatgtaaatgtcaaggggggacttatttggcttttgcagcccgatccaaaataaaatatggaccaatcattctacg

SEQ ID NO: 14445 - DNA, 2156 bp, Oryza sativa
  ref <308>: DATABASE ACCESSION NUMBER: AK065030
  ref <309>: DATABASE ENTRY DATE: 2001-12-06
gactctctggaaagaagaagaagaagaagcagaagaagcttggagcttgagctttctgaatttcagtcggtgtaactaatgggggagatgaaccagccgccgccgccgccggtggccgtgccgccgccgatggtgatgcagccaatcatgcatccgcccgtcggcaccggcgccgtcttcccgccgcacgagcagttccaccatctcgcctactgcgtccactccaacccttcctgggttcaggtggccgcacttgcattcctccactatcttgtgatgctgggttctactgtcatgcttgcatcaactattgttcctgcaatgggtggtaccccaggggataaggctcgtgttattcaatccttcctatttatgagtggcatcaatactctcctccaaacacttgttggaacgcggctccctacagttatgaatgcttcctttgcatttgtcgtcccagtactgtcaatagccaaagactttgaacaaaataactatgcgagcagtcaccagagatttactcacacaatgagagcaactcaaggggctctgattgttgcttctatcctcaacatgattcttgggttcagcacaatttggggggcattcgccaggaaatttagtcctgtaataatgacccctgttgtttgcgttgttggtcttgggctatttgcacttggctttccccaggttggaaagtgtgtggagatcgggctaccaatgctaatccttgcagttgttgtgcaacagtatgtgccatattacttccatcattaccatgagcgaatcaccttcttgttgagaggtattcgttgcttctttgtattgggattgtgtgggcctttgcagctatccttactgctgctggtgcatacaaccatgtttcactcaagacccagcagcactgccgcactgacaagtcctatctcatatcatcggcaccatggatcaaaatcccataccccttccaatggggtacaccaatcttcactgcaggtcattcatttggaatgatgggtgctgtacttgtttctgcttttgagtccactggtgcacactttgcaactgcacgtctagctggtgcgacaccacctccagctagtgtccttagtaggagtgttggtttgcagggcattggaatgttcctagaaggtatctttggcgctccagctggttcatctgtatcagttgaaaacattgggcttcttggactaacaaaagttggaagcaggagagtgatccagatatcaactggatttatgattttcttctccatatttgggaagtttggtgctttctttgcatctattccattgccaatcttcgcagcaattttctgtatcttatttggtattgttgctgcggtgggagtctcgtacatgcaatttgtaaacaaaaattcgatgaggaacatatacatcattggactttcgctgttcctaggcatctcggttcctcaatacttccatgagtatactgcttctgctagcactggacctgcccgaacaaatgctggatggttcaatgacatcataaacacagtcttcgcctctggcccgacagtgtcactgattgtcgcatcgatcctggacaacacactggagtttagaggctacgaaaacgaccgggggcttccatggttcatgccgttcctgcaccgtcggaaaggttactcagatcctagaaacgacgagttctacagcttcccgatcagggtgcatgacgtcatcccaagccgattcctctgacgggcgagggtagcgcccgttacctgcgcttccgcgcatgtaaatctctttgttcttgttagcccttccttactcctgtgacatgtagcaattggcaccgccaagattaaaaagtctcaacttagtggggatatggtacaaatggttaggacttttggttttcttttctttttcctcccctttgggccaaccatttggttaattacatgatggtgtagagttggttaaatgattttgggatggatctttaaagaatatcagccacctcaatttgttgattgctcagccagtgatgtagatgtgcttccaggacatgcattgatttcgtcataactctgtaatcacaccatcttttcactgcatttgattgagaaaacttcagaatcagacctgatgcacattgaactc

SEQ ID NO: 14446 - DNA, 2054 bp, Oryza sativa
  ref <308>: DATABASE ACCESSION NUMBER: AK065031
  ref <309>: DATABASE ENTRY DATE: 2001-12-06
gaggaggagataaggccgcgcgctctccaccaccacggccgcgaatgcaattacccgccatgagttgctcgccgtcgcagtcctccgccgccgctgccgcggcggcgtacggatgctgccagcgcatcctcctcgcgtcgacctccttgccggcgacggggaggcccgcccgcctcggtctcaagcttcgctccacccactcgcttcagatcaggaaccgaaggtttgtctgccaggcaatgactgagactgagcccgacggcgacggcaatggcgacgaggagaaagaagagcttggagatgatgcttcatcaccttcggttgatagtgttacacaagaaaatggatctgcagaaagtgagactaatgcagataatacgaaagacgaaactgtaaatacagaaccactcagctccagtgacacagttcagaacattgatggagatgctactccagccagtgatgcacaggaaaatgtggaagtagttgatgttgctgtcggttcacctttgccaggaatgaagcaacaacttgatgaatctgtcaggatccccaaggctacaatagacattctcaaggatcaagtttttggttttgacacgtttttcgtgaccagccaggagccttatgagggtggaatactgtttaagggaaatttgcgtggtcagccagcaaaaagttatgagaagatcacaaatcggctgcagaacaaatttggtgatcaatataagctttttcttctcattaacccagaggatgataagccagttgcagtagttgtacctaggcaaacattgcagcctgaagctacagctgtcccagagtggtttgctgctgcttcatttggagtagttaccatcttcacccttttgctccgaaatgtacctttgctacaggacaacttgctatcaacatttgataaccttgagctattaaaagatggagtttatggcgccctagtaactgcggccataataggcgttcatgagattgcacatatccttgctgctagggatactggaatcaagcttgccgtaccatattttgttcctagctggcagataggatcttttggtgctattaccagaattgtcaatatagtccgcaatcgtgaggacctactgaaggtagcagctgctggaccattggcagggttctcccttggatttgttcttttgctgctaggcttcatcttacctccaagtgatggccttggccttgtgatagatccagcagtatttcatgaatcatttcttgttggtggtcttgcaaagcttattcttggagatgctctaaaagaaggaacaaaactatccataaatccactggtcttatgggcctgggctggtctcctgatcaatgccatcaatagcatccctgcaggagagcttgatggcggccgcatagcatttgccatgtggggaagaaagatatcgtctcgaatcagcagcttggccattggacttcttggaatttcagctctcttcaacgacgtcgcgttctactgggtggtgctgatcttcttcttgcagagaggaccgatttcccctctctctgaagaaataacagaacctgagaacaattacatcagcattggtgtagccatcttgctctttggacttcttgtctgcctaccctacccattcccctttgatccatcacaactaactgattttgacttgtgaaacaaaatcagtcacaggtcacaagctttcttcctcccaaatttatgttagatgctgagatgtatgtaacctgtcggctccctgttttatttatcttagccttggtcataaagatttggagtctatgagctccattgctccttgcagtagcaaaataaaatgcaggagcattcctgtggtagttcagttgttgtagtagtattttggtaggatgcatcagtgtagaacagcatatgagcagttgagcacatgattctggatgtaattttatcagtgcagtagttttttgcattaaggatgtataattgcctaattggagtatctgttggtaggaagagtaacaccttattacagagcgcaagattcagc

SEQ ID NO: 14447 - DNA, 2034 bp, Oryza sativa
  ref <308>: DATABASE ACCESSION NUMBER: AK065032
  ref <309>: DATABASE ENTRY DATE: 2001-12-06
ggtctccgcctgctcctcccaccaccaccaccgctgcttcccttctcccctctcgcccgccgccgcctcgccgcgacgcgcatcggcgccgccccacgaccgcagcagagaagcccaccaccacgcgcggagcggccgaggaggcctcaccactattggtgcgggatggcggaggtcgccgccggcaccgggcagctcattggcgtcgccgtggccacgctcctcgcggcgatcttcctcgccgccgcgcttcttggcagccgccggcgccggcggcgggcgccgttggcagggaagcctgcggccgtgggtggctgcggggtggccgacggcgaagggtgcggcggggatggccggaccgacgtcatcgtcgtcggagccggggtcgccggatctgcgctggcatacacgctcggaaaggatggccgtcgtgtgcatgttatagagagagacctaacagagcctgatagaattgtcggtgaactgttacaacctggtggctacctgaaattgatcgagttgggtctcgaggattgtgttcaagaaatagatgctcagcgtgtccttggttacgcgttattcaaagatgggaaagacacaaaactctcctatcccttggagaagttccactcagatgttgctggtaggagctttcacaatggacggtttatacagaggatgcgccagaaagctgcatctttgcctaatgttcaattggagcaaggaactgttacatcattggttgaagaagatggtacagttaagggtgttaaatacaagaccaagtcaggtggagaattaaaagcatatgcacctctgacaattgtatgcgatggctgtttctcaaaccttcgccgcgccctttgctctccaaaggttgatgtaccatcttgttttgttgggctggtcctggagaattgtcaacttcctcatgcaaaccatggccatgttgtcctggccaatccttcacctatcctattttacccaataagcagcactgaagttcgctgtttggttgatgtccctggtcagaaggtgccttccatagcaaacggtgaaatggcaaaatatctcaaaacagtggttgcacctcagattcctccagaaatctatgattcattcatagcagccattgataagggaagcataagaacaatgccaaacaggagcatgccggctgctccacatccaacccctggtgcacttttgatgggtgatgcattcaacatgcggcatcctttgactggtggcggaatgactgttgcattatctgacattgttgtgctacgtaatcttctcaagcctctccgcaatctgcatgatgcatctgctctttgcaaataccttgaatcattctatacactgcggaagccggttgcttctaccataaacacattagctggtgctctatacaaggttttcagtgcctcacctgatcaggctaggaatgagatgcgccaagcctgctttgattacttgagccttggaggtgtcttttcaaatgggcctattgctcttctgtctggtctgaatcctcgaccattgagtttagtggcacatttctttgctgtcgctatctatggtgtcggtcgcctaatgcttcccctcccttcacctaaacgcatgtggatcggcgtaagactgatttccagtgcatgtggtataattttccccatcatcaaagctgaaggtgtgaggcatatgttcttccccgccactgtccctgcctattatcgtgctcctcgtccaatggagtaaggggggaaaatgaaaggagaagcgaagagaaaatccctgccactgtcctgatcggcggatgtttttcgtggatggcaattttcctgtgtaattggtagtagtcgtcaggccgtgaggttgtgtgtgctgttgttctaatggaacgaggggacctgtatacaccgtcacattccctgtacacttgccactttcgttgttccgtcagggatgcatgtcgactgctaatccttaagctgtatatcccccatgaattcatcatgattgcgtctttgctct

SEQ ID NO: 14448 - DNA, 986 bp, Oryza sativa
  ref <308>: DATABASE ACCESSION NUMBER: AK065033
  ref <309>: DATABASE ENTRY DATE: 2001-12-06
gtcccgccgttcatctcctcgtctcgccccgctccaagcgcgccgccatggccaccacctccttgtccctgcatggcgtcccatcccccaccgccaccaagctctcctcctcctttctcggcgcccccgcctccttcctccggccgacgccgccgccgctcgctgccccctcgcggagggcgctcgccgtcagggccatggcgccacccaagcccgggggcaagcccaagaaagtggtgggcctcataaagctggcgctggaggccgggaaggccacgccggcgccgccggtcggccccgcgcttggtgccaagggtgtgaacatcatgtccttctgcaaggagtacaatgccaagacggccgagaaggccggctacatcatccctgtcgagatcaccgtgttcgatgataaaagtttcacctttatcttgaagacccctcctgcctcagtccttctcctcaaggcagcaggtatcgagaaaggttcaaaagaaccgcagcgagagaaggttggaaaagtaacagcagatcaagtacgtacaatagctcaagagaagttgccagatttgaactgcaagagcattgactcggccatgagaattatagcgggcactgctgctaatatgggaatcgaggttgaccctccaatacttgagaagaaggaaaaggtgctcttgtagtctgtttctctggcacccatgaatcaccttactgatggccacctgtagattttacttcctttttgttcgtcaatatgttgttcctagtgcttgaatctttttccctccgtggtcagtttgagagcaaacagaccatctacttttcacaagctgtaatcatttacatccaaactgtagatggttttcatgctgcacctatttggtggagtttccacattttttcttgtgaagtccctatgatacaccacatgtgcacatagctcagcttgtcaaacctgagtaagatcttactgttcctgttgccct

SEQ ID NO: 14449 - DNA, 1216 bp, Oryza sativa
  ref <308>: DATABASE ACCESSION NUMBER: AK065034
  ref <309>: DATABASE ENTRY DATE: 2001-12-06
ggagagaagccgaaccccacaaaacctcctcccccctcgccgccgccgccgccgccatggccgacgagctcgacgaactcctcggcttcctctcctctccccagccaaacgtgcgcggcgcggcggcgggcatcgtgcgggggctgacgggcgacgcggacggcctgcgcgccctctcggcgcgcgccgaccgcgcgctgccggcgctgctccggctgctggcgtccgcggggggcgagctgggcacggggggagcggcggcggactcgctcgtcaacctcagccaggacggcgcgctctcggcccgcctcgtgtcgctcggcgccgtcgtggccgccatggacgtcgtggccaagcgcggcggggagcagccgggcctcgcgcgcagcctcgtcatgctgctcgccaacctcacccaggtcgactccggcgtcgcggccctcctccaggttggagatgaaaagatgcaaggactgtatgttgcaaagcttgtgcggtcattctgcaggtcatccagtgagtctgaagaggaagatatctttgaacatgttgcttctatattagtgaacatctcaaaggttgaagctggaaggagaatactgatggaacctaagagaggccttttaaaacagattatacggcaatctgattcaacaaaccaacttagaaagaaaggggttgttagcaccatccgtaactgttgctttgaagctgatacccaaatacaaaatttgctctctctagcagaatatatttggccagctctacttttgcccgtagctggaaagaagatctacagtgaagaagatagatcaaaaaatgcctcctgagcttgcaaatgcactctcccatgaacgagaggctgttgagaactctgaaattcggcaacaggcacttgaggctatttatatgattgtccttcaggatgaaggacgaagggctttttggtcagtcaatggtccgcgaatactgcaggttggttatgaagacgaggaggacccaaaagtgatggaagcatacgagttaattggatctctgcttgttggcaagggtgatgatgagcaagatcaagaacaaggaggacagaggccttaatttctgctgtttagaaaaaaaaaattcagtcctccatcgtgtacaatattcttctatttatcagttgttgcaaaaactgggctacattgcaatgctaccgtaatcaattgttgtattatgg

SEQ ID NO: 14450 - DNA, 1869 bp, Oryza sativa
  ref <308>: DATABASE ACCESSION NUMBER: AK065035
  ref <309>: DATABASE ENTRY DATE: 2001-12-06
gagacgccatgagcgccagagagagattttggtgccaatagacacacactgatttcatcatcatctaggcccaaaaacctctactcttccgcgtcttggaaaattcttctcagattgcatcaccagtaggaggattgtcagattgctgctgctgctcttgtactagttgtattcaggattcagaatttgggcggacgacgacgaggataaatcggatcttttcttcctccttgattaattcctgaggcgtgtgtgtgattagttcaaaaaagaaaaatagaagcgagatgtcggcgttgctcgatctgctcatgggggtcttccgccagccgaccctcggcggcgtcgccctcgagctcgcctccctcgccgcgccgctctggctcgccgccctcgtcggcctactcatcggctgggcgtggcgcccgcgctgggccctcgtcgtcgtcggggaggcgccgccgccgccgcgtgccgccgccgaggactcctgccgcaagaacgagctagttgccgccgttcctagaactgcgatggccgccgccgcgccggaggaggatgagggattggccgtcgacaccggagatttgatgcacctccgccgccttgtcgaggagaaggacggcgggccggcgtggattcacatgatggacaagacgctgcccacgatgcgctaccaagcatggaggagagatcctgagggtggcccgcctcaataccgcagtagcactatctttgaggatgcatcgccagaagttgtcagggatttcttctgggatgacgagttccggattaagaacacttgggacgacatgcttcttcagcacgatacgttggaggagtgcacaaagactggaacgatggttctccggtgggtcaggaagttcccgttcttctgcagtgacagggagtacattatcggtcgcaggatatgggcatctggaaagacgtattactgtgtaacaaagggtgtgcctcgcccctctgttccaaggtgcaacaaacctcgtcgtgtggacgtgtactactctagttggtgcatccgtccagttgaatcaagaaacggtgatggctcaatgaccgcatgtgaggtgctcctgttccatcatgaggaaatggggattccaagggaaattgcaaagctcggtgttcggcaggggatgtggggctgcgtcaaaaggattgagcctggcttgagggcataccaaatcgcaaggactgctggcgagcccctttcaaaatgcgctgccatggcacatgtcaacacgaaggttgatcctgatgagctcatcactgcagaggacaagacagaggccagttcaaccaacaacgctgaagctgagaaaccaaagcactggacaggcaatatacccaaagtcatccttgtaggtggcgcagttgccctggcatgcacgtttgaccatggactgttaacaaaggctctcatatttggtacggcgaggaggtttgcaggaccaggaaggagatgaagttaagtcctaatgaacaattcttcgcttatcatttttcaacagaaggtacaaaaggtcgcccgcaaagctgtcatcgtaccaatagtccaatacagcagatgatgcagatcaagccttttttgcagttcagatagtgccattgttgcatattctgggttggtttgtccatgttagatcagttcatgaaaagatctagttcgagacaaaaaggagtgttcgtttagcagactaggggcatactgctgttactgcagtttctgaggattagaactagctaagctgggattttgagaccaaaaaaaccggttgtatggtgtacaatgtattaacgctcaaatttgaggtgctataaaatatagtgctattgtttgttact

SEQ ID NO: 14451 - DNA, 1161 bp, Oryza sativa
  ref <308>: DATABASE ACCESSION NUMBER: AK065036
  ref <309>: DATABASE ENTRY DATE: 2001-12-06
gttgagtgctcatcaatccagcccatccccctgctgctgctgctgctgcttcgctgagacgacgagaggaagaagacgagcccccaagccaacgccgggaggttcagcgaggacgaggccaggtatttcttccagcagctcatctgcggcgtgagctactgccacttcatgcaaatttgccaccgggatttgaagctggagaacacgctgctggacggcagcccggcgccccgcctcaagatctgcgacttcggttactccaagtcgtcgctgctgcactcgaagcccaagtcgacggtcgggacgccggcgtacatcgcgccggaggtgctatcccgccgggagtacgacggcaagacagccgatgtgtggtcttgtggagtgactctttatgtgatgcttgttggtgcttacccctttgaggaccctgatgaccccaagaatttcagaaagaccattgggagaataatgtcaattcagtacaaaatacccgagtacgtccatgtatcccaggactgcaggcaactcctttctagaatttttgttgcaaaccctgcaaagagaataacaataagggagatcaggaaccacccatggttcctgaagaacctgccaagagagctcacagaagctgcacaggcaatgtactacaagaaggataacagtgccccgacctactccgtccagtcggtcgaggagatcatgaagattgtcgaggaagcgcggacgccgcctcggtcctccacccccgtggccggctttggctggcaagaggaggatgagcaggaggacaacagcaagaagccagaggaagaacaggaggaagaggaagatgctgaggatgagtacgacaagcaggtgaaacaagtccatgccagtggtgagtttcagctcagctgagtatttctgtccagcagcacaggaagattgcaaactggagatattgtcataatgtggcagctgatggtcacactcccattctgtagtttgcagtcttgtttttcttttttcagtttcattttttcttttcttctctttgatgctgcaacagtgtaaattaccaaagtggttctgtcactgtctttgtaatgactgatttaagttagcatgcagaaacataatgtattgaataaaaccatctcattgagcatcttctttctc

SEQ ID NO: 14452 - DNA, 2010 bp, Oryza sativa
  ref <308>: DATABASE ACCESSION NUMBER: AK065037
  ref <309>: DATABASE ENTRY DATE: 2001-12-06
gactcttgcttgcctctctgcgtgatcccgatctgcagagctcgccgccggcgagctaagccccggaggcgcgcgcgtggacgccccccccccccttctcctccgagcagcggccaccggtggccgccgccgccatctcggtctcgaatcgaggtggacagaaaaaagtcatcagctttctgcatgcgatttggtagatactgacacgtcttgattctgctcaaggaaggcagctgattgattggttgggagggcaaactaaaaggggtgtaatcttggccaattcgatagaaaaacacagagatttagtggcgagaatggattggctgtccgcgaacctgcaggtgaaccctcaggtgactgtccatggggactgggtgtcagcagtcatgccgctgatgaagctgctgtgcttgacggtcatcggccttgtgctgtccaacccgaggacgcagatcatccccaaggccaccttcaagctcctgagcaagctcgtctttgcgctgttcctgccatgcctgatctttgtccaccttggccagtcggtcacaattcagaacatcctcgactggtggttcatcccggtcaacgtgctcatcagcacggccatcgggtgcattcttgggtacatcgtcgcgctgatctgtcgcccgccgccgcagtttttcaggttcacggtgatcatgaccggatttggcaacacgggtaacctcccaatcgcgatcatcgggtcggtttgccataccacggatcacccctttggtcctggatgccaccgcaagggtgtcgcttatgtttcgtttgctcaatgggtcgctgttattcttgtctacaccttggtttaccatatgatggagccaccgatgcaattctacgagattgtaggcgaagggaacgagattgtggaagagcctgcacagatcagcaactacagtagatctctgcttcatgaagcggaatggccagggatggctgacaaagaaacggagcactcaaagacgccattcattgcacgggttttcatgagtatttcaggctcttcacagaatacatttcctgatattgattttgcagaagagggcacttctggtgctggacctagcagtccaaaatcgctaaggtgtttggcggagccaaaggttgtaaggaggatcagggttgtagctgagaagactccaattcagcatgttctccagccaccaaccatcgcctccttgctcgccattgtcatcggcatggttcctttgttcaaagattttgtgtttgtgcctgatgcaccactgtcgttctttacagacagtttggagattctagctcaagccgttgtaccctcggtgatgttaattctagggggcatgcttgcagaaggacccaaggataatgccttgggtatccggactatcactggtataattgttgcaaggctcctgattctcccgtgcattggcatcggtgtcgtcctgctggcagatcggttgcatctgctttgtcgaggaagaccacatgtaccgctttgtgctgtcgctacagtactccacccctggtgccatcctgcttggagcgattgcgagcctcagaggttatgctgtcaaggaagcatcggcacttctattctggcagcacatttgtgcggtgctatctctctccatctacctgatcgtatatttcaggttgcttaccatttgaaagatgatggtcggccgccttccaaaattggtttgtagcattcatcctcggaagtgatttctagggagatgggtacttgaatggattttcaaccacgtctccttatggtcaagtgtatttatagtatatttaatttttttttagcgatttatatttcagatacatgtagaacttgagaacatgagatatgttcttgtcgttcattagtgtcaatatattgctgttcgcttgcacatttcttgatccgattacagcattacagttgctgctcaaaagttgtacaagtactgctacattagaagtcaatatattgctgtttgatgc

SEQ ID NO: 14453 - DNA, 1212 bp, Oryza sativa
  ref <308>: DATABASE ACCESSION NUMBER: AK065038
  ref <309>: DATABASE ENTRY DATE: 2001-12-06
gattttctccccccattctctctcctcctcagctgcttctgcaggtggaggagaagcagcagcagcagcagctgttgctcccatggcttccatctctgtcccaaacccagctccttcccctacagaggatgcagagagcataagaaaggcagtgcaaggatggggaacggacgagaatgcgctgatcgagatcctcggccaccggacggcggcgcagcgggcggagatcgccgtcgcctacgagggcctctacgacgagaccctcctcgacaggctccactccgagctctccggcgacttccgtagcgcgttgatgctgtggacgatggacccggcggcgcgggacgccaagctggccaacgaggccctgaagaagaagaagaagggcgagctccgccacatctgggtgctcgtcgaggtcgcctgcgcgtcgtcgccggaccacctcgtcgccgtcaggaaggcctaccgcgccgcctacgcctcgtcgctggaggaggacgtggcgtcgtgctcgctgttcggggacccgctcaggcggttcctggtgcgcctcgtgagctcctaccggtacggcggcggtggcgtcgacggcgagctggcgatcgccgaggcggcggagctgcacgacgcggtggtgggcagggggcaggcgctgcacggcgacgacgtcgtccgcatcgtcggcacgaggagcaaggcgcagctcgcggtgacgctggagcggtacaggcaggagcacggcaagggcatcgacgaggtcctcgacggccgccgcggcgaccagctcgcggcggtgctcaaggccgcgctctggtgcctcacctcgccggagaagcatttcgctgaggtgatccggacatcgattctagggcttggcaccgacgaggagatgctgacgagagggatcgtgtcgcgggcggaggtggacatggagaaggtgaaggaggagtacaaggtcaggtacaacaccacggtcaccgccgacgtccgcggcgacacgtcggggtactacatgaacacgcttctcaccctcgtcggccctgagaagtagccatgtagcagcttggacattttattgcttgctcatttgatttgaacaaaatacaccgtgtgatgttgcagttattagtaaaatgcgagtaggatcgatgttgttttcgttgggtggattaataatggagcatgttttatcgcaccgtggtgtatcct

SEQ ID NO: 14454 - DNA, 1414 bp, Oryza sativa
  ref <308>: DATABASE ACCESSION NUMBER: AK065039
  ref <309>: DATABASE ENTRY DATE: 2001-12-06
gaatacacaacccagctggtgaaagagaggaacttgagagttagctagcatggcggcagcattgtcgttcccgatcatcgacatgagtctgctcgacggggcagagaggcccgcggcgatggggctgctccgcgacgcatgcgagagctggggcttctttgagatcctgaaccacggcatctcgacggagctgatggacgaggtggagaagatgaccaaggaccactacaagcgtgtgcgcgagcagaggttcctcgagttcgcgagcaagacgctcaaggaaggctgcgacgacgtgaataaggcggagaagctggactgggagagcaccttcttcgtccgccacctcccggagtccaacatcgccgacatacccgacctcgacgacgactacaggcgcctcatgaagcgcttcgcggcggagctggagacgctggcggagcggctactggacctgctctgcgagaacctcggcctcgagaagggctacctcaccaaggccttccgtggccccgcgggcgcacccaccttcggcaccaaggtcagcagctacccgccgtgcccgcgccccgacctcgtcaagggcctccgcgcccacaccgacgccggcggcatcatcctgctcttccaggacgaccgcgtcggtggcctccagctgctcaaggacggcgagtgggtggacgtgccgcccatgcgccactccatcgtcgtcaacctcggcgaccagctggaggtgatcaccaacggcaggtacaagagcgtgatgcaccgggtggtggcgcagatcgacggcaacaggatgtccatcgcgtccttctacaaccctggcagcgacgccgtcatctccccggcgccggcgctggtgaaggaggaggaggccggcgagacgtatcccaagttcgtgttcgaggactacatgaagctgtacgtgcgccacaagttcgaggccaaggagccccggttcgaggcgttcaaggccatggagaacgagacccccaaccgcattgccatcgcttgatagcgtgtgtaccacagcgacccctaccgggtcggtgtcagtaaggtttagtcgtgttcgtagtgatcagtgcgtgcatggtcagctactcagctcgcgttttctacctgaataaattaagctccgtcgtcgtcgtctcgtcaccttggataattgtcagttggtgtggcgtgctgttgcacgtacggccatgtatctttgtcggctgtcctcgtgtggtacttgatagcttgtgcggcgtgctgtaccgtgtacggtttattatctactccagttctatatcgtggtgatttctgataattttcgtttttgtgttacatagcaaaagtgcccgtgcgttgcaacgggaagtgtatagaccagaaaatatgcaattatttaaaatataaatttgct

SEQ ID NO: 14455 - DNA, 1151 bp, Oryza sativa
  ref <308>: DATABASE ACCESSION NUMBER: AK065040
  ref <309>: DATABASE ENTRY DATE: 2001-12-06
gggttcgtctagtcgtcttcctactctcctccgatctccaattcttatccaacccatggtgcttggctccccggaagtcgggatggaggattcgtcggcgactcacctctccgacgaggtgcaggatccaggtcgaggaagctcagatgcttctgttcgtacttctttgcgagattcgacaggaaaggaggctgttgcggccgttgaaccggtgagggaggagctggttcagagcgcggtcggttttctgaaacacccaaaggtagtggcctcttctgatgtccagaggcgttctttccttgagaagaaagggctcaccgtggatgaaatcgatgaggcatttcgacgtttacttagcccatcttcaaactccatgagtccaaattattgcacatatcaaggggtatctgatcattcttcaaaaatcacacaggagaatccttcaacagttacaaaatgtatggatgatgattcagggagacctgagcctgaaactgaatctgtggatcctgtggtgcctcgccacccaaaatcatatatggagatcatggaaatgatacaaaggggagagcggccagatgatatacaggacattaatgatgaccctccaaacccttatcaaccaatctcggaatcccgcatggcaccaaagcccaagccatgggaaaagcagggtcaagaaagttccatctgggagttgaaatctcagtcaatggacaccatcgaatcgagatcagaaattcaacttgacagcgccaaccaatttactgaaacggagaatagatcaaatcaaggggactcactattgctggaagaaacggttgcaggttctgaagctcacacagatgatgctgcctcgacaaagtcgtaaatgcaaaagcacgtgatgatggaattgaacatgctgggaaactatttcaacatatacttagccaaaaagctcgaatttctagtgcaacagttttctgaaattctctgaacctgctttctctgagctcactgatctgcgtacttccctattgttggaatcagatttagcaggcacaaaagacctcccaattttcgttagctggaacagttatacaatctgtataatgtaatcatgaaaaatatacaaacaacaacatgaaatgttgtgacttgtgaggctc

SEQ ID NO: 14456 - DNA, 2237 bp, Oryza sativa
  ref <308>: DATABASE ACCESSION NUMBER: AK065041
  ref <309>: DATABASE ENTRY DATE: 2001-12-06
ggcttttctctctctcctctcctctctctctctctctctctctcccttctccacgcacgcacatcatcattattgggaggctcgtccctgtccgtcgctcgcctgctctcatcctctccctctctctctcctcccccgtttctcggttagattcacgcctctccaacctcctcccccaaccccaagaattcccgatcgattgattgactggccgacccgcccgttgaatggtcctgtacttaattcactctggacttctggagagccaggaacaccacaagtttgagataaaagcataaggcagtgcaagtcgcagccgtggcagatggacgccacgacgagcagtggagcttcctcctctctacccctccaccttatcatagatgatgctcttgcccttgtttctccgttgcagcagtcgtttcagaggtcacagcgccattgctttggtggctctgctcctggagaattccccttggctgcaaacccatcaattgtcctccatgtcctcacatcatgcaatctggaacctgatgacctcgctcacttggaggcaacatgctcgtttttccggaagcctgccaatttccctcccgattttcagttgtcaatgtcagaactcgcagcgttggatatgtgccagaaacgggcgatatttaaacctatgactcaacaagaaagagaaatgtttaagcaacgttgcggcgggagttggaagctggttcttaggtttataatggcaggtgaagcatgttgccggagggaaaaatctcaggcaatcgctggacctggtcacagcatcgctgtgacaacaagcggtgcagtgtatacttttgggtccaacagctctggtcaacttggccatggtagtttagaagaggagtggaggccacggattatcagatcattgcagggtattagaattattcaagcggcagcaggagcaggacgcacaatgcttgttagtgatgctggtagggtctatgcatttggaaaggattcatttggagaagtggaatatgcagcccaaggttctagggttgtcaccacaccacagctggtggaatcattgaaggacatatacattgtccaggcagcaatcgggaacttctttactgcagttttatctcgggaaggtcatgtgtatacattttcttgggggaatgacatgaaacttggtcatcagacagagccaaatgatgttcagcctcatcttctagcaggccctcttgagaacattccagttgtgcagattgccgcaggctactgctatctcctggctctggcatgccaaccaagtggcatgtctgtttattctgttggttgtgggttaggtgggaaacttggccatggttctcgaaccgatgagaaataccctaggttaatcgagcagttccaagctttgaatatacaaccagtagtggttgctgctggtgcttggcatgctgctgttgtaggcaaggatgggcgtgtttgcacttggggatgggggcggtatggctgcttgggtcacggtaatgaggaatgtgagtctgttcctaaggttgttgagtccttagtcaatgtgagggctgtccatgtagcaactggagattacaccacatttgttgtatctgataaaggtgatgtttactcgtttggatgtggtgaatcatcaagtcttggccacaacactataactgagggtaataataggcacactaatgtccttagcccggagttggtgacttctttgaagagaacaaatgaaagggttgctcagatcagcctcactaactccatttactggaatgcacatacatttgcactgacagattcaggaaaactctatgcgtttggtgcaggggacaaagggcagctaggtaccgaactcgtcgcgcaggaaagcgagagggggacaccggagcgtgttgaaattgacctcagttaggtccaaattgcaacgccacttcatctccttttctctccagatgcactcttctaacgttaactttcaaattgattgcattgcgcgccctttagcttgttggctgttcatcagcctcatcctgctctgcagctaatccttgtgaaaatagttaccatcaattaaacagtctgttgttcatatgattggttcggtttagaaactttgtatatatgattatcatgtaaatataacagtcaggtctcattgccagttcctttaaaacatgagtagctggcttttaacatcctgtgaaatttaccttaactct

SEQ ID NO: 14457 - DNA, 1764 bp, Oryza sativa
  ref <308>: DATABASE ACCESSION NUMBER: AK098883
  ref <309>: DATABASE ENTRY DATE: 2002-08-28
gggggccgatctgccatcgccgcccatcgatctgcagcttcgcccgcgccgccggcgagagggcgccccgagggcacggtggtgggcggcctcctcctccccttcccctcgcctccgctcgagcctcctcccccctgtgaggcgtcgtcggcgtagtcgcgcgcgcggccgggcgagaggggcgaggcgggccggcctccttacaccccgaatccgtcgccgtgcggatcgaattgaaggcgggggacgtttatcttcacgtgaggatcaatgtccaattatcacgaagaccacattgaagagatggaggatgattatgacatggacgacactgctgatgacatgggcgaagagaactatgagcgagggatgagggattcggattcagaggatgaagagcatggccagtcgaatgataagatcccagatacctcatcagttgatgcaagaaaaggaaaggatattcaaggaataccatgggagaagctagcgatcacacgtgataaatacagacagaccagattagatcagtacaagaattatgagaacatgcctaattctggagaagcagccgcaaaggaatgcaaaccgactgaaaaaggcgggatgtattatgaatttaggcgaaatactagatcagtaaaatcaactatactacattttcagctgagaaatttagtatgggcgacatccaagcacgatgtctatttaatgtcacatttctctgttcttcattggtcggcactgagtggtcttgataccgagcttatgaatgtccaaggacatgtggcacccagggagaagcaccctggaagtttacttgagggtttttctgggacccaagttagtaccttgtcagtcaaggacaatttgctggtagctggtgggtttcaaggagagctaatctgcaagcaccttgatcgagaaggaattagcttttgctgtcgaactacatatgatgaaaacgctattactaatgctgttgagatattcaatactaccagtggtgctgttcacttcatggcatcgaataatgactctggtgtaagagactatgatatggagaggtttcagctctacaagcattttcagtttgaatggccagtgaatcatacagcattgagtcctgacagaaagcttgctgttattgtgggggatgatcctaatggtttactaattgacgccaattcaggaaagactcttcattccttgaaaggtcactttgattactcgtttgcatcagcttggagcccagatggcagaacatttgctactggcaaccaagataagacatgccggatttgggatgcgcggaatctctctaaatccctccatgttttgaggggtaaccttggagccataagatcaatccgcttcacgtcagatgggcagttcatgtcgatggcagaaccagcggactttgtccacgtcttcgatgtcgggagtgattacaccagaaggcaagagctggacttctttggtgagatatctggcatgtctttcagcccggacaccgacatgctttttgtcggtgtgtgggatagaacatacggcagcctcctccagtttggccgtctgtataatcactcgtatcttgactcgctgtgttgaggtgaggaacacaaagcagacgttgggcgcgctgtgcctcagctgtgcaccctgtgctgaatcttgtcatcatacattaggtatcccaaatcagaatttgaagtcgtttacccgataattcaattaataaaacttgtacccttctgtatgtgg

SEQ ID NO: 14458 - DNA, 2810 bp, Oryza sativa
  ref <308>: DATABASE ACCESSION NUMBER: AK065042
  ref <309>: DATABASE ENTRY DATE: 2001-12-06
gggtcgtcgctcatctccccacgttgcatcccgtcatccccatcgagcgatccccttcctcctgatttctgtctagaggcggcatcgatgctcctcgcctcctccaagatcttccatcgtaggtcgtcacccacgacggcttgccatctgctatcccgtgcccagatgttggatgcatgatctcctccgtcggcacaatccgtgtagccgcatccatcggcgttcgtctccccgtacggtggcgaccggattggccactgaccagtgcctcatctccgtacacgggagtggggttttcttctgttcaagctccctcctcggctgctccgttcatcttctctggatttctctgtggctgcaagcctgcaagatggagctgagttgggaggctgagcaagcagcaacaggaggaatcaaggaacaagggggaaaatgtgagggaggaggaaactgggatacctaagtaatttgctaatgcgtttttaggctacctattccaatccctcatcgtatggtgtacattcagattcagatatgattggcttgatatttaggagaggccaaatcaaggaatgcaaataactatagagttgtacagggttccttaagccctctattaagttcaaccataactcgagctgtcaacttgcaagggttttcatcctgtctatatggtcaaatattgccactctgtaactaaatgttgtaagcctgtgagatagttgccagacacttataatcggtaggtcatccaagatacaagtacaaagcaagagatattcatcaaagggtacacaacaattttgtagacaagtgaaaaatcgttggtcagtttgaaggaacaaatttcctcttgcaaaatacctattcctgtctagagggccaatgcactatcctcagctcaggaaaacataatggatgaagctgtcaattgttccactgagaaacaaacacaagataagataatagtgaacattcatactgcattgatctctgctctgagttctgagcaagaggttctgtggagaaattgatgggctaggatgaggtgttggtcgcagattacagagaggacgacttttatgctgcgcatctacagtcatactgagcaaatcctctcttaagcagggctgcgatatttagattatgttcaacaaagaaagttggtaggatcatggaggaaatgaatcttatggttatttttttcattgcttggtggtgtttcagacaactcagtctgctgccatatatccataaaacaaaacgttccgacaggatctgtcgagtgactgatgaattacgatgaggtgttgttcatagataagagagatgtcttgtgtggtaccactctgttgtgccatcctgccgagggacccatctagctttgtcctcactcttaagcatgatcagattcatgttcatgctcagttttgtggattcaagtttgaagaacacaaacaatatgcagtttcagcagggagattcatcttgcaggacacaattcatcttctttaccacagagattcctttctgatgtatataatggtgaatagagaaactcatgcaagagcaataccacctcagttactgccaaaagatcagagaatcgcctttcaaaagctgagccagcattgctgctcttgaaaaacacatctatttctactatttttgtttggtgatatttgtatcccaaaacctatatttagactatatcatggtgtgtatttttgtgccgttttggtaattgagacattttttctctattggtcatgatttatgctacataaaagagactgtacatgggaggcctctctatatacgatattacttctcttattttgtcattaaaatcattagtacagttgtaagttactccttggcaaactccaatggtttatcggctttacaaacactgtacaacaaacattgcataatctttatgatcttctgcttaggtagtgtatcagatactgaaatatgcttacgcatattctttgttctgctaatgcattataataatactttttatataaaacaatatgttttctcaataaagttatattcatgtgtatgtggccaggtgctattttatacgcttagtgcatgacattgtagcataatggtggcatgtgcatcatcttcaaacggcgcagcgtagtgcgcatttctttctagtatctttggaatggcaagacaaacctatacccttttaggtgctaagctatacataattacttttatgttacttcaaagatgcaattcacaatattttaggttttgaaaattggacatactagagtgcttaggatgcaataacatacaaaaccttcgttagccgcatatgatatataatataattatgttttcagatgggccaaatgacatgcatctgtagctcatctcctgatgaaggtggtcatcccagagcttcagtattgtgcgagctattctgagatacactgccactggagtcgctcaaatgtaagtaattattttaaacagttatgttctacttgtttggttatttgtttaaacaagtactaactgcccattcactttatatttggggctcccatgtaatattatcccacctaccatggcaagaggctgtctcaaatatagcaatgctcacgcttcggccactctttgttttgtggtgggaagataagaccaaggatatgttcttctgtattggcctggggatcaaccaactgatgttctagctattgctagctcaccatgtctaataggcaaacactaaatgattcgtatcgccgattcataatattgagcttctaaaaattatccct

SEQ ID NO: 14459 - DNA, 2703 bp, Oryza sativa
  ref <308>: DATABASE ACCESSION NUMBER: AK065043
  ref <309>: DATABASE ENTRY DATE: 2001-12-06
gtctttactcccctccccctcctctccctcttcccccaactgcaaagcagctgtccacctccacgctcctcctcctcccccaaccccaacctctccgccttccctctcgccggcggcggggatcctcatccgccccgcgacgcccggccctaaccgcggcggagatccgtggagggtggggggacattcttggtaattaagccgcgcggcgcgcgcctcccctcttcttcttggattcgacggggtggcgcggggatgaacacgaggccggtggtgctcgtcttcctcctgctggtgctcgtcatcacgtcgcagttcgagtggaagcagcagatcggggacgccgccgccgaccccgccgacgcgcgccgcaggcaccagggcctcgccaaggaggacgccgtcaaggagaaggtgagagcgagcaatccatccttctcctccttattgttcgggttctttctagtcgcgatctctcacttctttggatacagctagaagcaaaaccaaacctgccccccaaaccatccgtcacatttggtactgtatatttttctcctttaattgaattcagttagctttattactctacgatctgaaatcaattcagatactgctttaaatttaaatgggggatcaacattagaattcgatattgcgcctgttttcttcggcaatcaactgttgaagaggttaggatcgtgtgaccataattaagggatgttctccaggctagaaagatactactggtgatgacaggacgcaccaactatcacgaccttttcatgaaaaagaaagctttcttctattggaagcatcagggaaccttgcgtcctccaattataagatctggcttttgaggttgagttgtgctgcaaagtacatccaatttcttctattccaatgtgatatactactaatcgccagtttcttgtatctttaattaaattttgggcaacttcaactttgcttgtaaacattttttttttgttaaccaggctagggtgttgtttccttaggggtatactagccagttccctgaggaatttctgactgtaaataatgagatactgaatgtctgtgcaaactagtatgtccacttcacggttccaaaaataaatgaggattaagaacaggttggcaaatgtgatcttggaaggaaatgtgtacaaagatgatcatgtgggcactatttaaaaattctacagatgcacatgttctctctctgtttttttttttgtccagtgcacattgtctgcaagtatgcatgtcctaggttctaacacgaacaacttcctacatccatcatttctgtaaattcttaagcatgctagtcttcctacatccatcatttctgtaaattcttaagcatgctagtctgatataggtgtaaatccttctatgaatatttgtctgttcctgtttgtgatgtaccacgaatgtcattcactttcaagaataggattgagatgtgcatgaattctacggatcccacatataactttgaccagtacacatatgtttatgtgaatttggagcttgtcttacatttgtgaaggaaatttaagtcctggtatccatgtattgccagtataatgattcgtggaatccttgtgacaagcatataaaatatcggaataattttggtctcggttagcgaaagtatattttaaagaaagttggcattagattaagcattttggctcgatcaattgatatctcgaatcttgattatgatttgtaaattgaatatatttaggtataattactacaattctgagatctattgtgactcttctgctactgtgagcatttaatttgctgactattattcacttattttctagcatgtcttctctttccatttggcaagtgaagatcagtgcctgtgaatgcccttcatagtttaggccatgtcatggggagtccattccttcgaacaaccttgtaaggagaagttgctggactcggttacttatagcaaatgattatcactagtgactttggagtattggtatttaaaatgctgggacatgtctaataaagattaatcgaaatgctagactttaaatcatgaacataagatgttgatctattatatctgtttgattgtaaaagaggtggagcaatgaaggacagtaattttatagctaacctggaaatcataaagatgcaagatttgactatactggtgtctgttgtttgaatacgttcttctatcttgctctatattggtttacaaggccatgattctttgcatagttttctcattgaagatttacatgctatttttctatctacagataatattttctcaggagaaaaatattcaacaacttaacgagcttattgagagccttcagcggcagctcctgcattgccgtggtagcaacaacactgtccacaccacaacagtttctcatactgaagttagtgaggtggacgggcaggaaagcattgatgattgatggtattggtagataacctcttggcaggttgttcactgattctagtacagaagccaaagaacaacggctgatcaggcagcaccatactctacaaatgccatctaatagggaggtaccaaatcacactgtattgtacacttgctaccagtgtttctctggtaagattgtagagagctgtaacatgtaatatgttggttttaggtcacggccactaattcaattgaaaagttgcttg

SEQ ID NO: 14460 - DNA, 3093 bp, Oryza sativa
  ref <308>: DATABASE ACCESSION NUMBER: AK065044
  ref <309>: DATABASE ENTRY DATE: 2001-12-06
ggtcgccgttcttgattggcttggctggctttggcttccctgttcgatattgatttggtttgtactagtagaatactgctggtattagctaggcgttgatagtggccggggcttagcgtcaggtccactgaccactggggcactaatcaaagttgctgatttctttcgctttcttttttcgttgcaatgcgatcctcatgtcggcgcgggtatcgcgggggagatcaaagttcgtagcttcgttagccgcttagcctactagtgctctcattagtctataagagagaataggtcttttgctttgctttcaggacatggtcacctttctcaggcagcaagcgtaagcaaggcagaggagagggaaagaacctctctgcagtgctgctgctgctagcttgcagaaaaaaaaaactctcatcttttgcaggaagagacatcactgtttctgcattcgtgtgcatttggattaagctttgcttatccctttttagtggagattgttgagtatatcaggtaaacacatgtgcagtcttgctgtgctgtatgtatgtgtgtgcatgattttgtcgtttgttttatgcatgctgcgttatctgctcttattcaaactcttgttatgtgctggctggctgattcaattaatcaggttaggtacatgattgtttcccctgtaagtcatgttggttttcagcaacttgatgcgattggataaacaagtttgaaaaaccgaccatgttttgagtatgctgttcccttgtttctgttttgattgcaacctaagagactcttgagtcttgactattctaatgtttgaagatgttgttgttcaagcaagagacgtgcactactatgctcctatgtagttaccctcatactagcctgaaaagcttacactcatagatatgcttctctcacaggtctatatattggcagctctggttggagatagacactcacactgagccaagatggggagtttgcacaagttcagtgttattctcctcatgttatgttttgctacgttggggagcgctcagtatgtcaagtataaggatccgaagcagcccgtctctgttcgtgtcaaggatctgctcggccggatgactctcgctgagaagattggccagatgacccaaatcgagagggagaatgccacggcggagcagattgccaagtacttcataggtagtgtactgagtggtggaggcagtgtgcctgctcctcaggcatcagctcaggcttgggcttcaatggtgaatgaaatgcaaaagggtgccctttcgacccgactaggtattccgatgatctacggtattgatgccgtgcatgggcacaataacgtctacaaggctacaatcttcccccataatgtcgggctcggcgctaccagggaccccgacctagtaaagaggataggagaagcaactgctcttgaagttagagctactggaattccctacgtctttgctccttgcgttgcggtttgcagagacccaagatggggacgctgctacgaaagctatagcgaagacccaaaggttgtccagtcattgaccacactcatctctggcttgcaaggcgatgttccatcaaatgatgtaggaagaccatatgttggtggaagtaagaaagttgctgcatgcgcaaagcactatgttggtgatggtggaacggtcaagggaatcaacgagaacaatacaatcatcgatactcacgggctgttgaccattcacatgcctccttattataattctatcattagaggagtctccactgtcatggtttcatactctagctggaatggagtaaaaatgcacgcgaaccatcacctaatcactgattttctcaagaacaagctccgcttcaggggttttgtgatttctgactggcaaggcattgaccggatcacttctcctccgcataagaactattcttactcaatcgaggctggaattggtgccggcattgacatgatcatggttccttatacctacacagaattcattgatgacctgacagagcaagttaacaacaaaattatccccatgagcagaattgacgatgctgtctacaggattctccgagtcaagttcaccatgggtctatttgagagcccttttgctgactctagcctcgccgatgaacttggaaagcaagagcaccgtgagctcgcgcgcgaagcggtcaggaagtccttggtgctgctgaagaacggaaaatcctcctactctccggtgcttcccctcccgaagaaagccggtaaaattctcgtcgcgggaagccatgctgatgatttgggcagacagtgtggaggatggaccatcacctggcaaggacagcccggcaacaacatcactgctggcacgacgatcctgtcggcgatcaaggccaccgttgatcccagcacgacggtggtgtactcggagaacccggacagcagcgtggtcaccggcgacaagtacgactacgcgatcgtggtggtcggcgagccgccgtacgcggaggggttcggcgacaacctgaacctgacgatcccggagcccgggccgacggtgatccagacggtgtgcaagagcatcaagtgcgtcgtggtgctcatctccgggcggccgctggtggtggagccgtacatcggcggcatcgacgcgttcgtggcggcgtggctgccggggacggaggggcagggcgtggccgacgtgctgttcggcgactacgggttcaccgggaagctgtcgcggacgtggttcaagtccgtggaccagctgccgatgaacgtcggcgacgcgcactacgacccgctcttccccttcggctacggcctcaccacgcaggcgcacagcagctgatgcggcggcgatgtcggtggagagtgacgttggttgggacgtgacgccgtcgtgacgagagagatggcgatcatgtagtactacatacacatgttgttggggtggatttgtttgtggtgggggaatgcaataacgatgagagtgagtgatgtgctcaattcttgaggctgtggctgttgttagtgtcatagtgttgggttgtggaataataaaaaatcagatgcgcttttgccttctttctctcggc

SEQ ID NO: 14461 - DNA, 3793 bp, Oryza sativa
  ref <308>: DATABASE ACCESSION NUMBER: AK065045
  ref <309>: DATABASE ENTRY DATE: 2001-12-06
gggtggtctccccttctaaaatctcgccgagtccacaagcgcatttaccagcagctccactcccatccatccccgcgaccctcgctgatctcaccaccaccccgacccacccgcaccgccccaccatcacatcgcccgcgtgagattgctacccaaaaatcctcacctccgacgacgaattgaggaggaggggagagagagctcaaaaaccctaggaggaggtttgaggggccagatcgatggagagccccgcgaaggaggaggcgggaggggagctggcgatggagatcgagtccaccgtcacggcggaggactggcgccgggcgctggcactcgtggtgccctccgtcgtcgtcctccgcaccaccgcgccgcgggccttcgacaccgaggtcgccggcgccagctacgccaccggcttcgtcgtcgacaagtccaggggcatcatcctcaccaaccgacacgtcgtcaagccagggcctgtcgtcgcggaggcgatgttcgtgaacagggaggagatccccgtgtatcccctgtacagagatcctgtgctatcaagttccttaagtatgatgagatcccgctagcacctgaagcagcatctgttggtctggaaatccgggttgtcggcaatgacagcggcgaaaaggtgtcaattttggcgggaacacttgctcgacttgatagagaagcaccttactacaagaaggatgggtacaacgatttcaacacattctacatgcaggctgcatctggtaccaaaggtggctctagtggttcccctgttgttgattgtcaaggaagagctgtcgccctgaatgctggaagtaaatcttccagtgcttctgcgtttttccttccattagaacgtgttgttagggcacttaatctgatacgtgacagttgggaagcttttggtagcaagcctgaatctgattacattcctcgtggtacacttcaggtgacctttcaacacaaaggatttgaagaaactcggcgtcttggactcaggaatgaaacagaacagatggtacgccttgtttctccatcaggcgagactggaatgctggttgttgattccgtggttccagaaggacctgcacataaacatttggaacctggtgatgagcttgttcgcatgaatgatgaggttgtaacacagtttctcgcaatggagaccttgcttgatgacagtgttggcaaggagatagatttgcagatcgaaagaggtggtacacctttaacagtaaagttggaggttgaggatttgcactctataactccaaatcatttcttggaagttagtggtgctgtgatccatccactttcgtaccagcaggcaaggaattttaggttcaaatgcggtctcgtatatgttgctgaggcagggtacatgctctctcgggcatctgttccacgccatgctattattaaaaagctcgcaggagaggatattgaaaatttaggggaccttattgcatgtatttcaaaactatctagaggagcaagagttcctcttgaatatgtaaagtacaccgaccgttataggaataagtctgtactggtgaccattgatcggcatgaatggtatgcgcctcctcagttatatactcgaaatgatgcaactggcttgtggactgcaaaatcagctataccgccggaatctccttttatagcttcagctcatcatgctggtcctattgatgcaaactccaattctgtttcatctttaccagaatctagtcctatggatctcaagtgccagcatgagtctgagaatttgacagatggatgcatcaaaacacaaactgatgatgagattaatgtagatggatcccactcgagtgaagattctcttgttgagaaaaaaaggcggcgggtggatgaggagatagctgctgagggaacgatatcatcttctggtgatttagatgaaataaaaggtggtggtttgaggcatctgtctagtgttgatggttctgaccttgctcgaacaatatcaagtaatgcatcattggcagaacaagtaattgaaccagcccttgtaatgtttgaggtgcatgtaccaccagtgtgcatgcttgatggggtgcattcgcaacacttcttcggaactggtgtaataatatatcattcggactgtctgggtctggttgctgttgataggaatacagttgctgtatctatctctgatataatgctttcttttgctgcatatcccattgaaatacctgcagaagtcgtttttctgcatcccgttcacaattttgcattggttgcttatgacccttctgcactaggagctggagcatcagttgtccgggctgctaagcttcttcctgaacctgccttgcgccgaggagattctgtctacctagttgggctaagtagaagcttgcaggctacatcaaggaaatcaatcataactaatccctgcactgctgttaatattgggtcagctgactgtccacggtatcgtgcaattaatatggaggtcattgagctcgatactgattttggtagtgcattttcgggtatattgacggatgagcaaggaagagttcaagcattatgggcaagcttttccacccagctgaaatatggttgtagcagttcggaggatcatcaatttgttagaggtataccaatatatgcaataagtcaagtccttgagaaggtaatctctggtactcctggaccatttcgtattatcaatggagttaggaggccaataccattcatcagacttctggaggtggaactctatccaactttgctttcaaaggcaagaagttatggattgagtgatagctgggtgcaggctctagctaagaaggaccctgtgcgaagacaagttttgcgggtcaaaggttgtttggctggatccaaagcagaaaatctccttgaacagggagacatgatccttgctatcaataaggagccaattacatgcttcctagatatcgagaatgcttgccagaaattggaccaatctgttgattcagatggagtccttaacatgacaatattccgtcagggaaaagaaattgatcttattgttggaaccgatgtaagagatggcaatggaacaacacggatggtgaattggtgtggatgcataatccaggatcctcattcagcagtgcgcgcacttggttttttgcccgaagaaggtcatggagtttatgttgctagatggtgtcatggaagtcccgtacatagatatggtctctatgctctgcagtggatagtggaagttaatgggaagccaactccagatcttgaaacttttatacaagtggtgaagggattggaaaatggtgaatttgttagggtgcggaccgtccatttgaatggcaaacctcgtgtgcttactttgaaacaggaccttcactactggccgacctgggagctcaggtttgaaccagagacttccacatggaagaggggaataataaaagcgttgcaatcaactgtagcgtgatcaactatgtttgtgtttgaactcttcatgctctcagagggtgttccttagggagcctaagcatggaggtgcggaaatggggaatgcgtgcccaactgcccatgttggtaagctagaatcctgcgtaatgcaggatggaatggttggcattaggataggatgcttgaagttgaaggatatagttattcatagaaaaatatatggattcattgtctgtggataattagaccgcagcatctgctttttgtataatctattctattgctacaatttttgcagtaataataaatctttagctctttagcgacc

SEQ ID NO: 14462 - DNA, 1175 bp, Oryza sativa
  ref <308>: DATABASE ACCESSION NUMBER: AK098884
  ref <309>: DATABASE ENTRY DATE: 2002-08-28
gatcgcaaagagggggccatctcgagtggctcgccggcggcggcggaggcggggagagatgctgccctacgcgacggcggcggaggcggaggcggcgctggggagggcgatgacggcggcggagtcgctgtggttcaggtactcggcggggatcccggactacgtcctcttctggcacaacatcctcttcctcttcgtcgtcttcacgctcgcgccgctccccgtcgcgctcctcgagctccgcgcgccggccgccgtggggccgttcaagctgcagcccaaggtgcggctctcccgggaggagttcttccgctgctacagggacgtcatgcgcctcttcttcctcgtcatcggcccgctccagctcgtgtcctaccctaccgtcaagatggtgggaatccacacagggctgccactgccgtcgctgggggagatggcggcgcagctgctggtgtacttcctggttgaggactacctcaactactggatccatcggttgctacatggggagtggggctatgagaagatccaccgtgtccaccatgagttcacggcacccattggattcgccgcgccatatgcacactgggctgaggtgctcatcctcggcatcccctcctttgtcgggccagcgcttgcacctggtcacatgatcaccttctggctctggattgtactccgccagatggaggccatagagacacacagcggctttgatttcccgttcaacctgacaaagtatattccattctatggaggcgcagaataccatgattatcatcactatgttggacgccagagtcagagcaatttcgcttctgttttcacgtattgtgattatctatatggaaccgacaaaggttacagataccataaggcgtaccaagcaaagatgaaggctctggggcaaacggaaggcgagaaagcagatagcaatggattgagctacgcgaagttggattaaactgtcctatatatagccaaaatctggaatgcctccctggtcattttgttcgttacggcttgtgtagtgttttgattttgtttcgatttctgtagtagtgtcgtgctgctgtgccttttgtttttgtggctgtgacttgtgagcatccatggaacttgttacgctgaccaataacattgtgactcgggtagtctttatgtggtttgcgctc

SEQ ID NO: 14463 - DNA, 2166 bp, Oryza sativa
  ref <308>: DATABASE ACCESSION NUMBER: AK065046
  ref <309>: DATABASE ENTRY DATE: 2001-12-06
gaggagcgcatggagttcatcgggtgagcgttcttggtagtaggagattcttctccaatccgtgggagaagagctaggaggagcggaggaatccgtgtcccctcccgcggacctgcttctccggctgcccgaaacatgctttctccctatcagcctttgtgatgcattgaacaggggttgagaagtactgtaatttttgtaatggctgggtgttccttggcaacactgagaggacaacatcgagggagatggatccaatctcacagcaagctccccacaaggattatgtctattaatctgccaaagagtaatcacagtcacaagattcagcttccatgccagtccaatttaggaagaaaacagaaaactggtgcatttgctcctttgggttttcatggaaggtgttgccggatcgaaacatcagttaaatgttatttcttgcagtcgcttgtggattctgagagtatgatctcaccaaatttgttattgctttctgatgaagctctactaactatcagtatagtttttgcatatttggctggagttgtaccctctggccatgcatttcctcatgctagaaaccatagtcaaaaccaacatcttggagctccaggtccatctgattctggtagggatatgaaatggttacctgaagggaatactaggttttaccccagcgatacatggagtgaagtgagaatgaaactttcagaagccttgcaatcgaatggtcgagatgccacttcggatggcagcgatagtgaactcaagaacaatcgcaaaaattatcctttgagtatgcttgcaattcatggtggtcccaggctgcggcttcttctagctacctttcagctacttgagatggaggcaagagggccatcaactttttctttctaatatgctggggattatcatggatgaatactgaagattacccatgcatacttcacttatttttttttctaagggagagagcatacttcaaaaagcttaagcaagctggtaagaaatgttcctgaaagttctgaacttgtagatgggatcaaatggttgcaaatatcaactacgttgattgatggcttgattgaaccaacatttatgaaatggattcaagaagaaaaagcctgggagaacagcaagatcaatgaagaacttatgaagacggtaaccagcaaaataaaggaggatgacaggatcttgaagaggttcaacagattagggaaatctgaactctatttggatctgctttatttcctgagatttggttctgcaaggtcttatagctattttgatgctaaatttctggctgaacatggagcgagaattttggaggacctggttattttcttagctgacgcggtcgctagtatttacatagagcttatatcagttgatggtgatatgccgactgatgttgttggttccagcttagctctatgctcgctgtcaaccagagaacttcaaagaatgcgtaacgaggtggcaattaatgggtggctgcaccagtattttgagtcagttgtctcaatgtacgaggacaggtttgagttatatgttttatccagaaaactttgtgaaaaaccagcagataatcaagctgaagtgacaaactggtggaggcttggatttggaaagccttccaccgttactcttctagagtacgttcacataagctcattttctcttccggtgagaaggacgaaagaattgagagctctggctggatggaggtattatttcagcctattattagaaatgtcagatattgccatgcctttcataagggctgttgtcaccaaagttagtgctgcagtgtcgtacttctgggtgtccatgataggaaggtctctgggattgattttctcagggataaggcaatcacttggttggagatgatcagatgtttctttggtttttgattgtgagatcttgtgactgagcgatatttgcctcgcagtcatgtccagttttgtcaatttatataggcttttcgttgacctttttttttactgttgagatggctgacttctggtcctcgttatacatgttctgtatcacataatgtaacaaagttcattgatctgaccaaagggtgaaaattatttgttaatcttggaatgcatcatgtggtatataacattttgaaggcaaaccacacatttcagg

SEQ ID NO: 14464 - DNA, 1950 bp, Oryza sativa
  ref <308>: DATABASE ACCESSION NUMBER: AK098885
  ref <309>: DATABASE ENTRY DATE: 2002-08-28
gaaggaggaggcaggaggctgccataactccgcccgcaacctccgctctctgtctcgcggtgacctcgtacgtacccccgcgctagctgttaatggaaacgccgcgccctctcctcctcccttcccatcatcctcccgcggcctcgccctcctcttcttcttcttcctcctccttcccctacagatagcgaagcgagatggattgttgtagataggatacgcatactgtggctcttcccccctagcttcttccatctcctcgatcgtgttcagtttgattttggttttcgcttgtcactgtgtgggtggtggtgttgttggccatggcgaggagtggtggggagttggtggtggtggaggaagacgatgagtacgccaagctggtcaggaggatgaacccacccagtgttgtgatagacaatgactcgtgcgacagtgcaactgtcatccgggttgatagggtcaagaagcatggcattttactggaggctgttcaagtacttgtggacctcaacctcgtcatcaccaaggcttacatttcttcagacggcaactggttcatggacgtgttcaatgtgaccgatcaggacggcaacaaggtgcagaacaaggaggtcactgactgcattaagaaatgcttggagtcggaggattacctcgtgctgccggcgagctcgccggccggcggcgctgcgccgtcggaggagaccacctgcatcgagctcaccggcaccgaccggccggggctcctctccgaggtgtgcgccgtgctggcttcgctgaggtgcaacatcgtgaacgccgaggtgtggacgcacgaccgccgcgccgccgccgtcatccagatcaccgacgaggccaccggcctccccgtccgcgacggcgggcggctgtcccagctgcaggagctcctcggcaacgtcatgcagggagacggcgacggcggcggtgacagcaggaagggcagcacggccgtgtcgctgggcgccgcgaacgccgagcggcgcctgcacaggctcatgctcgacgacggcgacgccggccgatgcggcgaggagcggggcggcgtggcggcggcgaaggcgaaggcgaaggtggtggtgatggactgcacggagcggcggtacacggtggtgatcctccggtgcagggaccggccgcggctgctgttcgacacgctgtgcgcgctcaccgacctgcactacgtcgtcttcaacggcaccgtcgacgccgagggcggcagcgccaaggaggcctaccaggagtactatgtccggcacgtcgacggccacccggtgcgctgcgacgccgagcgcctccgcctcgtccgctgcctcgaggccgccgtcgagcgccgcgcctccgacgggctggagctggaggtgaagacggaggacagggcggggctcctgtcggagatcacgcgtgtgttccgggagaacagcctgtcgatcatccgggcggtgatcaccaccaaggacggcgaggccgacgataccttctacgtctccgacgcctacggcaaccccgtcgacggcaaggccatggaggcgctcggcgagcagctcggccacgccgtgctgcgcgtcaagagcaacggccgcgccgccatcaaccgcgccgaggacagcggcggcggcggcgcggcggccatcattggcaacctgctcaagggctcgttccaggggttcaggctcatcagatcctactcctgaaaaaaaaaattgctcattttctcaccaagaagatcagaaacacgaccttgttcatacataagaatctgacgactttagcttaggaaataaatggagaatggggtgatgtaaatagtcttgtggatatctgaaaacgccattgcttcttcagcatcatacacttaggttaaggttaacttgcattgtacatataatttgtaaagtggttctcatctaaaatttgtggttaaacccc

SEQ ID NO: 14465 - DNA, 1915 bp, Oryza sativa
  ref <308>: DATABASE ACCESSION NUMBER: AK065047
  ref <309>: DATABASE ENTRY DATE: 2001-12-06
gctcccacgagacagcacaaacccaatcccatccaccaaccacctcgccgccgtcgccgccgccgcagccatgggcgtctccgccctgctgctcctcctcctcgccgcggccgccaccgccgcgccgccggagcagcccgcattgtccgctactccctcctccgccgccgccgccaacaacagcagcggtggtggtggtggtgcggcgagcaacggggtgaactcgaactcggtgctggtggcgctgctggactcgcactacacggagctggccgagctggtggagaaggcgctgctgctgcagacgctggaggacgccgtcgggaaggggaacgtcaccatcttcgcgccgcggaacgaggcgctcgagcgcgacctcgacccggagtttcgccgcttcctcctcgagccccgcaacctccgctcgctgcagcggctcctcctcttccacgtcctccccgcccgcctccacgcctccgactcctcctcccccgacttcccctcctcccaccccaccctctccggcgagcgcgtcgacctctccgcctcgccgatgcgggtcggcgccgcggcggtcacgcggcccgacgcggtggtgcgccccgacggcgtcatccacgggatcgagcggctgctggtcccgcgctccgtgcaggaggatttcaaccgccgccgcagcctcgccgcgatctcggcggtgctcccgacgggggcgcccgaggtggatccgaggacgcaccgcctcaagaagcccgcgccgcccgtcccccccggcgcgccgccggtgctgccgatctgggacgcgatggcgccgggcccatccatcgcgccggcccccgcgccggggcccgggtccgggaaacaccacttcgacgggcacagccaggtgaaggacttcatccagacgctcctcctctacggcggctacaacgagctcgccgacatcctcgtcaacctcacctcgctcgccaccgagatgggccgcctcgtctccgaggggtacgtgctcaccgtgctggcgcccaacgacgaggccatggcgcggctcaccaccgaccagctcagcgagccggggtcgccggagaacatcctctactaccacatgatcccggagtaccagacggaggagagcatgtacaacgcggtgcgccgcttcgggaaggtgaggtacgacacgctgcggctgcccaacaaggtgacggcgagggaggccgacgggtcggtcaagttcggccatggcgagggctccgcctacctgttcgacccggacatctacaccgacgggaggatctccgtgcagggcatcgacgccgtgctcttccctcccaaggacaccgccaccggcggcgaaggctcaggctccggctcgtcgggcgccgctcccgccaggaaggcccccgccgtcaccgcccactccaagtccaagctccgacgagggaagttgttggaaggggcatgccaagtgatgggcttcctaggccgaagatcgcgattcgcgagctgccaatagactacgacaatggcttgatggacaaatatgtatatctgccactgctttttgctcaactcatgacgctgaaacatgaaccgaaatgaaggctacagatgatgattggttggatggatgaatggacgaacaaattgatgatggttttacataagcttaattaagaggaagaaataaggtgtcatgagaacgagttgagagagacggatggcagacattctggttggttgttggaggtggaaaaaaaaaaaaggatggaaatttgtttatactggtcagtgaagatcaaacaccgatgtatagcaattaaacttttctatttttttatttgttttattttattttgttgatgatgatgttcagcgctttttgataatgaggaatgccaaaaacaaaaattgcagtgtt

SEQ ID NO: 14466 - DNA, 1790 bp, Oryza sativa
  ref <308>: DATABASE ACCESSION NUMBER: AK065048
  ref <309>: DATABASE ENTRY DATE: 2001-12-06
gggtgtagttcagtcagttccacacctctccttcctttaatttctctctgctcgccggagacagactagcttagctagtaggagagggaggaactaatggccgccggagacaagaccggcggcgacgacgctgcggcggcggcggcggcgccattgctggtgtcggcggcggggaggcggcggcggtgccccgggtgcctgacggaggagaggtgcaaggccgacgccggcatcccctacctcaacttcttctacatctgggtcgtctgcctctgctcctcgttgccaattcagtcgttgtttccgtatctgtacttcatgatcagggacttgaaagtcgcaaaggaagagcaagatattgggttctatgccggttttgtcggggctacttatttccttggaagaactatcagtgcagtgccatggggcatttttgctgacaaatatgggaggaagccctgcattgtgatcagtatcctctcagtgattgtgtttaacacactctttggcctcagcacgacttactggatggcaattgttaccaggggattacttggattactctgtggtatactaggaccaatcaaggcctatgcttcagaggtctgcaggaaggagcaccaagctcttggaatttcccttgtcacatcctcgcgagcaatagctctggttgttggaccagctattggaggatttctttcgcagcctgcaaagaaatacccaaatcttttctctgaagaatcggtatttgggaggtttccctactttctcccttgcttcgtcatatcggtactagcagcaggagcatgtgttgcgtgtatttggcttccggaaaccctgcacatgcaccatgatgacaaagaagtcattgatgcactagaggcacaagatgcgacttcagacttaggagaaacaactaaagaatcaggatcagggagaatgggccatacaaagagtttgctgaagaactggcagctgatgtcagcaattaccctctactgtgtcttctctctccatgatacagcttatcttgagatattttcactctgggctgtgagcagcagaaaataccggggcctgagttttacatcccaggatgttggtatcgtgctagctatttccggttttggtgttttggtgtaccaacttgcgatttatccgcttcttgctaaatatgttgggccaatcaagccattccgttatgcagcggtcttgtctatacttctcctttcaacatatccattcatggctaacctgtatggtctggagctcaaagtactcatcaacattgcttcgcttttgaaaaatatgttcgctgctacaattactattgcatgcaacatcctgcaaaacactgcagtgacgcaagaacaaagaggggttgcaaatggaatctctgtcactctgatgtcaatcttcaaagccgtagctccagcagcagctggaattttgttttcatgggcgcaaaagcacattactgggttgttcttaccaggtgagcagatcctgttcctgatgctgaacatggtgtcagtgattgggttcatcctgacattcaagccatttttcgccttgccggatatgcgatgatgtgtagttaggtaacaaaaaggccagaatttatcagacttcagcctggattctaacctgcaagaggaattcatgtactgtaccgcgtgtaatgttcagttgtgtaatcagtttggtggtatctttgatttctgtctgaactccgaaccattggatggtcgaggcatatgataaacagctaacgggatcttgtttcatct

SEQ ID NO: 14467 - DNA, 1553 bp, Oryza sativa
  ref <308>: DATABASE ACCESSION NUMBER: AK065049
  ref <309>: DATABASE ENTRY DATE: 2001-12-06
gggggaagaagaagaagaagaagtggctcaaccatccataggttagattgatgccatggcattctggagtgcgtgagtctcgaggcaaatctggatgcttccaacccccaccatccccaccacctccctcctcgatccctcgcctcggaggccgcaggtccaaggtttcctcgcgagctgggctctctctctttcttccactttcggattggtgattggtgttgggggcgtttcttgattcggtggtggggtgggatcgatcgccatgggagagcagcggcactggatttatttgtgaggatgattgttgaattggcaggcagtatttgagcggttgtctcccgaggaagaggagggattgctagtgttgatccattgtagtaacagagagagagagagagagccaatcttttgatgttttagagcataggtgttcttttttgcagttccaatggatgctaagggtgttaatgaccgggatgctctaattgatctggagagtggaaataacattgttgtcggcgagcataacaacggggcggatgccaattttgctgttgcccaagaaagaacagcaccgaatggttcatggaatggtgccatgggcaccaatggatgcctgaaagatgatgtaaatcatcagcacatgtgttgctgtctgtcctctccagatgctgctgccaaaaatggagatgaccggaagtctgatggggaggagaagctgggccttctggatacttccggaggcgagaaaacaaagaagaagcggtccaagaagccaccgcgaccaccacggccaccaacacccacgccattggatgtttccgaccagaagctcctcaatgagctgagtgaacttgctatattgaaacgggcaaggattgagcggatgaaggctttgaagaagatgaagaacgccaaacatgggtcttcaagtggcaacttgtttcccctgatcattaccattatcttctgcctcgtcatactctggcaaggttttttctcacgaacggggtcggctgtgagcttccatggatcacctgaatcgtccgttagagcgcatagcagtctgatctccattcggttctacaagaacaataattctaatagcagatctcgagaggccatatcggcagctcccaagaatgctgagacaccatcgaggctggagatccatagcaaagcaagaaagatcacgagatgaacattgcgccccgagcatgatccgccatccatgattgccgtcgccgcaatgcctcccaacttggccattttgaaacctcatcacgtcaggttgatgtaaattatgagaatttcagtgcttctcgaggccgtcctcactgtaaatgatgaactactcttttagtgtgggtgtgtgcccccctctctgggttctatgctaaccagtggtggtaagagcaagctgtcttgttacaataataataaaatgttgctcttaataatagtagtatgatctagtctaattactgtttggccctgtaatgctgcatctggtagcaataaaaatcagaagtgtgtgttcttggctgttc

SEQ ID NO: 14468 - DNA, 2770 bp, Oryza sativa
  ref <308>: DATABASE ACCESSION NUMBER: AK065050
  ref <309>: DATABASE ENTRY DATE: 2001-12-06
gttccatccagttaagaaaagcagcagcacaagctgcacgagtagagagcactatcttggctagagaacaaagccagattccttggagttgtcctgccttctgaacaagaacaggccaagacagaaaggaaacaagctcaaacagaaataggagagagagattgagagagattggagggttcttgctagctttggggtgctttctttcttgcttttttgcttttcttggcgttttcgatggccgtgagctgaatccggagccttgcctgacacccccaattttagctgctgcttaggcagcctaatttggggattttgtctcaggcagtacaaatcccaaaaccaaattcagagactttgttggctaggctgggttaatctcctccccggtctggtcgattcgaagccatggagatatagcctgcaagcttcatggggctggagcgagctcgtatttcttgatgcaagtttcagcccctccaagaacaggtaggagagattatttgtgttccttccattgctggttggttgctgcagtctgcatgtggtggattcttgggaagaaggtggtggtgaggtgaggtgaagagggagatgcccaaggtggccggagatggcggcggcggtggccggaggagcgaggacttgcgcgttgttttcctcagggtcggcgccgccgtcgcgctctccgtcgccgggctgctcctctcgcggcggcggccacggcagcaactccggttacctcctcctcctcctcgctcagattcggatggaatgaagggtggtggagggctcaaggatgagctgaggatcctcaagaatgaggataccaaggccaaaatcatcaatggaaactctgtccacactaccactaccactacaacgatgaccaccaccgcgttagtaccactgcccccaaaatgtagaactcttgatgatgatgaagaattcctcctcccagaattcaacgaaatagttctcaaagaattcggccgagacatgggcaacattgcaacctcacctgcaccaagggtaagcgaagaagatgcaacgaagaccccggaaatttttgagcttagagaaatggtcagatcacttcaagaaagggagaagaccctggagctacagcttctagagagctatggtttgcaggagcaagatgtcgcggtgcgggagctcgagaatcagctgaagatcaacaccgtcgaatcgaagctatacacgctgaagatcgaatccttgcagtctgaaaatgagaggctgcaggctcagttaactgaaagctcaaagctggcttcagagcttgaggcagctagaatgaaatgcaagctgttgaagaagaagctgagacaggatgcagaacaagcaaaggagagaattgcctcacttcaggaaatggccgattcttggcagtgtaaggagattattactgaggggaaattcagtgctgaggttgaggaaaaattgagtaagctagaggagttggaaaatgaggcaagagagcttagggttgtcaattcaaggctgcagcaggagaatgcacatcttgccaggcgattggagctcacacgcctgccccctgtacccaagcccatcaataacatggaggtaaaagcattgcaggaagctgatcatttgaggcaagaaaatgacaagctggcaaaagaggttgaacagctcaagactgacaggttttcagatgttgaggaattggtatatctgaaatggatcaacgcttgcctgcgttacgagctcaggaaccaggatgctccatcagggaaaaatgttgcaagggatcttagcaagacactaagcccccaatctgaagagaaggccaagcaactgataatggagtacgcaaatgctggtccggatgagaaaaactttgatcatatagagttctgttcagagtactcttcctcaagagcatcatcattaggcgaacccgacgacgcgtcgatcgatgtctcactgatgaacaagcacaagaaccctaagaagaaaaagttcttttcgaagcttcggaaattggtactgggaaaagaaaaggagaacaaaaccattcctactctggagaggaggatatcgatttcgagctgttcatttgacgagttcaatggaagagagtcaattgatagctattcttcattcatgacagaacctggtaattctggcaatcaacagcatgataatcacggctcccgttggcattctatggacagccaaagtgctcgacatctcagcaaggaaatcgcagatgcaagaaacctccatcttggggtcaagagtgtgtcttttggggaggggagagtgagtaattttgggcatagttctcaccttggcaatggtgaagccacggttcctgaagatgccaagaagattcacaaatttgcagaggcactgaagacatctagaccaggttctaggtcatcaaggaaggaccactgataaacaaatagcataggaacaatctgctgcagagtgcagtaggcccatcttcctggatgtatatatttctccagttcttgatgggagattacttatagaagatgctactggaataaagcacacatgctttattctgtgtaaaatgtacaatacagtatatagtagtgtagtgtactaacctttaatcccagccctcaaactattcatttggggttggcttgtacttattcagtgtattgttcatgtattgctctatgcatacttcactccagctacaaacatacagctctttgacaagttatttatgtgtgcaaagttatgc

SEQ ID NO: 14469 - DNA, 2507 bp, Oryza sativa
  ref <308>: DATABASE ACCESSION NUMBER: AK065051
  ref <309>: DATABASE ENTRY DATE: 2001-12-06
gagtgaagccgccccgcggagctagctaaaccctagccactgcccgggcggagagttggggtttgggttggtggcggtgggccggtggcggctcggtggcggagctccggtgtggggtggtgtggaatggaatggaagttattcgatgatttcccaggattttgactaggccacagatggttacaagttgcattcatggtcaaaattgtgtctgaacatagagattctttggagttcatagacgaagtgatttgttttgttcaatacttccacacttataatgggtgctgtctgctcaaggaagaggagccaattagtgcacgaggatgactctttccagacatcttccaggttctcaaagaccagcagcttgaaatggctgctgcttacactgccacgcagcaattccgatgtctcccgcaagggccagggaaagggccctggtcgttgcccatctctaatggagctttgtgtggccaaagcctgcgaggatattaacaagtattctagtttttctgtattgccgagggatctcagccagcagatttttaatgaattggtagcgtcgaaccgtctcacggagacattgcttgaaacttttcgggattgtgcactacaggacattgatttgggggagtatcctggagtgaatgatgcttggatggaagtagtggcttctcaaaggcattcattgttatcagttgacatttcttgctctgaaataactgatagtgggttatatcttcttagagattgtccaaacatgcaaagcttggcatgtaattactgtgatatgatctcagagcatggcctaggaatcttgtcaggtctttcaaacctgacatctctcagtttcaagagcagcgatggtattactgctgaagcaatggaagcatttgctaatttagttaatttggtaaatcttgatctcgaacgatgcctaaagattcatggtggccttgttcacttaaaaggcctcaggaatctggagtcactcaatatgagatattgtaacaacattgcagattcagatatcaaatacttatcagatctcacaaatttgaaagaattgcaattggcttgttgtagaatcactgatctgggtgtttcttatcttagaggcttgtccaagctaacacagttgaatttggagggctgtccagtgactgctgcctgtttggaagctatatcaggattggcttctctggtggtgttgaatttgagtcggtgtggcatatacggtgaaggctgtgaaaactttcaaggtcttaaaaaattgaaggttttaaacttggggttcaataatatcacagatgattgtttagcacatctgaaagagttgatcaatttggaatctctaaacttggactcatgcaaggttggagatgaaggcttattacatctgagaggccttatgcttttgaaaagtttggagctatctgacaccgaagttggaagcagtggactccagcatctatctggccttcggaatttggaaagcatcaatctctcgtttacgttagttactgataccggtatgaagaagatatctgcactgaattcactgaagtcagttaatcttgacaatcggcagattactgatgttggcttagcagcacttacaagtctcactgggtcgactcatctggacctttttggtgctaggataacggactatggcacaagctgcttcagattttttaagaatcttgaatctcttgaagtctgcggtgggttaattactgatgctggagtgaagaatatcaaggatctcaaagctctgaagcaactcaatctttctcagaacgttaacctgacagacaaaaccctggagctgatttctggcttaactgctttagtctcgctgaacgtctccaacactcgtgtatccaatgccggcctccgccacctgaaggatctgcagaacctgcgctcgctgtcgcttgattcctgcagggtcacgacaagtgaggtgaagaagctgcaggcgacggtgctccccaacctgataagcgttcgacccgagtagctggacgctacatgatcacctgtaaataatcatctggatggcttcatgtagatagctttgcaagggcctggattgaagccagattaataagtaaagtctatggtagcatttgttggcctaaaaccgggagacgttggcccaaccgggagaaagcctttctacaccccaaaagctagctcatgaggtgagggacccctccccttttaagttggtgccactccccctaaactttcaatgtgggactattctcaacagcatttactaggtccttcctgctccgtttatcgggatcttttcgttttcaagtactgaaaaaattacttgtatttccttcactccgtgtaccctccaaggcgtgacgggaaggaacaaaattgtaaatattgcgcttcctcgccattgtgggatgcttatgtgtagtgtggtgtacagtgccgcattttctgtggcagtttgtgatgtcattgtgcttgggttt

SEQ ID NO: 14470 - DNA, 2283 bp, Oryza sativa
  ref <308>: DATABASE ACCESSION NUMBER: AK065052
  ref <309>: DATABASE ENTRY DATE: 2001-12-06
gtttataggcgatcgatcgagccacctgtagccgaacgcctcactggccggcggcgagggagagacgagaaaaggcggcggcgccggcgggtgatgggcagcgtggcgatggactccgactacggcgtgccgcgcgagctgtcggcgctgcagaaggcccgcgcgctctaccgccccgacctcccgccctgcctccagggcaccacggtgaaggtggagtacggcgacgcggctatcgcggccgacgtggcgggcgctcatgtcatcagccacgccttcccgcacacctacggccagccgctggcgcatttcctcaggaagactgctgctgtgccggatgctaccgtcataacagagcaccctgttgtcagggttggtgttgtcttcagtgggaggcagtccccaggtgggcacaatgttatatggggactccatgatgctataaaggctcacaacgcaaacagcaagctcattggtttccttggaggaactgatggattgtttgcacagaaaactttggagatctccgatgaggtcctttcctcttataaaaatcaaggtggttatgatttgcttggacggacaagggatcagatcagaacaactgaacaagtgaatgctgcaatgactgcttgccaagccttgaagttggatgctcttgtaataattggaggtgttacatccaacacggatgctgctcagcttgctgagacttttgctgagtcaaagtgttcaacaaaggtagttggtgttcctgtaactctgaatggggaccttaagaaccagtttgttgagacaactgttggttttgataccatatgtaaggtgaattcgcagctcataagcaatgtctgcactgatgctctttctgctgagaagtattactactttgttcggctgatgggacggaaagcatctcatgtggctttggaatgtgctcttcaatcgcatccaaatatggttatactaggtgaggaggttgctgcatcaaaacttacaatttttgatatcacgaagcagatatgtgacgcagtccaggcaagggctgaaaaggacaaaaatcatggtgttgtacttattcctgagggacttgttgaaagtatccctgaattatatgctttgcttcaggaaattcatgggctacatgataaaggtgtttctgttgagaacatatcttctcatctttcgccttgggcttcagctctatttgaatttttgcctccatttattaggaaacagctacttcttcatcctgaatccgatgactccgctcaactttctcagattgagactgagaaacttctagcccaattagttgaagcagaaatgaacaaacgtctgaaggaaggcacttacaaaggaaagaagttcaatgcaatttgtcacttctttggctaccaagccagaggtgccctaccctcaaagttcgactgtgattatgcttatgttcttgggcatgtatgctatcacatcttagctgctggcttaaatggctacatggccactgtgacaaatcttaggagtcctgtgaacaagtggaaatgcggtgctgctcctattacttccatgatgaccgtaaagcgatggtcacgaggaccagctgccagtcaaattgggaagcctgctgttcacatggcgagtatcgacttaaaaggaaaaccatatgagttgttgagacaaaactcttccagcttcttgatggaagacatctacagaaaccctggtcctctgcaatttgagggaccaggtggagagacaaagccgatttcattgtgtgtcgaagatcgagactacatggggaggatcaaacaattgcaggagtatttggagaaggtcaaaagtattgtgaagcctggatgctcccaggatgtcctgaaggcagcgttaagcgccatggcctctgtgacagagatgctaaccatcatgtcttctccctctttcagtggccaagcaaccatctgagagccagtgaagctgaagcctgtcatatcctggtatccgtatctctctgttttgagtgtctcgtttttggacctgtgaatttgagtgtgatagggatgtgttgaggatgagttctggaacagcaataattgctcaaacaggtcactgcattgcgagtggtttgtgttcgattatattagatttgagcttaccgttttctttggcggcactattatgaaacgtgagctagcacctctgattcctctgggaatcgtagctatcttgcctgcacaggatgtgagctcagagaatttcgccgtgattcataactatcttttctgc

SEQ ID NO: 14471 - DNA, 1842 bp, Oryza sativa
  ref <308>: DATABASE ACCESSION NUMBER: AK065053
  ref <309>: DATABASE ENTRY DATE: 2001-12-06
ggccttccccacctgccgctaccccacgcccccttcctctccaggtctcccccctccccttgtgcgacttgtgtcgaacaccgcagccgccacccgtagacgcgacctcagcaaccccacccacttcctctccgtgggcgcccgccgcgcgtcttgcccccagatccggcgcccaccccagctttcttatgaggattaataatgggagaatgaagatgaggaacaaacaacggaaatcatctgctctcaactttgatgcaggatgccgatcttccttgtcttttattgtatggagcttggtgggagttgccctcattgtttgcttcttttctgttgtccgtcaagcagacactaggcagaaccatatttatttcagacatctatctgctaccagagagttagaagagattgaggaggaacatttccgcttgccacctcctcacaaggttaatcctcgtgcagtgaaacggcgggggcctcgcaaggctccaaaggttattgatcaatatctggatgagtcatcagcagtgcatgccttgttcttccctgatgaaagaagtgcagtgaacccaacaaaaggtggaaatgacagtatgtacttctatcctggtagggtgtggctggacactgatggacatgccattcaagcccatgggggtggtattctgtatgatcatatcactgccaaatactactggtatggagaaaacaaagatgggctaacctaccaaactcaccccaagagtacatatcgggttgacattattggggtaagctgctactcatcaaaggacctatggtcatggactaatgaaggaattgtgcttcctggagaacctactaatttcacccatgaccttcataaatctaaggtgcttgagagacctaaggtgatatataatgatcatactggacaatatgtcatgtggatgcatattgatgatgcaaactacaccaaagcatctgttggtgtagcagtcagcaactctcccactggtcctttcacctacctctatagctttcgcccacatggatttgaaagtagagacatgacaatcttcaaagatgatgatgggtcggcttacctcttctactcttctcgtgacaatactgagcttcatgtcagtccattgacaaaggactatcttaatatcacggtagcaatgaggagaatattaataagacggcatagggaagctccggctgtcttcaagcttcaaggaacctactacatgatcacctctggttgctcgggttgggctcctaatagagcattagcgcatgctgcagaatcgatcatgggcccatgggagacattgggcaacccatgtgttggaggcaacaggtttttccggttgacaacattcttatctcaaagcacatttgtgcttcccctccctggcttgcctggtacattcatcttcatggcagacaggtggaatccttcaaacttgaaagattctcggtatgtttggttacctctgttcattgggggattggcagacgaaccgttggattacagttttggattcccggcatggtcgagggtgtccatttattggcacaggaaatggcgcctacctgaaagttggaagggttatacctgaattttgccctacgcacatgaagtacatacaaaaattacagatgatagatgcaatcatggaacagacatagtttgaagagtttggtgattgttccgaatatttcttgagatatctagtcagtgctttcgtaggcctttttgtaacgcaaaaatagtctgtcaagaaaaattgtataacagtgcagctctcaaaacaaatatttgacttgctgtaacatcctccaaaaagaaagttg

SEQ ID NO: 14472 - DNA, 2875 bp, Oryza sativa
  ref <308>: DATABASE ACCESSION NUMBER: AK065054
  ref <309>: DATABASE ENTRY DATE: 2001-12-06
gtgcggatggctgcgatcgttttgctgctcttccttgtcgtgggcttgatgccggtttccaatgggcagacgacgcccttctccccgcgattctccgtctacctcgcgtgcggcgccggcgggaacgtcgtcgtgacgtcggactcgccgcagcggactttcgtcccggacgacggcgagctgtccgggaagtccgcgaggttcagcaaccccgacgcgagcccgccgtcccctctctacgccgcggcgcgcgcggggacgagcggcttctcgtaccggctcagctacgctgccgacgcggcgcccgacggcaacaccacgctcgtcctccgcctccacttcttccccttcgcgtcgcagtccggcgacctcctctcggcgcggttcagcgtctcggccatggggaggtacgtcctcctgcctccttccttctcgccgccgcgcgccggcgtggtgagggagttcctcctccagtccgatggctccggcgagttcgacgtcgccttcacgcccgaatcaggggggctcgccttcgtcaacgccatcgagctgttccccgcgccgcaggagcttctgtggaagttccccctgacggcggtcaacaccgacgtctcgccgtcgcatcaggcgctggagacgctgtaccggctcaacgtcggcgggccaacggtgacgccgacgggcgacaccatgtggcgaacatggctccccgacgactcctacctctccccggcgacggtctcggcggtggccagcatccagggccagatcatcttcgaccgggcgcagggctacacgcagatggtcgcgccggacgccgtgtacaagtcgcagcgcacgacgaactcgaccacgtcgaacgtgacatggacgttcgccgtcgacggcaacagcagctacgtcgtccgcctccacttctgcgccttcgaggagctcagctccgtcatcggagaaggcgtcgatttcaatgtttatctgatgcaagccatgggtacccgggaattgaaggccaaggactacgcgacgctgagcagtccgacccaagctttctacatggactatgtcgccgtggtcccgaccgccggcgagaacctcacggtgagcatcggcagggcggcgagcagcgacagcaagaaggcgatactgaacgggctggagatcatgaagctcagagccgttgatatgactccggcgagctcgtccggcaagacgagcaaggtcgtcgtcgtagccgtgaccgcggcggtgctcggcgcggcggttctagcaggtgtggcattgtgcgtactgcttgtgcggcggagacagcggcgggcgacgctgcctgtgccggaggaggaggagaaggagagcgtggggacgccgtggtcgccgttcacgccggacggcgagggctcgttcggcagcgccgtggtcacgccgcggaggatgaacatgaagctccacatcccgctcgccgagatcatggtggcgacgggggacttcgacgacgcaaacatcctcggcgtcggcgggttcgggaacgtgtaccgcggcgtgctccgcgacggcacccgcgtcgccgtgaagcgcgccaagcgcgcgtccaggcaggggttcccggagttccagactgagatcctggtgctctccagcatccgccaccgccacctcgtctcgctcatcggctactgcaacgagcggtcggagatgatcctcgtgtacgagctcatggcgcacggcaccctgaggagccacctgtacggctccgacgccgcggcggcgacgccgccgccgctgtcgtggaagcagcggctggagatctgcatcggcgcggcgaaggggctccactacctgcacaccggccactccgataacatcatccaccgcgacgtcaagtcgacgaacatcctcctcggcgacggcttcgtggcgaaggtggccgacttcgggctgtcccgcgtcgggccatcgacggggcagacgcacgtgagcacggcggtgaagggcagcttcggctacctcgacccggagtacttcaagacgcggcagctcaccgaccgctccgacgtctactccttcggcgtcgtcctcttcgaggtgctgtgcgcgcggccggcgatcgaccagagcctcccgcccgacgagatcaacctcgcggagtgggcgatgcagtggagccggaggggccggttcgacaagatcgtcgacccggccgtcgccggcgacgccagcacgaactcgctccggaagttcgcggagaccgccgggaggtgcctcgcggactacggcgagcagcggccgtccatgggcgacgtggtgtggaacctcgagtactgcctccagctgcaggagagccagccgagcaccgagacggcgctggacttggacgacagcggcgcgcacctgccacgggacatcgtcgtggcgaggcgagtggcgccgctcgcgcccgatgcttcggcggacgccgccggagacgacatgagctggtcggagacggcgagcttcacggcgacgggcaacgtgttctcgcagattatgtcccgcgatggtagatgagcagagtagtcgcctttataatgaggaatctggtggcgcacgattacaaaaggaggtcaaaagccacgacacaatggcaggaaatttttaaaatgttccaagattttggttaccttttcaatacgaatttaaatcggatttgatgccaattcgagaggattttatctgttcagtgtgagttggagttcgaatttgaatagaatttcctctcctttgccgagagcaccgctgccaggagctttgtagtaggcgcttgcccttcgggcccagataactttttttattttaagatattgattacctttcaatatgaattgaaatcgaatttgatgct

SEQ ID NO: 14473 - DNA, 1107 bp, Oryza sativa
  ref <308>: DATABASE ACCESSION NUMBER: AK065055
  ref <309>: DATABASE ENTRY DATE: 2001-12-06
ggaccgtacaaccaagccgcagagaagaggaaggcggaatcagtcgagggcgaggcggcggcggcggcggcgatggcgacggcgaggaaggcgccgcgcatggtggcgatctgggcggtggtggtggtggtggtcgccgccgatctgttcggagcggcggtcgcgcggtcggcgtcggcgcgtcacgcggtggggaagaagcagcgggagttcgactacttcgcgctggcgctgcagtggcctggcaccatctgcgcctcaacccgccactgctgcgccatcaacggatgctgccgctcggagccgctccagacgttcacgatccatgggctgtggccggactacgacgacgggacctggccggcgtgctgccgccacaccagcttcgacatggacaagatattgcccctgaagccgacgcttgagaagtactggccgtccctctactgctcatcctcttccacttgcttcagtggcaaggggcccttctgggctcatgagtgggagaaacatggaacatgctcatccccggtagttaaggatgaattagagtatttcaccactgctcttgacctctacttcaaatacaacgtcacggaaatgttggcaagtggtggtatccatgtttcaaatggtaaacaatatgcgctaactgatgtcattgatgccatcaaatgtgcttttggggcctcaccgcaaattgtttgcaagaagggctcagttgaagaactgaggttatgctttgacaaagatttgaagccccttgattgccttactactactgctaccaatgaaaacgtatcgaagaagaagtattgccctcgatacatcaccctgccaacatatgaccccatagtacatgctaattctactcgggagatcataacagtcgaaagtgaggtctatggatatctttacacatcctaagatacgattaccgcgagcaagaattacatggccatgatgaagccggtagttcagggctcttagctgcttaagacatactggggccggcattgaggttcaaggaaatgtatatctagataactcgattattacatttgtaagcacggcacgccagaacaacggagaatgtgattgtgtctg

SEQ ID NO: 14474 - DNA, 6528 bp, Oryza sativa
  ref <308>: DATABASE ACCESSION NUMBER: AK065056
  ref <309>: DATABASE ENTRY DATE: 2001-12-06
ggttcgttccgttcccccctccactttccccatctccgacacctctctcctctccgatttactcctctcctttttgccctatcgccttggcgatagggttccgcttcgctgctgcagcagcggcgtttcgcctgtaaatgcttcttgttgttgttggggggaggggtctcttttaggtgattgttcttgttcttcttcttcgacatggtggctttctatggactcggagatggagggtgtctcgtgtcggcgccggcggagctggccgggatgttctgccgcggcggcgtggtggtgcagcagcagcagaggaagcggtcgctggtggccgcgtcggcggtcgcggcggcggactgcgtcgtgagggcggcgaagaggcagaggcagcagcggcagccgccgtcgctcgacgcgctccccgacgagtgcctcttcgaggtcctccgtcgcctccccggcggccgcgagcgcggcgcctccgcctgcgtctcccgccgctggctcgccctcctctgcagcatccgggcttccgagctcaaccaggccaccgctgctgccgccgcggcggcgccgccctcccttcccgacctcaacgaggagttcgtcatggaggaggacgacgaggaggaggagtcgtctcccgtggtggatccgtgcgtcgagagggtcctcgagggcaaggaggccaccgacgtccgcctcgccgccatggccgtcgtcgccggctcccgccgcgggctggagaagctcgccgtccgcgggatccacccgacgcgcggcgtcaccgaccgtggcctcctcgccctcgcccgcggcagccccaacctctgctcgctcgcgctgtgggatgtcccgctcgtcaccgacgccggcctcgccgagatcgccgccggttgcccctcgctggagcgcctggacatcacccgttgcccgctcatcacagacaagggcctcgccgccgtcgcgcacggctgccccaacctgctgtctcactgtcgagtcgtgctccggtgtcggcaacgatggcctcagggcaattggccgatcttgctccaagattcaggcattgaacatcaagaattgcgcgcggatcggcgaccagggcatctccagcctcgtgtgctccgcgaccgcctcgctgaccaagatcaggctgcagggtttgaacatcactgatgcttcgctcgccttgatcgggtactacgggaaggctgtcacggatctcacccttgtccgcctcccggtggtcgcggagagagggttttgggtgatggccaatgctgccggcctgcagaatctgaggtgcatgagtgtcacctcttgccctggggtcaccaatctcgcgcttgctgctatcgccaagttctgcccgagcttgaggcagctttccttcaggaagtgtggacacatgacggatgtcggtctcaaggctttcacggaatcggcgaggttgttggagagcttgcagcttgaagagtgcaatggggttactcttgttggtattcttgatttcctcgtcaactgcggtccgaagttcaggtccctctctttggtgaagtgcatgggtatcaaggacatctgctctacgcctgcgcagcttcctctgtgcaaatcgcttcaattcctgaccatcaaggactgcccggatttcactgatgcaagcttggctgtggtggggatggtttgcccttacttggagcaggttgatttgagtggtctccgtgaggtcactgaccgtgggcttcttccactgatcaactcttccgagggtggtctagtcaaggtcgatttgagtggttgcaagaacatcacagatgcagctgtttctaccctggtgaaggggcatggaaaatctctgaagcaagttagtcttgagggctgcagcaagataaccgatgctagcctctttgccatctccgagaattgcactgagcttgctgagctcgatctgtccaagtgcatggtcagtgacaatggtgttgctaccctggcatcagcaaagcacctcaagcttcgtgtcctgtcactgtcttgttgctcgaaggttactccgaagagcgtgtcattcttgggcaacatggggcagtctttggagggtctcaatcttcagttctgcaacatgattggtaaccacaacattgcatcgctggagaagcagctctggtggtgcgacattctcgcataggcagacaagatggttcattgctggagggtgtcacctgtgcttgggtgaggcacctccagatgcagatatacatccttagaggtagcgcaaccagtcaattgctgtgctagtcatgtttttggctagtgcatgagtcatggtgggttctggatttgttcgaggaccggttgtttccgaggggtgctttccgccaagtgctcgttttttcacagactgcctcaagaggcaatctgttttttgagccttcggctgccattgctggcattgtgccccctctacccagacattggtccttgccgctatagtcacaacaccatgattgttttttaggttgccatagtgtcccttgtccttttttctttactgcttgcttcctactcatgaagttgcaggcaccggcatcggcacagggggagatttggggaaagttgttgcgcacagaacacattctctttctgaaacgctcgaaatcccccaaaaattggcccccctcgctcgtagtccggcgtccggcgatggctctcccctcgcgtcggtgggcaggggcggtggaatccggcgtggatccggtggcggaggcttgggcgaagctgctgcggtcgctttcccaggccatggcgcggctgagggtgcagatggagtcgttcgacgatgcccagatgaggtgggcgctggccgccggtgtccgagccaaggcgcagctgctggctagccgcctggctcagatcctcgccctcttctgggacgaggggcagcgcgcggcgctcccggcctgcgtgcgggatgccctgtacggcatggaagacatggtcgacgatttggagtaccacatgctcaagttccagcctcatcaacaagaggtcagatgcaatctgctcatctctcttgtcaatctccgctaccggctcatcatcagccacgcgtctcgctcccgcttcctcaaggatttggatttcgttgcgagcgaggcaggcagcctcctctccgcgatgcataagctcgagcccaccgctccgtcgctccctgccctgctgcttgctgacgacgatcatcaggttgtgtttgggcgccacaaggaggtcactgacattgttcgaatactcattgatccgccggcaagccaccaccaccaccctacttacgacatcctcccaatcgttggcatggggggcgtggggaagaccacactcgccaagttagtctatgatgatgccaaggttaagcagcatttcgagctcaggctctgggcgagtgtctctactagtggagggtttcacaaaattgacatcaccgaacaaatcttgcgttcagccaacccaacataccctgcttctattcacagtgaacctacgcttgacatgcttcagttccatctcagccaactggtagcgtccaagagattcttgcttgttctcgatgacatcagggaggagtccttcaccagcatggcctgccaagagatcctcagtcctctatcatcggcagaaaaggggagcagaattctggtgactactacaacagcctcagtgcctgccatgctgggggcatcttgtacataccacctgaatgtattggacatcgaggatttgtggtccttgctcaagaaatatgctttccatggaggcccaactcatgattccacccaggagcttgaagaaattgggaggaacatcgcatccaagctcaaaggattgccattggctgccaagatgcttggggggctgcttggagctacaaagagcacaaagacctggatgaatgtcttggacaaagaactttatggcgatagtattcttcccgtactagaattgagttacagttacctgcctcgacgactcaagcagtgcttttcgttctgcagtttgtttccgaggaactataaatttaacaaaagagtgttgatccaactttggatggcccaaggttttgttcagtcacagaacagtgctgacaaaaatatggaggacctggcagaagattattttgaggaacttctttcgcgatccttctttgatgtacgcagggaagcgtgtgaaacacactacgtgatgcatgaccttgtccatgacctcgcgcagtctgtttcggcagatcaatgccttcgtgttgagcatggcatgatttctgagaagccatcaactgctcgctatgtatctgtcacccaagatggactacaaggccttgggagcttctgcaaacctgaaaatttgcgtaccttgatagttctaagatcatttatattctcctcaagttgcttccaagatgaattcttcaggaagataaggaacttgcgtgtcttagaccttagttgctctaactttgtacagttgcctaactcgattggtgaactagtgcacctgcgttacctatctctccctcgcaccctcaatatgcttcctgagtcagtcagcaagctactgcacctcgaatcattgtgctttcacaagtgttcccttgaaaagcttcccgcaggcataactatgctggtcaacttgcggcaccttaacattgccacaaggttcattgcacaggtgtccggcattgggcggcttgtaaaccttcagggatcagttgaattccatgttaaaaagggggtaggatgtaccttggaagagctgaagggcttaaaagatctccgtgggaaactaaaaataaagggccttgataatgttttaagcaaagaagcagccagcaaagccgagttgtacaagaaacgacatcttagggagctcagtctggaatggaactctgcaagtagaaatctagtccttgatgcagatgctataatattagaaaacctacagccaccctctagcttagaagtactcaatatcaataggtaccaaggtgccatatgccctagttggctgcagttatcatcacttaagcagcttcaatccttggaccttattaactgcaggaatttggagatcctacctccattgggactattaccgtcactcaaatatctatgtatgaaggaactgtgcactgttaatcaaattggacatgagttctacggcgatgatgatgtaccatttccatccctgataatgcttgttttcgatgattttccaagtttatttgattggtctggtgaagtgagaggcaatccgtttccccatctccaaaagctaacacttatagactgtccaaatttggttcaggttcctccattgcccccttctgtcagtgatgttacaatggagcgtacagcattgatatcctatttgaggcttgccagattgtcttcgccaaggtcagatatgctcacgcttgatgttcgtaatattagtatactttgctggggactgttccatcagttacatttggaatctgtcatatctttaaaaatagaaggtcgtgagacaccttttgccaccaaaggattgtgttcgtttacttctcttcaaaggcttcagttatgtcaatttgacttaacagacaatacgttaagtggaactctctacgcgcttccttcgctatgctccttggagatgatcgatctgcccaatataacatccctttcagttccatcagacattgatttcttcccgaaacttgctgaattgtacgtatgcaactgtctgttgtttgcttcccttgattccttgcacattttcatttccctaaagcgattggtgatcgagagatgccccaaactgacagcaggatccttcccagcaaactttaagaacctcacatctctcaaggtactaagcatatcacactgcaaggatttccaatcttttcctgtgggtagtgtaccaccgtcactggaagcacttcatctcgttggttgccaccaaagttaactgacaatgtggtgtcaaggaaaatgctccttaacacaccaaagctcactgatggaccatgaagaacataaacaaaaaaaaatcttgacaacggatagcaggttacacaaataatgttgcatggagaaatcaagtgacggctcgcaagtagtaggagaggacgagcggtagtgcatatgacgtcgaccttgccaagtaacttcaggctcatcccttggagacatgagagatgagcgaccatacaatacaaggccaatgtattctgatctgtttaggatctcttcatcacctcgtctctttatatttctttgttaagccagggttggacggccatctccttgctaggctgaagaaacaatggaacacatcctagtctctgtttttagccttcagaattgaaagttgatcctatagaggttaggcttctcttccatctccccaactcttgacacaaacaacttctccagttgctggtctagggctttgaagggcacaagaaagtaggataagaaaggatttaactcgctt

SEQ ID NO: 14475 - DNA, 1893 bp, Oryza sativa
  ref <308>: DATABASE ACCESSION NUMBER: AK065057
  ref <309>: DATABASE ENTRY DATE: 2001-12-06
gcgttgccggctaaccaaaaaagtggaacacgaagaagaagcagcagaagaggaggagcatctcgcaaccaccggatcgattcatccaccaatccatcgccgccgccgccgccgacgacgacgacgagggcttcgggcttcaccgccatgggatgcagcggcctccgcctccccacctgggcggcggccgcgccgccgtcgccgtcggactgggacgggcgggtcaccccgggtcgggaccgcggagcacgactggctgtgggattgccgcggcatcggcgggggcgggagggactacgctagggagatggaggtcgcggtgcgcgtcgtgcaggccgcctgcaccctctgccagcgcgtgcagagctcgctcctcctccccgcctccgcctccgcctccggcagcgtccactccaagatcgaccgctcccccgtcaccgtcgcagattggggcgtccaagcgatagtaagctggctactctcggattgctttcaagatgaaaacatatctatagtagccgaagaagatgatgagacgctatctagtagcgatggtgcagctttgcttgaatctgtcgttgctgctgtcaatggttgcttgattgaagctccgaagtatgggctgaggtccccagagaaagagctcaaagctcatgatattcttcaagctattaggaggtgcagctctatcggaggtccaaaaggaaggttttgggtgcttgatcctgtggatggcacgcttgggtttgtacgtggggaccaatacgctgttgctctcgcgctaattgaagatggggaagttgtattgggagttcttgggtgcccaaattatccaatgaagaaggagtggctcaactaccaccaacgatattacaggttgatgtctaaggtttctcctcccacatcaggatcctggcataagggttgtgtgatgtatgctcaccgaggatgtggccaagcttggatgcaaccattagttcatgactttggcaagcttgattggcgtaattcaagagaggtccgagtatcaactgttagtgatccaatctcagcaacattctgtgaacccgttgagaaagctaatacaagtcattccttcactgctggacttgctcatagtgtaggcttaaggaagcaacccctgcgtgtgtacagcatggtgaaatatgccgcaatagcacgaggggatgtagaaatattcatgaaattcgctagagctggatacaaggagaagatatgggatcatgccgctggggtggttatcattcgagaagctggcggagtgatcacagatgctgggggccgcccactcgacttctccaggggtgttttcttagagggcttggatagaggcataatagcctgttccggaccattgcttcatcacagaattgtgggtgctgtcgatgcaagctggaactcatcaacactgtaatgcaaatagtacggatgattacagttggttggaccaatgtcggtcatagaatgcaaaggtgagttttacaaagaattgctgttgtgccctctggttgaaatctgttcagccatcttattctctgatagtctcctacgggaaaatcagctatttctaggttgcagaattagtatgtgttcatttcagttcgatttacgaacacgaaaggtaatactgcagcacgtaatacggtatatcctgttgttcaataagcaagttgtgagacgagattggcatattattagctgattcagttagttcttgtatctcttctcgccgtttctgcatgtgaagttgtcggcgtaagctcctgaaggtcacaacttgattaagttactcatctgcaacttgttggcacctgaaataactgaacctttgattaactgattgaatgatgattacatgatgtattctctgcc

SEQ ID NO: 14476 - DNA, 1859 bp, Oryza sativa
  ref <308>: DATABASE ACCESSION NUMBER: AK065058
  ref <309>: DATABASE ENTRY DATE: 2001-12-06
ggcttcccctcctcttcctccgctccccaatctggtctcgcccttcgccgcgcgagaggagagagagagagagagagctcgctcgcgcgcgcgaagaatcgacgaggaggaggaggaggaaggggagagggggagaggcgccatggggaagaaccaggcgtacaaggcgatgcagcgggcgcggctgggctcctcgtccggcgccccgggcgccaccgactcccccgaagacggcatgagtggcatgcggcgcggttggccagcctgaacaagacgcacaccgtcacgtgggaggagttcaagaagaagcagaaggtacacaagtccatcgctttgctcggtttactactgttagctttgatcagctggtttatattctctagttctccttttgtgtgcgcaaacccgcggaccatggtagtgcaagatgtcctcttgttgctcctaccatgttgtagtgttggtgatactgattgttcattttctgtgtgttgatgcgctgtatgatggtctgatgcaggatggtcgttagataatgaaagatatgattagttgttctctcccagataacactcttaatgtgatgagtaaatttcattgtatccttgtatgtatctgctagttgaatttggaacgccgattttacctttcctagcacatgtagcagcgaataaatttctgaattgtataatattggaggatttatcaacctgaacctctgtagctcattcaagaagcttattcttgccccccgtcaatgcattaacaaagtgcatagactttgtagttgtggtttactgttacaaacttgagctaacatttggagcagaatagttggagcacatggtgttacatgatcagttttgtactcataaaccatctctagggagctttcatatttccgtcttatacttgatttggttcctcggctaatgatatcaaattgcatctcttttatgtttattggccgtcaggtggttatggatggcgcttgcactaattccgaaagtccaacctatacctttctgacattgctcaggaatcaggattattttttacaaatgaattgtggttttctgcatgaacccccacaatgttgcagcacataatcctaagccttcttgtacttatgcagagattgatttgtgactacagctgtttattatcaatacttgtacagtagctcatgctgctctttggctctttgccctaataggaagacgagttaaagaggggtgaaatggaagctgacaaagataaaatgatgagagaatatagggctcaactggatgctgaaagggcacaaaagctagctcttggaagaaaccactcaaggtcaaagtcatcatcttctaagaaagagaagaaggataaagatgcaaagaaacggagtaaaaagaggagaaagcatagaagttcatcagagtcaagttccagttcatcgtcggaatcatcaagcagtgatgatgaggatagggattcgagaaagtccaggtcacggtccagatcgaagaggacaaaaaaggataagaagtacaggtcaagatccaagcacaggggcagtgatagtgaggaggaaggacctgtgcggctctctaaattctttgggaacccaaagaaatagatgaataccgggaggcctgcagccagaagacctcgtcgcataatctctcttgagctatgaattgatggttgtagactgtatcattaagctctaattactgtgttaaggtgggaaaaaaccgattactgtattacatctcaagaatgttaaatcaatttgacggtgcggcatttgaatatgaattcattgtaacatagtagtacgtgacaagggagatatgctggcacttaatagc

SEQ ID NO: 14477 - DNA, 2026 bp, Oryza sativa
  ref <308>: DATABASE ACCESSION NUMBER: AK065059
  ref <309>: DATABASE ENTRY DATE: 2001-12-06
ggcgtactccgctctcgaaaaagaaaagaaaggctttcgtctcggtgggcaaaagcgcgagggcaaagcgaaggtatagcatctagtaggcgatggcgagctccggtttctcatggacgctgcccgaccaccccaagctccccaaggggaagacggtagccctcgtcgtgcttgacggatggggcgaggccaacgccgacaagtacaactgcatccatgtcgcccagacgcccgtcatggattcgctcaagaatggtgctcccgagaggtggagattagtgaaggctcatggaacagctgttggtcttcctagcgaagatgacatgggcaacagcgaagtgggtcacaatgctcttggtgctggtcgcatttttgctcagggtgctaagcttgtggaccttgctcttgcctctgggaaaatttatgatggagaggggttcaattacatcaaagaatgttttgacaagggtaccctgcaccttattggtttgttgagtgatggaggcgttcactcccgtcttgatcaagtgcagctgcttctgaaaggtgccagtgagaggggagcaaaaagaattcgtgttcacattcttactgatggacgcgatgttttggatggcagcagtgttggttttgtagagacactagagagtgatctttctcagcttcgtgacaagggtattgatgcacggattgcatctggtggtggaaggatgtatgttaccatggaccgctatgagaatgactgggatgtggtcaaacgtgggtgggatgcccaggtgcttggcgaagcaccctacaaattccaaaatgcagtcgaagcagtgaaaactctaagagcagagaccaaggctagtgatcagtatttgcctccatttgtgatcgtggatgagagtggcaaatctgttgggcctgttgtagatggtgatgcagttgtgactttcaatttccgagcggatcgtatggttatgcttgccaaagcactagagtatgcagactttgacaaatttgatcgtgttcgtgtaccaaaaatccggtacgctgggatgcttcagtatgatggtgagttgaagcttccgagccattaccttgtctccccaccagagatagagagaacatctggtgaatacttggtaaagaatggcgtccgcaccttcgcttgcagtgagacagtgaagtttggccatgtcacatttttctggaacggaaaccgatctggatactttgatgaaactaaggaagagtacgttgaaattcctagtgatattggaatcacattcaatgttaaacccaacatgaaggcacttgaaattgcagagaaagccagggatgccattcttagtggaaagtttgatcaggtacgtgtcaacctgccgaatggtgacatggttggtcacactggtgatattgaagccacggtagttgcttgcaaggcagctgacgaagccgttaagattattttggacgcgattgaacaagtcggtggtatttatcttgtcaccgctgatcatggaaatgctgaggatatggtgaaaagaaacaaatctggccagccacttctcgacaagaacggtggtatccagattcttacctcacatactcttcagccggtcccggttgctattggaggtcccggtcttcaccctggtgtgaaattccggtctgacattcagacccctgggctcgccaatgttgctgcaaccgtaatgaacttccatggtttcgaggctcctgctgactacgaaccaaccctcattgaagttgtggacaactaaaatagtaaaatcgcggtagcgaagttttgttcctatagtgttgagatgatcaagagtgatcatatcatttaataattgaataatttatgtttgcccgctcgctgctcaaactctactatggagagaaaagagtgtatttgacttgcagttctgctcttatctgtaactagacgttgtcgcgcaggctgcctgacgttttttcatccgctatatgcgataatgcgaggcgtcaaacatgctcttgtccagtattt

SEQ ID NO: 14478 - DNA, 1294 bp, Oryza sativa
  ref <308>: DATABASE ACCESSION NUMBER: AK065060
  ref <309>: DATABASE ENTRY DATE: 2001-12-06
ggtctactgctactactactacggctcaactccacttgctgttgttgattctcctcctcctcctcatctcatctcccgaaatactaatccagctcgatcgtgtgggaaagagatcacagagggtacttggctagctcactccatcaatcgatcgatcggtacagtttagcaacagttaagcttcacctttttgtattagctagtggcagtcgctactacgtccacgtccttttgtgttacggattggttcgcgagcgagataactgcgtgttgttctaagttctagtaagttggggggaggccatgggggtgcacacgaagtcgatgagctggtacatggggacgccggcctcgccgtcgccggggagcgccggggaggcgcagcacgcactgagcagcggcgggggagggggcagcgacgccagcttcgacaccaacatggtgatcatcctcgcggcgctgctcttcgcgctgctgttcgcgctcgggctcaactcgctcgcgcggctcatcatccggtgggcgcggcgggcggcgacgggggaaggcgccggcggcggcgtggagggggcgggcgccggcggcgggctcaaaaagcgcgcgctcaggagcatccccatcaaggtgtacggcggaggtggtggagggagccccgccgccgcggcggaggtctgcgccatctgcctcggcgagttcgcggacggcgagaaggtgcgcgtgctgccgcgctgcggccatggcttccacgtccgctgcgtcgacacgtggctcgtctcccacgactcctgccccacgtgccggggctccgtcctccacgacgccaccaccaagcacaaaccaaccgccgccgccgccgccgcgggcagccggcggccggggagcgaggtcgacgcccccgccgccgccgccgtgacggtggtcatcgcgtgaccggggcaggtgggcccccgcttcccccagccgctgtgggcccagtgtaacatacccatgtaaaaaatctcctttcttgttttggacctatgtaaaaaaatctctccttgggccaggccatggcccatggccgtgagatattttccgacgttggtgctgtgagaggatgacgggtgggcccgctcgtctgttcagtttgtaggttactcacagtagtccaccgtccattcgatttcgatcttggctagcaagggcagttgttgtggaggttaggaggtacaggacgcttacagttacgtacaggcttgtaatattaccgtataagtagtatcattttgcgaggaaataccgtatatttgttggt

SEQ ID NO: 14479 - DNA, 2101 bp, Oryza sativa
  ref <308>: DATABASE ACCESSION NUMBER: AK098886
  ref <309>: DATABASE ENTRY DATE: 2002-08-28
ggcttcctcaagaatctctcctcttcttttctatccaagaaccgctcaaaagctcgaaccttgcgcaatctttttaaatcctcccgaccatttcctccgggtttgattctgggcagagattgcgaggggaaagatacgagcttttcttggcttctttcccctgcattgggaaagatacgagctgttgctgttcttgggaagaacagcttgggacattcttgggttggggtttgattcccaggggaagaaagcatgaggctatggtttctcatacctcttcttctctgtttccctacattgattcgatccgaggattactcggatgtgaccatcgtcgttcggggtgctgagacgatcgcttcgaccagcaacgagttcatttgcgccaccattgattggtggcctccagagaagtgcaattatgaccagtgtccatgggggcaagcttctatcttaaatttggacttgactaatcctttgctagctaaagctatccaagcctttagccctctacgtatcagacttggaggttccttacaagatcaggtggtgtatggcacgccgaatttaggatctccatgcaccccattttcaaagagttcaagtggcctgtttggattttctcaaggatgcataaccatggaaagatgggatgctattaataagatctttatggatacaggtgcagttgttacattcggccttaacgcgcttcaagggcgacagcagatgggcagaggtgtttggggaggtgcttggaattccagtaatgctcgggagttcatggagtacactgtttcgatgaactaccctatagactcatgggaatttggtaatgagttgagtggaagtggaattggtgcaagtgttggagctgaacaatatggaaaagatataattgagctcaagaacatcatcagccagttatatggaaactctaggaaaccattggtggttgccccaggaggattctatgaccaaaaatggtatgctcagcttcttgatatctctggtccaaatgttctcgacacaatgactcatcatatttacaatcttggtgctggtaacgatccgcaagttgcaaataggatcttgaatccgcagtatttgagccagagctctgatacattcagagatctccaaatgacgatacagcggcatggaccatggtctgctccctgggttggggaagctggtggtgcatataacagtggcagccgaaaagtgtctaatactttcctgaatagcttctggtatcttgatcagcttggtcagtcagcaaagtatgacacaaaggtttactgcagacagactttgattggaggcaactatggccttcttgataccgaaacttttgttccaaaccctgattactacagtgccttgctgtggcatcggctcatggggaagggagttatttccttagacaccagcggttcttcgtacttgcgtgcctatgcgcattgcggaaagcaaaagggcggcgtcgcgctcctcatgctcaacctgaacaagaacatgggattcatggtctcagtcagaaatgacctcaacattaatttcagagaaatggcagggataaagagggacaactcctttgtccatggcctgaagaggacagtctcctgggttgggagcaaagcctcggatgggctggagaagagggaggagtaccatctgactccacaggatggcaacccttttgccaggacagtgctgctcaatggagctcctcttcagctcactggagatggtgacatcccttcactgccaccagtgatggtctcagtcaattccccaatctatgtcgccccgctgtcgatcgcgttcgtcgtcttcccagatttcgaggctgaaggttgcgaacgatgatttcgagtttagatagaaatatcatgaggtttttcttttctgatgtgatgatataggtgttctcagggttacatccactgtaaagatttttctgtgtttctagttttttccccaattgggctatatatagaataacttgattccagtgtttactgatcagtatgtagcaagcctgcagttccattcccttctatgtttggttgggtcacaatgaagcacatttgatgtc

SEQ ID NO: 14480 - DNA, 3547 bp, Oryza sativa
  ref <308>: DATABASE ACCESSION NUMBER: AK065061
  ref <309>: DATABASE ENTRY DATE: 2001-12-06
gccgttccgcgcatcgctacaccccaaaaacctctcaagcgctctctcccctcgcctcgccgcgccgctgcgtcgtcggcgacgggatcgtgggctcgtggagagggcaccgccgccgccgtcgccgccggacggatctagccgtctacaccccgctccccgccctctctctcgaggcgatcgcgccgagctgagctgaggtgagggtgtagcttactatcatggcgtcagccactggagcgtctggatggctgaggggtaaggtgaagggtgtgacttctggggactgtcttctcatcatggggagcaccaaggcggatgtcccgccgcctgagaagtcgattactctgtcatacctcatggccccaaggctggctcgccgtggtggagtggatgaaccatttgcttgggaaagcagggagtttctaaggaaactctgcataggaaaggaggtcacattcagagtggactacacagctccaaatgttggacgagaatttggtactgtttacctcggtgacaagaatgttgcctactcgataattgctgcaggatgggcaagggtaaaggagcaaggcccaaagggcggtgaaccgagtccatatcttactgagctgctaaggttggaggaagttgctaagcagcagggtttaggtcgttggagcaaggaacctggtgctgctgaagaatcaataagagatcttccaccatcagcaattggtgaagctagtggttttgatgcaaagggttttgcagttgcgaataaaggcaagagtctggaagccattgttgaacaagttcgtgatggcagtacagttcgtgtttacttgctcccaagtttccaatttgttcagatatatgttgctggagttcagtctccatccatggggaggcgcccaccgaatcctacagtggtggctgcagcagagagtactgctgatggcgctacaaacggtggagattctgaggaagctccagcaccactgactacagcccaaaggcttgccgcagcagcggtttctactgaaattccaccggacaggtttggaatagaagctaagcacttcacagagacgggttctcaatagagatgtgcgaattgtggtggaaggcacagatagtttcagcaatataattggctcagtgtattactctgatggggatacattgaaggatctggcccttgagcttgttgaaaatggtcttgccaagtatgttgagtggagtgccaacatgatggacgttgatgcaaaaataaagctgaagaatgctgagcttcaggctaagaaggaccagttgagaatttggacaggatttaagccaccagtgacaaactcgaagccaatccacgaccagaaattcactggaaaagttgtagaggttgtgagtggggattgcatcattgttgctgatgacgcagctccttacggaagtccttctgcagaacgccgggttaatctttcaagcattagagctcctaaaatgggcaaccctcgtagagatgagaagcctgataattttgctcgtgaagccaaggaattcttgcgcacaaggttgattggcaagcaagtgactgttgagatggaatactctagaaggatcagcactgtggatggacagcccacaacaaacacagctgatgccagggttttggattatgggtcggtttttcttggttcaccttcgcaggctgatggtgatgatgtttcttccattccaagctcaggcaaccaacctggtatcaatattgctgagactctgctctcaaggggctttgctagaacatctaaacatcgggactacgaagaaaggtcacactattttgacctgctgttggcggctgaatcacgagctgagaaagcaaagaaaggagttcattctgcaaaagaatcacctgtcatgcacataacagacttgacaacggtttcagcaaagaaggccagagacttccttcctttcttacagcggaacagaagacattccgcaattgttgaatatgtcttcagtggccaccgtttcaaactaacaattcctaaggagacttgcagcattgccttctctttcactggtgttagatgccctggtaaagatgagccctactcgaacgaagctattgctttgatgaggaggagaattctacagcgagatgtggagatagaggttgaagcagttgatagaactgggacattcttaggttccttatgggagtccaaaaccaacatggcttctgttcttctggaggctggtctggccaagcttagttcatttggcttggataggattccggatgcaaatgttctaatgagggctgaacagtctgcaaagcagcagaaactcaagatctgggagaattatgtagagggtgaagaagtttccaatggatctgcatctgaatccaaacaaaaggaaattctcaaggttgttgtaactgaagtccttggtggtggaaagttctatgtccaaacagttggtgaccatagagtggcttccattcaacaacagcttgcatctttaaaacttaaagatgcacctgttattggtgcttttaatcctgtgaagggggaaatagttcttgctcagtttagtgctgacaactcctggaatagagcaatgattgtgaatggacctcgaggagctgtatcatctcaagacgacaagtttgaagtattctacattgactatggcaaccaagaagtcgttccttacagtcgcatacggcctgctgacccatcaatttcctcttcgcctgctcttgctcagttgtgcagccttgccttcataaaagtgcccaacctagaagatgattttggccatgaagcagcagtctatctgaatgattgcttgctcaacagccaaaaacaatacagggcaatgattgaagagcgtgatacttctggtggaaagtccaagggacaaggcactggaactattctgattgttacactggttgacgcagagacagaaaccagcatcaatgctaccatgcttgaggaagggcttgctcggcttgaaagaagcaagagatgggatactagggagagaaaggctgctctccagaatctggaacagttccaggagaaagcaaagaaggaaaggctgcagatctggcagtatggtgatgttgaatctgacgaggaagagcaagctccagcggctaggagaactggagggcgtcggtagatgagagaaggctgctcaagacagcaatggcgtcggtaagctatcatcaagttttggacaccgggtcagactctaccgggagctttagatgaaaaacatagagaaagaaaatgaggattaccttatttatgcagttagaacagaacttagcgaggcgaaacttccttagtttgagcactgttgcttgatgctgaactattattccgttttacaccgtaatgttgaggttaagatacattgtttttcccctaaacttaataatgtcgtgtacttggtgcactgcagttctttgtagacacaacataataccgagagcgcagtcaattaaaattcaggattgaacttaaagaggtatcccaagattgcc

SEQ ID NO: 14481 - DNA, 2052 bp, Oryza sativa
  ref <308>: DATABASE ACCESSION NUMBER: AK065062
  ref <309>: DATABASE ENTRY DATE: 2001-12-06
gacacgtgggcccccacgcgcccctccccgcaccggatcccatccacctcgcggcccgccgcgccggcaccaccaccaccacccctcgccgccgacgcgtcgccgtcgcctctcctccgatcgatccccccccctcgcatgcgccgccccaatgcccgcgcccatcacccgcgtggcgaatcgcaggaggcggcggcgacaaccctagctcctcctcctcgtccgaccatttcctccgcgatgggctcccgccgcgcccgcggccgccgcctcctcgccgccctcctcgccgccgcgttcgccgtcgcgctcctcctgctggtgccccgctcgccgcgtcgtcgtccccacgagtacggcgtcgtcatcgacgccggtagcacggggagccgcgtccacgtcatcgcctaccgctcctcctcctcctcccccgcctccgcgctcccgcggatcgactgggcgcgcacggcgtcgatgaaggcggccccgggactgtcgtccttcgcctccgacccgggcggcgcgggccggtcgctggcgccgctcctggagttcgcgcgccgccgcgtgccgccggagagctgggcggagaccgacgtgcgcctcatggccaccgcggggctccggctgctcgacgccgcggtggccgaggctgtgttggattcgtgcagggtgttgctgcggggatcggggttccagttccaggacgattgggccaccgtgatctcaggagctgaggaagggatgtatgcatggattgcagcaaattatgcgctgggtaccctaggcgatgactcacaagatactacggggataattgagcttggtggagcttccgttcaggtaacttttgttacggacaaacctttgcctccagagttctctcatactctgaagttcggtgatgccacatataatctgtacagtcacagctttctacaacttggtcagaatgttgcgtacgaatcactccatgacatgctgagcacacctgggcataaatcaatggcaacacatttaatttctcaagctaagtacagagatccttgcactccaaggggattttcgcccatggagggagcagttaaacttcctgccagtgttcttgagtcgaaggttgagtacagaccttatgctcatgctgttggtaacttctccgaatgtagatctgcagcactaacactattgcagaaaggaagagaggaatgtaggtaccatgaatgccgtatgggagcagcatttgtaccagaccttgatgggaaatttttagcaacagagaatttctaccatacttccaagttctttaggttgcgttctaagtcttttctttctgacctgatgctggctggggagaaattttgccgaggagactggtcaaagattaaaaaggagtaccgttctttcaatgagggggagctgcttcttttttgcttttcctcagcatatattgttgctttgctgcatgatactctaaaggtcccgctggatgataagaggattgatgttgcgaatcaaattggcggtgtgcctgttgactgggcattgggtgctttcattgtgcagaaggcgtcaaaccagacagacatgctccatcctgagggggagaagatctcgcctgaagacggtatacgacatggagaaaggccggtacatcataaccagggtgagacgatgagccttgcgcgtcgtcgctgggatttggtggagctcctgcggtggggtgccagtgatcgtgtttgtaaattctcgtagtatatacacgatatctgctaggcagccatatatatggttctgacgttgccttgctgaatgaatcttgactgtaaaagcagccctttgtagttaatacaacgatgtgggttgcttttgctgcaacggtcgtgtttccagaatgctcaatgatgtactggtctcaaaatattgctgatgacctgatgtatagcagcaattttgtctccgtaaaatgtacccaatgatttctcgagctgactagctaaaatttgtaaatgtacatccagagaacaaattatcaatatcaggtacacaaccacc

SEQ ID NO: 14482 - DNA, 1361 bp, Oryza sativa
  ref <308>: DATABASE ACCESSION NUMBER: AK065063
  ref <309>: DATABASE ENTRY DATE: 2001-12-06
ggcttgcacacttgcacccaccctctctcctccatccagcaccgaccatggccgccgtcacggctgcggccgtctccacctccgccgctgctgcagtcaccaaggcatcgccgtcccccgcccactgcttcctgccatgcccgccaagaaccagagccgcccaccagcgcggcctgctgctgcgcgcgcaggtgtccaccaccgacgccgccgccgtcgccgccgcgccggccaagaaggagaagatatccaagaagcatgacgagggcgtcgtcaccaacaagtacaggcccaaggagccctacgtcggcaagtgcctcctcaacaccaagatcaccgccgacgacgcgcccggcgagacatggcacatggtcttcagcaccgagggtgagatcccctacagagaggggcagtccatcggcgtcatcgccgacggcgtcgacaagaacggcaagccgcacaagctcaggctctactccatcgccagcagcgctctcggcgacttcggcgactccaagaccgtttcactctgcgtcaagaggctcgtttacaccaacgaccagggagagattgtcaaaggagtctgctccaacttcctctgtgacttgaagcctggttctgatgtcaagataaccggaccagtaggcaaagaaatgctcatgcccaaagatcccaatgctaatattataatgcttgcgaccggtactggtattgccccgttccgctcattcttgtggaaaatgttttttgagaagtatgatgactacaagttcaatggtctggcttggctcttcttgggagtcccaactagcagttctttactctacaaggaggagtttgacaaaatgaaggcgaaagcgccagagaacttccgggtcgattatgctgtgagcagggagcagaccaatgctcaaggagagaagatgtacattcagaccaggatggcagagtacaaggaagagctgtgggagctcctgaagaaggaccacacctatgtgtacatgtgtggactgaaaggcatggagaagggtattgatgacattatggtgtcattggctgcaaaagatggaatcgactgggctgattacaagaagcaactgaagaagggcgagcaatggaacgtggaagtctactaattcttccaattttcctcacatctgtttcttttttttcttccatttgtatctgtgtgcacatctgtgcctgtgatcactctataatgttagataggcgtatatatatactgtttgtcatgttggttaaattcaagcttcatataagaattactacttatgtctgatccaaatactactatggtcaagtcaagagtaataataataataatgcaatgcagttcactc

SEQ ID NO: 14483 - DNA, 3803 bp, Oryza sativa
  ref <308>: DATABASE ACCESSION NUMBER: AK065064
  ref <309>: DATABASE ENTRY DATE: 2001-12-06
ggtgtgtgtgttgcgtggtggggaggaagatctcgagcggttggaaaccctagtggggagggagggagtgggcgggggggatggacgtggactcgaggatgacgacggagtcggactccgactcggacgccgcggcgcaggggggaggaggaggagggttcgggagcgagacctcctcggcgtcgccctcggcgcccgggacgccgacggctatgggggcaggagggggagctgctcctatcgctgctgctgctatcgctgccgccgcgtcggcggcggtggtggcgggcccgaggcccgcgccggggtacacggtggtgaacgcggcgatggagaagaaggaggacgggcccgggtgccggtgcggccacacgctcaccgcggtgccggccgtcggggaggagggcgcgccggggtacgtggggccgcggctgatcctcttcggcggtgccaccgcgctcgaggggaactccgccacgccgccatcctcggccgggagcgccggaatccgtcttgctggtgctactgcggatgtgcactgctacgatgtttcatcgaataagtggagcaggcttactccagttggtgaacctccttcaccaagagcggcacatgtagcgactgctgttggcaccatggtggtcattcagggtgggataggtcctgctggtttatctgcagaagaccttcatgttctggatcttacacaacaacgaccgcgatggcacagagtggtggttcaagggcctggccctggtcctcgatatggacatgtgatggctttggttgggcagcgtttcttgttgacaatcggtggaaatgatgggaagaggcccctggctgatgtgtgggcccttgatacagcagctaagccatatgagtggaggaaacttgaaccagaaggtgaaggaccacccccatgcatgtatgcaactgcaagtgcccgttctgatggacttctattactctgtggtgggagggatgctaatagtgtgcccctagcaagtgcatatggccttgcaaaacacagggatggacgctgggagtgggcaatcgcccctggtgtctctccatcacccagatatcaacatgcagctgttttcgtcaatgcacgacttcatgtctcaggaggggcccttggaggcggtcgcatggttgaagactcctcaagtgttgcagtgttggatactgctgctggagtgtggtgtgatacaaaatcagtagttactactccaaggacaggaagatatagtgcagatgctgcaggcggtgatgcttctgtagagcttacacgacggtgcaggcatgcagctgctgcagttggtgatatgatatatgtttatggaggtctacggggaggtgtgctgctagatgaccttcttgttgccgaagatcttgctgctgctgaaacaacaaatgcagcaaatcaggcagctgcaattgctgcagcctctgacatacaagctggaagagaacctggtaggtatgcctacaatgatgaacaaacagggcagccagctacaataacatctcctgatggagctgtggttcttggaactccagttgctgctcccgttaatggggacatgtatactgatattagccctgagaacgctgtgatccagggacaaaggagaatgagcaaaggtgttgattatttggttgaagcatctgctgcagaggctgaggcaatcagtgctactttagctgctgtaaaagctcggcaagttaatggtgaggcagagcattcacctgacagggagcagtctccagatgccacaccaagtgtgaagcaaaatgcaagcctgataaaaccagactatgctctttcaaataattcaacaccacctcctggggttcggttacaccatagagcagttgtggtagcagcagaaaccggaggtgccttaggtggcatggttaggcagctctcaattgaccagtttgaaaatgaaggaagaagggtcatctatggcactcctgagagtgcaactgcagcaaggaagttgctagatcggcaaatgtctattaatagtgtacctaaaaaggtaattgcatccctcttgaaacctcgtggttggaagccccctgtgcgaaggcagttctttttggactgcaatgagattgcagacctatgtgatagtgcggaaagaatattttcaagtgaaccaagtgtcctacagcttaaagctccaattaagatatttggtgatttgcacggtcaatttggtgacctaatgcgcttgtttgatgagtacggtgctccttcgacagctggagacattgcttacattgattacctcttcttgggagattacgtggatcgtggtcagcatagtttggagacaatcactcttctccttgcacttaaggttgaatatcctcttaatgtacatttgattcgagggaatcatgaggccgctgatatcaatgctttgtttgggttccgaatagagtgcatagagcgaatgggtgagcgtgatgggatctggacctggcatcgcatgaataggctatttaattggcttcctttggctgccctaatagagaagaaaataatatgtatgcatggtggtattggccggtctatcaatcatgttgaacaaattgagaatcttcaaagaccaattaccatggaagcaggctcggttgttctaatggatcttctgtggtctgatccaactgaaaatgatagtgttgaaggacttagaccaaatgcccgtggcccaggccttgttacctttgggccggatcgtgttatggagttctgcaacaacaatgacttacagttaattgtgcgagcacatgagtgtgtgatggatggttttgagcgttttgctcaaggtcacctaatcactctcttctcagcaacaaattactgtggtacggcaaacaatgcgggtgcaatcttggttctaggaagagatcttgtagtagttccgaaactcatccatcctttgccgcctgccattacatctcccgagacctctccagagcatcatcttgaggacacatggatgcaggaactaaatgccaacaggccgccaactccaacaaggggccgccctcaagcagcaaacaatgaccgaggctctcttgcatggatatagtagctttggcatgcgctgaatttattcattccaagtcctcatcattgggttctggctaagctacatttatccgttctgcacagaggcagacgatctgtgctcaagagacgtgctagcccacaacaattgccaacttggaggtcgtttgcagaggagagctaagctacagaaagaaccaagggtggagaaacttcgccaatcaccaccgacagcgctctccaatttcttttcccaaatcatgagaagtaaatgaacatattcttggtcgttcatcggaagatcctacctgcgaggcttcgcccctgtatatactcagatgatgccccagcggataggtgagtggggtgtatgtgttttggtcaaccgatttgaggaacagaagggatagtgtaactagtggttattgtactaggtattcttttcctgtgtctagattttgtttttaccatgttggaaaagtattggagtggccaaaggagtaaacttattggatggggtccatctagttgttgtataatagctgtctcacctatttgtgttatcacgccttcctcccatttgtaatactacctgtctctggtgctgacatgatgtacaatattatccttgtcgtcaaaattttgtgtagtgaacaaagttggtgattgtttgatttgttaggggtggtaagagcagccttgtattgtactgtcc

SEQ ID NO: 14484 - DNA, 2537 bp, Oryza sativa
  ref <308>: DATABASE ACCESSION NUMBER: AK065065
  ref <309>: DATABASE ENTRY DATE: 2001-12-06
gggttgcttcctccgaaaatcctcatcctctccattgaccagacggcggcgcaggcgcaggcgctcacctccctcctcctccgcggcatccccaatcgaccagctggctcccctgcctcctccgcgattttgatcctaatcacccatgtctgctgaagtcagcgaggaatatccttatttcctctcctgctacttctggttcatatattgcataaaattccgagatttcacttgatacaagtggatcacctggagttttgtgctaatacttcctatcatgtgaatcagttgtagttagcataattggcaagactcaagttttctctcatctgggttcagaaacatttgtcggttgagtgctcgatctaaactctgcttgagtcttgccgaagattgtttctcaacaatcacgtcttctgttctctctgaggttggaccaatctcccttttggtctgatcaacctcctgatctcccttaagtgaaccgtcctgctgtgttcacgcaatacaatcttctgaagtcctctcttgttccttctgtgctcaaacatcaaaagcagctctctcctaagttctcttgattgtttgtgctcctaaattctgttgtttgagcactcaaacatttcccttactggtcaatcttagatcacttgttgattattggtattggcattatttggtgaagcatttctgcttgtaccttaaacaaaggtctctgttgtcttattggtgctgaaggcaagatatacactgcagtgatggctcaaacttgcttgccacctggctttcgttttcatccaacagatgttgaacttgtttcatactatttgaaaaggaagattatgggaaagaagcctcttattcaagctatatcagatgttgaactgtataaatttgctccctgggatcttcctgctcaatcctgtctccagagcagagatcttgaatggttcttcctttgcccacgagacaagaaatatcctaatgggtctaggacaaatcgttccacaccaaatggttactggaaaacaagtgggaaagatagaacgattgagcttaactctcgcattgttgggtcaaagaaaacactgatttttcatgaaggcaaagcacctaaaggcaacaggactgattgggtgatgtacgaatacaaaatggaagacaatcaattggtctctgctggtttctcaaaggatgattttgtcctctgcaaaattttcaagaaaagtggccttggtccaaggattggggagcaatatggggctccatttaatgaagaagaatgggagcatgcagatgctgaaatgtttcccttgctgccaaatgttgaaacttctgtgtttccattgctgccctcttcagaggtagtaaattctactgatgatacacgtgttcagccttctgttgctgccagagctattgaggaactacctgtgcagcatttacctcatgtatgtgctgggaatggatcaacatatcaaaatattactgttactggtgaaagtgctctcatggaactgccttcccagcactctgttgaatctattggtgatgaggtagtttctgtggacaactgttctaatgtggtcaataatgcagacagtcctgtaattgaggggcttgtattggaggaactttctaggtttttaactgattctcctcatcatggcaaccctgttggggagcactctggtctcccaccaatgtctgaggctgaagctcatgcttttgaggttagcacaaatgatctgtacaatgaaattgcagggcttgctgaattgggtgtgccaaatggtgatggattttctccgtccaatgctggtgttactgaacaacagcccacatactttggagttcctaacagtgaaaattatgtaaatatggatgatatctttgctccagacacaagattatcctatgcatatcctttgccaaacaaccaattttggcattatcccatggatcagttcacatacagtactactctatctgctgcctttccatctggtgactcgcgtccaactatgcgcattgttgatgatttacctgctgctgctaataacggtggctttgcttcaaaacccagcatgcagttcccactgtcataactaagtccagaaccgttctagaggactctgatactgatgacctagtgggattccatatgctggcagtactgcgcaacagatgtgtcttcatggccacctgctgccgctccgagctaagccaaacctcgctgaatctttctcgtggactgttgctggatttaccagtgctcgaactggtggtcactgcaagcattgtgaggccaacaatgtacattgttttgaaggtttggcctagttctcgatggcgatgctctatgatccgaacttgtctagcctggcgcgctactgaggatcagatattcgctttgtgttaccttatttacttgctgctgaataaagtttgtttatcaaactagtgtatattgtgttatgactgcacttaaaccttatgtaagtttgcatggtttggcctactatttacttgctatt

SEQ ID NO: 14485 - DNA, 1884 bp, Oryza sativa
  ref <308>: DATABASE ACCESSION NUMBER: AK065066
  ref <309>: DATABASE ENTRY DATE: 2001-12-06
gactcccgacccagccgaccacaccgtctcctcgcgttttctctcacgagaggagaaatcagcgaagaaagcgccgccgcttcacccacgtcgcctcctccgccgccatcccttttcctccctctaactccctaattccgccgagcttcttcgccgcaaccaccgttcgtcgtccaagtttcatcgtctgttagatccagcgcctcacaggtgaggaggtacgcgtgctctccctcccggtttggagcatccgccgccctttttcccttcccctcccatgtagtcatgtccttgcgccagcatggatttgagccttgccagcactccgacctcttcggcatctccgcctcgaccgtgggctaggtgtcatcgcaagctgccggcgctggttcatctccgcctgacgatctcgaccttccagtcgtctatggtgaggttctgatcgattccgctggccatcggtgcttcctccacatccagaccatgacccatcaactcttggactgatcccatatcggtttgccattcataatagtagttgacattaacagctcgatgcattatggcaaacaagagcaattgtttctttcggatgaaaatgtgttgtggtacctttttacagacctgcacaacaaggtaattatctgcattccacagtatggaatagtacacttccccagtttttatttgcaagtgcaatagatggatctagacttcatactatactttgatgcacgagacaattgcttatgttctgtccatgccctgcttatgttcttctttcagcaaaacaggggaggttagtgcttttcttttccagcctcaaaattctgaaatgaaggatattcagatagatcgtttgtgtaaaaataaactagatggtttttattgttttggtgcaaacctgtcggcaatcgtatctagatcaagctctataattatgtgtgaatcatacatattgtaacagctgcagtagtttaaaactgggtttttgtaggtcacaacaatcccaaacccaaaaaaggatatatctgatatctgtcagaactttactagaccaaaataaccatattttcatttcatggcataatttactcataccttagttttctttcaatatggtgtttcaataacacattacatccagtgctcagtccagaggttctttccatggtgtttcaataagttattacatcaagtggtcaccccaaaggatcaatgcttgcatttcccataggtacttttatgctagaaaagtatcaaccttagttgatttgtattaatgaccatgatttattgaatttcttatcagtgttcacatcaagagtatatgttatacctcaattgatcatgcctccatatctctagctatactgcgtggttctcttgtgctttgcaaatgaagttctacttcagtatattatggcatgtgacattcaattcgttgaaacctcttcttagttcaaaccattctagataggtcctgccatatgctccaatggttgtagttgggacagttaatatttctttccctctaaagtaatattcttgctttgatttttttttttgccttgcactgcatgttattggaattttagaagatcgatccttttggattgaatttttttgttttcacaaatatgattatgaagctttcattataagttgacttcatgcaatgatgtcattaatcatttttttgttttataggttcaatgttttgttccccttttcgtgagctgaaaatatttcttgagaatacttatgaatgcccatctaatatgaaatttttggacataatgtaggggatagctttagcagcatccagtactagctcatgtgcaaaattgctatggataaatgttatgatgtgatgtttttacc

SEQ ID NO: 14486 - DNA, 3932 bp, Oryza sativa
  ref <308>: DATABASE ACCESSION NUMBER: AK065067
  ref <309>: DATABASE ENTRY DATE: 2001-12-06
gcggccgtcttctcctcgcctccacttaccaccaccaccaggaaagcgagtcgcgcccaccaccgccagctaccaccttgcccgactccccaagcgccgcggcgagtgaccagcggcatcgtcgtcgtcggtagccggcggagatctccctctccgcgcgcgcgcaggagagcgatgctggctgaaagcgacttggggtgcttccaacagtgtttctgaactcagattgctgtctcccctgcacacgatatggacgaagaaaatgttgttgagctgctgcaacgttatcgccgtgaccgtcatgtattgctcaactacatgctttctggtaacttgatcaagaaagttgtaatgcctcctggtgcgatctctttggatgatgtggatatagatcaagtcagtgttgattacgtcctcaattgtgctaagaaaggtgaagcacttgaccttggagatgccatccggctttttcatgacagccttgactacccttacgtgaataacagtggaactgtggaggaattctttttacttacaaaaccagagtactctggaccagctccagcgagagaaccaccccctgtccctgctattgcaccatcacctgttgtgataccggcaccaattgtggatccaccaccagttgctgtgcactcaccagtctctaccacaaatttatcaaaatcacaatcatttgattctccaactgagaaggagttaaccatagatgacattgaagattttgaggatgaagaagatgaattcgatagccgaagggcttctagaagacatcaaagtgatgccaatgatttatcattgcggttaccactatttgaaacaggtataacagatgatgacctccgtgaaacagcatatgaaattcttgttgctgctgctggtgcttcagggggacttatagttccacagaaagaaaagaagaaagagaagagaaacaaattaatgaggaaactcggacgtagtaagagtgagagtactcaatcccaaactcagcggcaaccaggtttggttggtttgcttgaaaccatgcgagcacaacttgagataacagaatccatggatattagaactagacaaggattgctcaatgctatggtaggcaaagttggaaaacggatggacaatctcttgattccattggaactactatgctgtatctcaagagccgagttttcagacatgaaagcatatcttcgttggcagaagagacagctaaacatgctggaggagggccttataaaccatcctgttgttggatttggagagttaggtcgaaaggtcaatgagctacgaaacctcttcagaaagattgaagaatctgagtccttgcaaccatctgctgtggaggttcaacgcactgaatgcctaagatcactgagagaagttgctacttctctctctgaaagacctgcacggggtgatcttactggtgaggtttgtcattggtctgatggctaccatctgaatgtggcactgtatgagaaaatgctcggcagtgtttttgatatcttggatgagggaaagcttacagaggaagtggaagaaatcctggagctcctaaaatcaacttggcggatactaggcattacagagacgattcatgatacatgttatgcatgggtattatttagacagtttgtttttacaggtgagcaaggactcttgaaagttgtgattgagcatttgaggaagatacctttgaaggaacagcgtggtccacaggaaagattacacttgaaaagtttgcgtagttctgttgatgctgaggatagctttcaagacttcacatttttccaatctttcctatctcccgttcagaaatgggtggacaagaaattgaatgattatcacctacacttctcagagggccctagcatgatggctgatattgtaacagtggcaatgcttattaggagaattcttggtgaagaaaataacaagggaatggagtcgcctgatcgagatcagattgaccgttacatcacttcttctgtcaaaagtgctttcgtaaagatggcacactcagtagaggctaaagcagacacatcacatgaacatgttttagcatctctagctgaggagacaaagaagcttctgaagaaagatacaactgtgttttcatcggttttgtcaaagtggcacccacagtctgcagttgtttctgcttcacttctccataaactttatggaagcaaattgaaaccgtttcttgagcacgcggagcatcttacggaggatgtggtttctgtatttccggcagccgatgctttggagcagtacataatgtctgtgatggcttctgttgtgggagatgatggtttggacagcatatgcagacaaaagctagctccttatcagattgaaagtaaatctggcacgttgatattacgctgggtaaatgggcagcttgagagaattgaaacttgggttaaaagagctgctgaacaagagacttgggatcctatatcccctcaacaacgccatggggcttctattgtcgaagtctacggaatcatagaagagactgcagatcaattttttgcattcaaggtccccatgagaactggagaactaaatagcctctgccgtggttttgacaaggcatttcaagtttacacacaacttgttacaggaccgatagttgatagagaagatttaattccacctgtccctgttcttactcgatataaaaaggagcttggaatcaaggctttcgtaaaaaaggaaatacatgaagttagaacagttgacgagaggaaagcaagtgaaataatacaacttactatgccaaagctttgtgtacggcttaacagcctatattatggtatcagccagctaagcaagctggaggacagcataaatgagcggtgggctaggaggaaaagtgagagcattaacatcagacgatcaatgagtgaaaaatcaaagagtgctgtctcgagtcagaagaatcaatttgatggcagcagaaaagaaatcaatgctgcaattgatcggatatgtgagtttacagggctaaaggttatcttctgggacctacagcagccatttattgataatttgtacaaaaacaatgtttctcaagctcgactggatgctattatggaagtacttgatacggtgcttaatcagctttgtaatgtcattgtggagcaactacgggatcgtgtggttacagggcttctacaagcatctctggatggcctactccgtgtgatattggatggaggtcctacgcgtgtcttctctccaagtgatgccactcttttggaagaagatcttgaaattctgaaggaattttttatatctggtggagatggcctacctcgtggaactgtcgagaatttggtctcacgtgttcgccctgtaatagatctgatcaagcaagagacacgtgtgctcatcgatgacctacgagaagttactcagggcgctaaaagtaagtttggaaccgattccaaaaccctgcttagggtcctttgccacagaaatgattcggaggcttcgcactatgtgaagaagcaattcaagattcccagctcagctcctgccacctgatttgcaaaaccaactggatttttcggatactgtacagccaatggaatgcgtcttggccttgcgacctggaaatcgtgtccagtatccgctcccctgcttgtaagttcatgtaacatttgtgtattattaacagtaggagctaggatgcccactgattgcagtacagcatttatacactagttctggtacatttggcctgattaattggctgttttaggctttagaccatggaaggtttagattatcctttttttttgtttcattcggtcctttggtggtatgtgattatgtgaaatcatgatcagaaatgtcgggaacagaacgaatgtttgacaaatctctagcttatttttgtg

SEQ ID NO: 14487 - DNA, 835 bp, Oryza sativa
  ref <308>: DATABASE ACCESSION NUMBER: AK098887
  ref <309>: DATABASE ENTRY DATE: 2002-08-28
gggaggaatccagaagcggggggctcccaccttgttggcgacgatgctgcgcgcgggagggaggcggctcttggcccccgggctccggcgggtcctcggcggcggggcggccgctccggtggccgtgggcggggcgaaggcgtaccacgagcgggtggtggaccactacgagaacccgcggaacgtggggtcgttcgagaacgacgaccccagcgtcgggacggggctggtgggggcgccggcctgcggcgacgtgatgaagctgcagatccgcgtcgacgagagctccggcaagatcgtcgacgcatgcttcaagacctttgggtgcggatccgccatcgcgtcctcctccgtcgctactgaatgggtaaagggcaagcaaatggaggaagtagtgactataaaaaacactgagattgccaagcacttgtcacttccaccagtaaagctccattgtagcatgcttgctgaggatgcaattaaagctgccgtgaaagactatgaagcaaagaaggcgaagctagcacaaaagggtgaagagaaggctgccgaagcatgagtgccagaggttctgtcatgaagaatgttgcagtgccctgcgtactcgtagtaaagaacctgtcatgaagaagtctctgctctgcttcttgctggcgggaaatagtgtgtaacgctcacaaactctatgcagcatgtatcataaggatgaaggcaaacatttttgaataaatgtgctgtcatcttgaaagaaaaaaaaaaggtgtatgcgtgtgtatggcctagtaatgaacatatggtacggaattacggtcgcgagataaggcacattgtttct

SEQ ID NO: 14488 - DNA, 2943 bp, Oryza sativa
  ref <308>: DATABASE ACCESSION NUMBER: AK065068
  ref <309>: DATABASE ENTRY DATE: 2001-12-06
gtttctatcgatttttctcctggacaagagaagcagcagccgagcacgagcgcgagcggtgctctggtggaggagaggagagggaggcgtggtcggagtcggagtaggaggaagaggagatggtggtgctggtggtggcgacggcgtcggacccggcgtctatcggcccagccgccgccttcctcgccatgcccggctggtctcccggcccgcccatccccgaggggatggagagctttacaaacggggacgttcgactattgaagcatgaacgcagcatcattgcggaggatgatcttgacaaccggtggcaggcagccactggagaggctgtttctgaggtcatattcctcagcaaacacactgctgtctccaaccgtcctgcgcttactgtccatccaatcggtgtgccacatctaagagaagatgagacgccacctcaaggagggagaccaggatgggcagctctgcccaatcctcgaattggtccatggctccgtttgatgcaaaagattgcggtagaccaaggtcttgttccagagtttgagattacactggaagctactcaccatggaccagtcaccaatacaccaacgatgtttgttgagataggtatagatctacttccatgcttatattctctgtattagcatgtatggtagggtgttttgtaaagcttcctacaaactggtttttgtcattgccctttacatgtcttttatagtttcagaaacatctgcgccattagcttactcaggtgtttcatgctgtacatttgttttgtgctctttgcctcccaaatgtcaatcatcaatgcctaaacacatgctaggacctttttgggggatagttgcaactattgcaatgggcatttcataatcaaaaagaatttgtgatttcacagataactaatattaagcattagtaatcatttgatcattcatgtaaatttgaaacttttaatttaatcatgttccacttgtagttgtgtacttgtgtaaacttagatagtttgccttagatacgtgtaaccttcttgagcagggaagagtcagctagcaaaattatatacacatttactccctccgtcccctaatataaggaattttgacattttacttgcactgtttgaccattcgtcttatttaaaaaaatttggaattattatttattttatttgtgacttactttattatccaaagtactttaagcacgacttttcgttttttatatttgcacaaattttttgaataagacgagtggtcaaatgttacaaaaaaaatagtgaatcctatatacctatacaaatcatccccactactagcaattctctgcatcctcatgcttccacgtcaccccgttttctcctagccattggatctcgatcaagcgcttctcccggtcaatctgttggcaatccattggatcaaatatcaatggttaatgtgcagtccctctgttttcttttgctggccaacaagcccaactttacacaccatcaggcccagtccacactccttggcccaatttccaccgcatcttcccacactccatccacaccaccattcccgttaccctcttgagttcgagcggtcacgtctccctgcgccgctagaaactgcgagtgcggcgccggcgcctcaccttccagatcctgcgtagcgtcgtggttccccgccagctcttggactgctcacctccaaatggaaaccaccgctcacctgtcgtggttcgatcgctcaaactttatagctgtcatcaagatagttgttgtctcctcaacttcaagaaactatcatcctccacatcctgttcggtcgaatcctcacacgctgcccgattcacttcctactgcatactatttcacaccggaaaccatcgttccattcgttttccctgcctttaaagcttcagccgcctcctcaccttcaagaaacctcaggggtatatattcatctaccaaaggaagtactgaagaatattggtgtcggcaagatgctgctcaggcgattgccctagttctttggaaaggtctagggcttgatgaaggaaatactgttggaagttggcagggtaatagtgaaaaaagttctacttggtataggaggtggtcactatgctcctcgccatatggatattatcatcaaagatggcatatgggtgggtcatctgctctctggttactcattgcctatggaagtgtcacctcaaggaaatggaaaaagttatagtgatgttggtggaatgtggaagcattccatcaaagtttcatatgatgccacgaaggcagcatttcctggtggtcaagttatagcacatcttgatcaaaagagcttcaagggctggcaaaagaatgctatcatgagctacttgcaggagctgaacataaggataggaaaacctaatgatttcatctaatatgctgcagcaggtgtccacataaaatttttctgcgtcgtatatcagggacaaatggtaaaggtgcagcctgtgccagggaggcaaaggagaatgcagcctcgtgagttgatgatgttaatgttcctggatgctacacatgagaagtgagaagcaagcaatagtcatccttaatattgcaagggaagccaggatcgatgctgctctgaagaaacggtctagagtcatgtcaggaaaggtggcagcaaaccatccagctagcacgttatctaggctttcatatactagctgtctagtaggagtatttctcaggtttgtgcatatggtggccaaataaaaattagtacaaaagagacccatataaaaagggacacattttagtattataaatctggacaatagtgatactaggttactatattatgaaacaaatagagtactttgttttggggatgcaactagttggactccaacagggaactcttgaacattttttcttattataaatagtatgactaccaaagt

SEQ ID NO: 14489 - DNA, 2241 bp, Oryza sativa
  ref <308>: DATABASE ACCESSION NUMBER: AK065069
  ref <309>: DATABASE ENTRY DATE: 2001-12-06
gtagctccgtatcgcgtacgacacccgagccgaaccccccaacccgaggcggcggcggctgcggcggcggaggcgagcgggatgtacccggtggtgatggggcggccgccggcgaggctgccggcgtcgacgcgggtggacaaggcgacgagccacctgctgcagggccccgactgggccatcaacctcgagatatgcgacaccctcaacgccgaccgctggcaaacaaaggatgtggtaaaagctgtgaagaagcggttgcaacataaagatccaagagttcagtttttcactttgacgttgttggagacaatgatgaagaactgtggtgaatatgtccattttgaagttgttgaacaacatattttgcaagaaatggttagaattgtccagaagaagcgtgatactcaagtgagggataaagtattgatacttctggactcatggcaagaagcatttggtggacctggaggcaaatatccacagtattactggtcatacattgaacttaagaggtcaggaataatgtttcccaggcgccctgtagatgctcctccaatatttactccccctgcaacacatcatactcagtcttatggttcacctacatatcctgctggaagtctaaatgagagaatgacatccgatgttgaaactctgagtttaggggacttaaataatattagagatacaacagaacttctgtgtgatatggtgaatgctttgaatccttctgatcgcatggctgttaaagatgaaattatttcagagcttgtcacccaatgccgatcaaatcaacaaaagctcatgcgatttgtcagttccacaggaaatgaggagctactgaagcaaggcctagaaatcaatgatcacttacagagcgtacttgcaaaacatgatgccattgcttctggagctcctttgccggtcgaaacaccaaggaaagacgagatacccagagaagatccaaaaataaagccatctgcacctccgattgcacctccatccgcacctccagttgaagaggatgaagatgacgagttcgctcagatagcaagaagaaaaaacaaatctgtgataagtagtgatgaggcgtcatccagtgctggtgatcaggcccttgtacccgttgacccagtaacttctgaagcctcatcttctgttgcaagcaatgcagtggtgcctgttgactcgtctcctgccagtggtactcggacaagagagcaggacatgatcgaccttctaagcctcaccctgtacagcccccctgaagcatctacagattcttcttcacagacccaaaatggcacgcagcagtctgtcacgtcaaatgggccagaattaccaccaaactatcagcctgctgcatcaaatggatcacattactcttctaaccagcaggcatatccaacgaatcaagcttacaccccatacaacaattatgttgtaccttgggcccaagctggacagggcacacaggctggaggagcatatcaaactcagcccatgcaacaatatggatctagctacccagcaccaccatgggcgatgccagcaagtgtcaactcaaccaatccttttcagcctgcaacataccagatgcagaaccctcctgttgcttctgttgcccccacaaatacctatccagctccttcatcgccgtatgctgctccgccaaggcaacaagtgccatctcctgcaaccaaaccgatgcaacagtacaactcctttgtttctcaaacaagaagtggtccggcaatggctcaagatgttagaatgaatggtaatccacggccatcagaaactacagcggctgcggccaaaccatactacatgccagacaatttgtttggtgatttgattgatgtgaagagttatggtggaggcaagatgagtagaacggcgagcatgcctagtccaaatggcagtggccaacctttgctgggtgggaagaaatagttctagagttccaagctagctactacggttgttccacacgtgtctatatttgctgttgtatatctgttaaggtttcgcgttggttacatttgttaatttcgtggttgccgcttgtattttaaaagagtagagcatcattgcttgtaaatgatcgatgacattcatccgagggtggcttcttgctcgtttaacttcaccgctttggtttgtgaagtatgtgtatataatattcagctgatgtgcagacattctctcatatattgccaagctgaaacaactttt

SEQ ID NO: 14490 - DNA, 1413 bp, Oryza sativa
  ref <308>: DATABASE ACCESSION NUMBER: AK065070
  ref <309>: DATABASE ENTRY DATE: 2001-12-06
gatacaagctttcttcttcttcttcttcttttttccatcatgtgatagtagtgatactatgcaaagacatgatgaagaaattgctacaagctggttcttaacattgtgtttcttctaaatcttccaagtatttgatatttctgcaattgactccttaatgttcaaactaaactagtaggtcgttcttttttgtttgttagactacttcagtaattattatttttgactcagccttgcacttttgaacatttcttgcatgtgcacttgtctatatgcaaatacctgtgattcttaacccagatcctgacatccattttgtcccatctccttccttttggatgcagatgatttgaaaccacatgatgttggaattgagccgagtatgtcgtgtttcaagaatgccgattctaaagggcctcctcgggtgacttatctacatttttacgattgccccaagttttcgtttggtatcttctgtttaccgaagtcagctgtcattcccctccacaatcatcctgggatgacagtattctgcaagatactgtttggctccatgcacctcaagtcctatgactgggctaaaagtgccccagataatgataataatgcacttgagacctcagatggagctcgtttagcaaaggtaaatacagatgcggtttttgatgcttcatcggagaccacagttctataccctgaaaatggagggaatttgcactgttttactgcaaggacagcttgtgctgtgcttgacgtgatgggacccccgtacaaccgcgcggatggaagggattgctcatattacgacgaatccccatacttgagttcatctggtggagatgcacggtactcgtggctcaaagaaaatcatagtacgttcgagatgaaaggtgtacagatgccacaaaggtttatcgtttagaaatgacatacagcatcattttgtggcaacacctgcaaccatttccgccgaagaatggtcctcctctagcttgctgtagatacctgtaactgcaaagacaggcagatggtacaagggaagatgtggccactaagctcagactagcaaactcttgagtgacacagacgttacatttgtttggcttcttattttggtcagggttgaaacaatctcttgtgattttcagataactctgttcctcatatgttatcctcgtctggcagtgcaaaattgggattgggtgatacagtgaacaagtgttttgtttttgggccatgatcatctttttttgtttccctgtagaactgtatgcaggcgttttttgaaagtgatcatgtaccgaattcagagtgtggtttgcttggtttgttgaacagggaagctattcctttttgcctcttactgtagtagacaagaggcatatacatacataacatagcctttgtttcttg

SEQ ID NO: 14491 - DNA, 3436 bp, Oryza sativa
  ref <308>: DATABASE ACCESSION NUMBER: AK065071
  ref <309>: DATABASE ENTRY DATE: 2001-12-06
gagccttctctaccaccctcactcgcgagctcggctcagctcagctcacctcgcacccagatcccaatgcaccaaccagccataatgcagcgggctctcgccgtcgtcgccctcctcgccgccgcagccgccatcgccgccgcccagggggagtcgccggagttgctgccgttcgcggtgggggcggcgccggaggggtgcgacgtcggggaaggggagtgggtgttcgacgaggcggcgcggccgtggtacgccgaggaggagtgcccctacatccagcccgacctcacctgccaggctcacggccgccccgacgccgcctaccagcgctggcgctggcagccgcgcgactgctccctcccaaggtaagctcatccacctcctcctcctccggccagccattgtcgccgccggcgaccaccacctcgcttgctccgtgaacaaggatagaatccaatgcgcggctttacccaaagaagcaggccgtgactgtgactttgctttgctcaactgcaacgagatgcaggggggaaggggcagttattactgggatttaattatgcttttttttttacaaaggggttaaaaagagaacgggtttaaccgtggtataggaaaggagatgggctgcattctcgactgccgtgctagtttgtgatgacatccaggaaggacgccaataatgcattgtgcagtagtagggcattgcatggaaggacagctggtaggttaggtcatgtccatgacaattgtaaaagtaaatttacttcctcctagtactagcagtaacaacaggaggaggagtacaattttcagttcatataggtgtgagcattccaagatccatgcactcactgcactcactcaatgatcagtgcacatttgcagtaactgatactccctccatcccttaaataatttaaaaattattatttattttatttatgacttactttattatccaaagtattttaagtataactttttgtttttcatatttgcacaaattttattgaataagacgagtggttaaaccatataagtaaaatatcaaaatcccttatattggggggacggagggagtaatagaatcacataaatgaaatgagtttcattagctctagcagattaggcagatgacccatgctaccaactctccccgtggtgattattttatctgcatgtcttggcgtctgcacatcgtatgcctctctttagaggaaagatttcattttgtgatgattcactcttggaaagtttggtttcaaaatggaggtttcagtgaaggaagtagacaaacatgcaccgtgtggtcctcatacgtgccagatattggttgttttggtgggtcagccggtcaggtatccatcatgcagtggactccagccttgtcgagtcagaacactaaaaaaaaggactaaaaattgaccacaaattttgtataatcatctttaaaaaagacgtaaacatgttaccagatgcaaaattccaatgcaaagatttgtttttttgattgttttccttttgtctttctcaaccgctatgtggactgctagtacaaacaaatttcattataaaaaagtattcattccgtcttaaaataaatttaaattttacccatcacatgcataccaataaaaataaaaaaatagaatactcctattttattaaatctcaatacaattatttcccactttatttactcacaatacatttatttcctgcttccacaaacttcgatgtaacgattacttaaaaaaaatttattttgagacaaatgaaaagagctagaaaagagctaaaaagaatgaaattattttttgatgaaaaaagaatgaaattattatagaagagagtatttctttttacaaagagtcatctgaattcaagtttccatgggaaagaaaaaaacatcatctgatctgatcactctgcacttggtttgcagcttcaacgcgacggggatgctggagatgctgcgggggaagcggatgctgttcgtcggggactcgctgctccgggggcagtacacgtcgctgctctgcctcctccaccgcggcgctcccggcggcggcggcgggtccagatccttcgagacggtggattcgctcagtatcttcagggccaaggactacgacgccaccatcgagttctactgggcgcccatgctcgccgagtccaactccgacggcgccgccgtccccgacgaccgcctcatccgcggcgcccccatgaacaagcactcctccttctggaagggcgccgacgtcctcgtcttcaactcctacctctggtggatgaccggcgacaagatccagatcctgtaagctgctactccctccattgcaggtttcaggttataaaacgttttaactttggtcaaaacaaattgttttaaatttaattaagtttatagacaaatatagtaatatttataatattaaattagttttatcaaatcaatgattgaatatattttcataataaatttatcttaggttgaaaatgttactacttttttgaaaaaaatgattaaatttaaagtagtttgattttgactaaaggaaaaaacgtattataacctataaaacggagggagtagctagcaaatacggattcatccatggcgtgaacgatcgatggattcgtttgtgagattgtttgtgtgatctggttggcaggagaggcgcggacgaggacatgagcaaggacatcgtggagatggaggcggcggaggcgtacaggctggtgctgcaccaggtgacgcggtggctggagggcaacgtggaccccaagagcgcgcgggtgttcttcgtcacggcgtcgccgtcgcacgccggcgccggcggcgagtgctacgaccagacgacgccggtgggcgcggccgacgcggcgtcgtactgcgggagcacgagccggcggatggtgcaggtcgccggcgaggtgctgggggcatcgcgggtgcccgtcggggtggtgaacgtcacccggatgtcggagctccgccgcgacgcgcacacgcaggtgtacagggagcagcggtgggcgaagccgacggcggagcagctcgccgccgacccgaggagctacgccgactgcacccactggtgcctccccggcgtccccgacgcgtggaacgagctgctctactggaagctcttcttccccgcgcgcgacgaggcgatctgacctcatgacgtcacgccgccgccatcgtcgtcgtcgtcgtcgtcactaatcggtgtaatctgctccgttcccgccatttcttttcttggcgatcgatgtaatcaaatctctctatacttgctcctcttctgtcctcttctctttttgaacgaagtgaaaatacagaagctagcattatttgcttgcatgtgtacaaaatccacgatcttgcatcaagattaactaatgtgatcaccaattcaggatc

SEQ ID NO: 14492 - DNA, 1130 bp, Oryza sativa
  ref <308>: DATABASE ACCESSION NUMBER: AK065072
  ref <309>: DATABASE ENTRY DATE: 2001-12-06
gagctcctctttcgctttagccgcagctgcttcgctctgctttctccgtagggtttatccctttgcttctcctcgtctccctcccactcgcacgcaaaggcacaaagcccggattccaccgccggagccgacccgcttcgaggcgaatcgagagttagctttccagccagcaatcgaggatgtcgtcggtgcagctctccggtgccggagtcgccgcggtggccttcaccaagaatggcgcgtcttccttcgacgggctccgcctcgcgccgccatctgtgcgagtctgctcctccaggcgcccgtctcgtagcctcgtcgtcaaggccgccacggtcgtcaccccaaagtatacctcgctcaagcctctgggagacagagtgcttgtgaagcttggtgctgcagaggagaagactgttggtgggattctgcttccgtcaaccgcacagtctaagcctcagggaggtgaggttgttgctgttggagagggaagaactattggggataagaaagttgaggtcagcttgcagattggggctgaagttgtatattcaaaatatgctgggactgaggtgcaatttaacgacaccaaacatcttattctaaaagaggatgatatcattggtgttcttgagactgatgatgtcaaagatatgaagccccttaatgaccgggttctcatcaaggttgctgaggctgaagacaaaactgctggtggccttattctcactgaaaccactaaggagaagccatcaatcggaacagttgtagccgttggtccaggccctcttgatgatgaaggcaagaggcagccattgtcagtttcagcgggcagcactgtgatgtactccaagtacgcaggcagtgagttcaagggagctgatggcgccaactacattgtcttgagagtatcagatgtgatggctgtcctatcttgagctgtgatttgtttcaattttgagttcagaatagacggtagcaggtggtaatggttgccatgtggtgatcttcactctgcggagatgctgtctttgataatcctagaattcgaacgcaacaatttgcagatctcctacgggatcaacattccactgtgactgatttttatttataaaagtttgttttgtttc

SEQ ID NO: 14493 - DNA, 3470 bp, Oryza sativa
  ref <308>: DATABASE ACCESSION NUMBER: AK065073
  ref <309>: DATABASE ENTRY DATE: 2001-12-06
agaccctgtccgatctcatctcttcccctcctcgtctcgtcgagaattccccacttctccgtctcgccatcgccgccgcatccaagccctaaaccctctcctctccttctctcacccatggccgtggccacaattggcgccgcagcagcctccccatgcctccggcacgtccacctgttagggcttctgatcgaggcgcatccaggtgtgtagagatctctgtcgccgctccgctcctcgctgagggaggtatccgtatccctcttatgcgtgcctagagcgtatggggactcttgcattctcgggcgggatcttgtttctagtgttgtgataatcgatgacgtgtgtatttttggacatcctgctgctttctgtttactctttagcaccgcagattttacttttcaagtcaatagaggtgattaaataaattaattctgcatactgccaaatatatttattttattgaagtgtgaagcgataaattactagtaggtccttgcaacggttgttttattctctcttgatgaaaggattaacttacatgacacaggcacgcggcagtcatttggttgcatttattctctttttctcatatgctcatgtattcttgtaatggttaatttttcttgttttgtggatcctgtgtgatagtcttacaatgaatttccgaaatcaggaagtaaagcgaacgaactgacctaggttatggttttctcctggtatgaaacataacatgaagttagttttgctgacttctttggcttggcatagacgtgatatttccagtttaggattgaccatgctgctgagctctatgcataagtctatttgggttctgcccttttgaagctgaaaggcactgtagtgtgtaatgatttttaagatcactcttatttctaagcagtaagaaaaaaaatcatgaagacaaatgaatgaattagtatctgaatggagtcacacatcaagtttgactggaatgtagtcacattatggttacaccctatactataatgttctagggacaactcctacgagttaccaaaataaaataagctgaggctctctagaaatagttaacctatttgtgggaatgccaggtgtcagtattctttgttgctgttattcatgaggctataccctatttaccatgatctgtaaatgctattttctcgactttatgctaatatgcatgtattgcaagcaaacaattatttattgcagagatcaactagccatgcacatatactagaaacatgcacgtttaattcaaaacagtgcatttgttatttatgcactctcatgactaaactattctattaataaaaacaactcatgtttcatatattggtcctgcaagtaattgactatcccatttgagtagtatgggaataccaaaaaaaaaagaaggttccaccgggatttgaacccaggttgccagattcaaagtctggagtgctaaccactacactatggaaccggatgttgtgtttggtctcttcctgttgacatttctgtcttatgttccataaactcagtaatgatacaaaattgtctttatcctttttttaattgtttccatcagttatggcttcaatgaaactgtgttcctttttgagcatgcatccaattagatacatgcagaacatgacatttgttaaaaagttccattcatttaactttttatggtataactttttttgttgttttgtataattgttaaatgcatgacagtgcatgctctccaatacataacagacctccgatttctgtatagtcatttaatggaatcttcacaattaaatcttgagtgaagtttgattgcgctgatgtacacatgtgaacagagtgattataagatacgccaaccacagtacatagtcaaatataatgcacaaaattaaaatttgcattcgtttttaagttgaaatagttgtgaacatggagctgccttatgaggtggacacatgcctacaaaatacttggatatatgagtatgtcccttatgtgatagctactcttagagtggtttaatacttttatatacaatgaaagggttgaaccttacaacattaactacttgttcttattgatatcgtaaccttgcagtcgagaagtttctctgggcaaaatttaagatgcaaggagatataatgatactcttgtccgatatcacccttcaagtcaaggtcaagctaccttatactgacatgatggtaacaacttcagttacattttgtggaaggcttacattcaagccaaaaatgttaccatctagcatcaaaacacaactgccatctctttggtggaacactcttgatgtggctcttcagggtaattagatgctttaataccaagagtgatatgtatgcgattttttatgctggtgatgctaatggtgtgatggaaggtttgtcagtaaggttgtgggctggagaagttgagatagtgagaagatcaatagactctgataccatgaaagcagttatgccacatgttgatgcactgcattaaactcttgcgtgtgaacaaaactactatatttcctgaatcgtgtatttgccctgcaatcaattgactatgcagatcccatttgaggagtatggcaatacccaaaaaagaggtcccaccgggatttgaacccaggttgccagattcaaagtctggagtgctaaccactacactatggaaccaggtgagataagaccacagagccagtcatcgctatgtctgaaagcatatagactatttcccagctgtttacaccccggcaaaacaatgttcaatcttataaggtgagataaggccacagatccagctatcactatgtccacaaacatgtgcgaatccccagttgtttactgcacaaattcaccccaacaaaaccatgtttaaccttgtcaggtgagataagactgcatagccagccatcgcaatgtccgcaacatgtgagaaactgagaattccctgttgtttacctcacaagttcagcccatgaaaatcatggtcatccttgttagtgtatcagaaactccttttcatattccaaggggttcacagtaaacggtggaaaaacacaaggatcagaactcagaaccgctgctgtttgcattcggactttcaatttggagtaacagtgtaccttgcaggagcaaaattgatgcttcactgatgcagcagcctccctggagttttgatcgtggtgttgtagactaaatggtagggcgcatgagaatatggggtgtggcatgtatgaggccttgtgaaatatggctgagtgagccgatgtgttagtgccgtcttttagttggcaacattctgagtgaaaatagcctatagaacgttgctagtatatgttcttgataattgcctgatacattgttcttgtacttgtatgctactatgctagtgcatatcacttgtcaaatccatggaatttctttccagtggagactgcacaatgaagttcc

SEQ ID NO: 14494 - DNA, 2235 bp, Oryza sativa
  ref <308>: DATABASE ACCESSION NUMBER: AK065074
  ref <309>: DATABASE ENTRY DATE: 2001-12-06
gacagcctacccctcgcgtcgtcgccgtcacgtccacctccgctgctgtcggcgaggcgagcagccatctccgcctcggcggccggcgtcgccgaccgccgctgcttccgcctttgcctcacgcctccggctgccggcgtccggatccgacgtccatgtggtcgggggacgcggatctgagctcccccccgtgcgccggacagcgtctccgcctcggccgtcgccgagcatcgccacttctgcctccgcttcgttctgccactgtcgaacgccaccgccgtagcacccaccctccgctgccgtcgccatcgccgagcacccctgctgcgtccttcaccaccatcgtcgacggccgctgctccgcgctccgttgctgctgccatcaagaagcgacggtggtgacagagccggcatcaatgaaggtggtggctgcggcgagaagaggagaaccatccgtcgccaggctgatctgccgatgaactcgggcagcaacatggtcggtggccgccgttacctccttccccagcgtcgcctccatcgtcctccctgcctcgacggccatggcgggcggcagtgtggttgactgtggcatatgttcgattcaggcaaaggcagagaggtgccctccctcccctttctctcccatctctccatagatctctctctctctctctctctctctctctctctctctctctctctctctctctctcaagggcagagagggaacctctgcgcggcaaaggcgacgttgggtgcaggatggacctacggtggaggaggaggatggctgagcggcggcggcgggggagagggagagggtgagacgagaggaatgaggtgctgttgtgacgttgtgtactcttttcactgcatgtgttgtcgtagtctcgctgggaatggagcgggggagatggggtgttgccagcgacagctgcaggacttgtcatcggcatggaccaaagaggcacataataataagtctgaaatctcaatctccactctttttctttctcactttttacatgctcatgttgttattgtcctgttcttaccttacagttgcagcgtactaacttatatctaatggaacttgcacttgcattagtaatctgattatttatcatcatagacacatgaaaaactgatgttttctcccctcctgatttctaggattcttccagaaaatgtggcaactctttcgtctcaccatgagacaaaagaaaaggttctttcatactctgatgcttctgatgttcttagatatgcttttactatgacagaagctgcaatcgatcatgagtatgagagataattgttgatggatgaggagctgagcttggcggtggagcacggcatgctgctccgggaggagtgttccatcgtcttcacgttcatcaatcggaggcctacactcccgccgccgaggccgctgtgatgctgggatttctttggttgctttctgccctggcaataacatatagaagacagagcaaaaactctaatacatgtgaacggccggaaaaagtttttggagtgcaccggttcacagatcagaggccatggttttcaattttatttttcactcatcgcattgctcctacatcgaaaaacaagccagcacaaagtttacaaggtctgcacatcaaactaacaaatgtaccacaatcgaagaattatctcctaagaaaaagcatgtcgttctaacatcagatggcacggaagaagatgtgcattctctagaggtgaacaacagatgcaatatcactcgtacatcaagtccaaaaaaatcagtttttgaacgtcatttctgaagaaataaacattaatctcctcaacctgacatctcaaacaactagcttcagtttcagtggtgagtgtatcctttagaactactttagaactgttcctaataactggtcttcagtattggaaatctaggactggagtgatatttttacagttgacgtgatccatctggatttgttcaatttgtgaaaaagcatcttgcagcagattgtttgctctctgtttccaaaacctggttctccagatgatttagctatattttgtgctcatcaaagaaagcagggcctgaccctcctgaccaagttgtcagataaggcttgcacgagtagagtgaatctcctcgtagcaaattttcatcggattatctcatattattatgtaaaactatgattttgttttacatatatatcggtacattcatcgtgc

SEQ ID NO: 14495 - DNA, 1818 bp, Oryza sativa
  ref <308>: DATABASE ACCESSION NUMBER: AK065075
  ref <309>: DATABASE ENTRY DATE: 2001-12-06
gagcggcaaagcaaaagaaaaagttagatcagaggagagctcagagctcaaagagttgggaagccatggcgggagggcagctcaacgtgctgagcacgctcgaccaggcgaagacgcaatggtaccacttcatggcgatcgtcatcgccggcatgggcttcttcaccgacgcctacgacctcttctgcatttccctcgtcaccaagctgctcggccgcatctactacaccgacgattccaaggacacccccggcgcgctcccgcccaacgtgtcggccgccgtcaccggcgtcgcgctctgcggcacgctcgccggccagcttttcttcggatggctcggcgacaagctcggacgcaagagcgtgtatggtttcacgctgattctgatggtcgtgtgctcggtcgcgtccgggctctcgttcgggagctcggccaagggcgtcgtgtctacgctctgcttcttccggttctggctcggcttcggcatcggcggcgactacccgctcagcgccaccatcatgtcggagtacgcgaacaagaggacgcgcggggccttcatcgccgccgtgttcgccatgcaggggttcgggatcctcttcggcgccatcgtcgcgctcgcggtgtcggcggggttccggcacgcgtacccggcgccgtcctactccgacaaccacgccgcgtcgctcgtcccgcaggccgactacgtgtggcgcatcatcctcatgttcggcaccgtcccggcggcgctcacctactactggcggatgaagatgcccgagacggcgcggtacacggcgctcatcgcccgcaacgcgaagcaggcggcggccgacatgtccaaggtgctgcacacccagattgaggagagcgcggaccgcgccgagacggtggccgtcggcggcgagagctggggcctcttctcgcgccagttcctgcgccgccacggcctccacctcctcgccaccaccagcacgtggttcctcctcgacatcgccttctacagccagaacctgttccagaaggacatcttcagcaaggtcgggtggatcccgccggcgaagaccatgaacgcgctcgaggagctctaccgcatcgcccgcgcccaggcgctcatcgcgctctgcggcaccatcccgggctactggttcaccgtcgcattcatcgagatcatgggcaggttctggatccagatcatgggcttcgccatgatgacggcgttcatgctcggcctcgccatcccgtaccaccactggacgacgccggggcaccgcaccggcttcatcgtcatgtacggattcaccttcttcttcgcgaacttcgggccaaacagcaccaccttcatcgtgccggcggagatatacccggcgcggctccggtcgacgtgccacggcatcaagaacgcgctcttcgtgctcgccggcacaaacttcctcgggacgatcatgacgctgctcgtgccggagtccaagggcatgtcgctcgaggttatctcgcaggaggtcgccgacggcgacgacgaggaggcggcctacccgaagtaatttgaccgcgcgcgtgatcacgcagggagtggttgccgctaaccatttgtgtcatctcttttcccaactgtaacaactctagtcgtcgcttccgtacgagtggtagttttttctttttcttggataagtttgtagaaatttcaattagtgactagtttgtagtatatgtgagtgagatgtgtgtatatgttcttgaagaattggtgaacttttccctggatttgaaagaaccgtgtagtttgaaaaaagaatgcaatggatatgctagtagttcagg

SEQ ID NO: 14496 - DNA, 2291 bp, Oryza sativa
  ref <308>: DATABASE ACCESSION NUMBER: AK065076
  ref <309>: DATABASE ENTRY DATE: 2001-12-06
gactccggcggaggcacggccacccccacccttctcccccacctcgcctcgcctcgcctcctcctcgggctcgccgccggcgagcagggcaccgtggggggacacggcgtcgacgggcctcctctcctccctgaccccgccctctagccttctcccccttgcgtgcggccttctcgcacgcgcgcgcgggtaccacgagcatcccggtgatcgaaaaatcgaaatcgaaggtattgcaatccttcccccccgcatagccctctccctccccctcgtcctccgcggtcgcttcatgttccggcgtggtcgtaggtcgcagatccgttagggggttgggggctggtttcatcccctccggtttaaaaatccatctagtttttgtctcgattacatttgttttgacgcatttgtgcgttgtgcgttgtgcagtgctaaattaccactaatagtctagtgatttagattttttttttcaacaaaaaaaaagctgaaccctatgccccacgttaggttagcctctctacatcaggcgcatgaactactctagcacagtttcagcaagttccattctggctttgaatggaatggtttgcctctgtctgtctgtgtctatgacagtatcatactatcttgtgagcacctttggaattcatgaattttacagaattttcacatgatgaaacagttcaagtcacatgaaattcctcgaaaaatcatacgtcccaaaaggacgcttgaacaaaacacaaaaacacacacacccaaaaaaaacccgaaggaactgcctcaatatccttccaaatgatactgtgtgcttctttctgttataaaaaatgaaaggaaaacgaactgttgtttcacctataacctattgatgtgctgttgctgatgatacataaagaactagtctaccaaagagtggagaacagaaccagaacgccattggtaatttggtatagaatgaatcatggatggaagacaagtatcctgttcatgagcttgtcagtcaactcccacggtcttgtagctcgttcatgagaggaatcaactccacagtacccgttccagcatcgaccactttgattctttcatcttcgacagccacattcagagcatgacagctagaatcatctgcgacaaggacggaaaattcagcagtgtcttgacctcctttcctagcttcagtagattcattgtcctgaagcatctctgccgggaggagcattgagttttggtcactctggggaacaagaaacagcagcatcagcgggagcagcctcgacaagtttctgatcaggacggcaacccagaggttactgaactctgttcgagtcacattcagcaagtgcagcatcaggccaccccaccagccagacatcagcaacccggcgttttggatggacatgagcagcgcatagaaagttccttcgatgcctggaggacaaagcttggagcaaagcacgaggagcggcaaccatttgagcctcccaaccatctgggagacactgttgtcgatcaccgcaaagacgtaatccggaatgccgattcttgtgttgagccgggtcaccattatcagattgagcattcctgccaggcttgaaagaacttggccccagaatagcacgccgcggaaagggtagtccttcagtgaaatttggtatagtaaaactccgagcagcgaaccgattgaaccgaccgaatacacaaggccaataaattcctgaaataaacgatcgaatgacgcaatcgaagtgtcatcagatgattaaaattagaagaaggtcaaataactgaatttatctaaaaccacacctcattatatggatttaacagtggtatgcattctcagtattacagtccatgcaaatgatgcgatgaactgatgatatctagcaaatatctatatgcaggaatgtgcatacctcagagaatcctggtcccactattggatcagtgtaccagtagaacattcctgcttggatatccaggcttagactgagagaaacatacatatacacacacggccgccaaacttcagtgttgcccccatggactgaattgctttgtagaatttcctatgaacctgaatccatcaaagcactcaagtggcatcactgtccatgcctgaattcagcaatctcaacacacaaaaggaaaggtgttcaaattttgtcttgacattctgacctgcttgtaatcgaaatctgtaactcgcctctccttcagcaaaacaccagccaagaacaccagtgcagaagggatgcttagtaatccaagagcacccttagaac

SEQ ID NO: 14497 - DNA, 2511 bp, Oryza sativa
  ref <308>: DATABASE ACCESSION NUMBER: AK065077
  ref <309>: DATABASE ENTRY DATE: 2001-12-06
tggcggaatcggcgtcgccatggtgtttctcatcgtctcggcttcctccttcctcatccgtctcccacttgtcgctcgagctcgcctcccaaaccctacctcctcctcatatacctctaggtctaggtctagggccctcctcctcctccccgcctcctcccctcttcgcgccttctgccccgcctcccgccgcccctcgcccgccacctgctccgccgcctacgcctcctcctccatggccaccgacgacaacccgctcctcgccgacttcgacttcccgcccttcgaccgcgtcgagcccatccacgtccgccccgccgtccgcacgctcctcgcccgcctcgagggcgagctcaccgacctcgagaagggcgtgcagcccacctgggggaagctggtcgagccgctcgagcggatcgtcgacagcctcgaggtcgtctggggcaccgtcgaccacctcaaggccgtcaaggactcttccgacctccgcgccgccgtcgaggacgttcagcctgacaaagtcaaattccaactaaggctgggccagagcaagcctatataccaagctttcaacgccataaggaattcttcagactgggaaaccctcagtgaggctcgcaagcgtatagtagaagcccaaatcaaggaagccgttctaagtggagtcgcacttgaggatgaacagagggagaaatttaatcaaatcgagcaggagcttgagaagttaacacaaaagttcagtgaaaatgtgctggatgcaactaagaaatttgagaaattaattactgataagaatgaaattgatgggttacctgccacagcacttggcttagcagcacagactgccgcgtcaaagggtcatgaaaatgcttcggctgaaaacggaccatggatcatcacattggatgcgccaagctatattgctgttatgcagcatgcacggaacagagcacttcgtgaagaagtttatcgtgcttacctaacccgtgcctctagtggcgaccttgataacaccaatatcatcagtcaaattctaaagttgaggctggagaaggctaagctactcggctacaagaactatgctgaggtaagcatggctcagaaaatggcaactgttgaccgtgtagaagagcttcttgagaaactccgtgctgcctcctgggatcatgctgttaaagatatggaagatctaaaagcctttgctaaagagtctgcttctccagaagccaatgacctggctcactgggacctaagcttctggagtgaacgactccgggaatctaaatatgatatcaacgaggaagatttgcgtccttactttgcactacccaaggttatggatggcctcttcagtctcgcaaataggctctttggtgttagcgtagagcctgcagatggactggctcctgtttggaatagtgatgtcaaattttactgtgtcaaagattcttcgaatagccctgttgcttatttctacttcgatccatattcaagaccatctgagaagcgtggaggggcttggatgaatgtggttttttctcgcagtcgtgtgcttgctcgcaatggttcacctgtcaggcttcctgttgcccatatggtgtgtaatcagaccccaccagttggtgataaacccagtcttatgaccttccgtgaggttgaaactgtgttccatgaatttggtcatgcgctgcagcacatgcttaccaaacaagatgaaggatttgtttctggtattcgtggagtagaatgggatgctgtagagctgccctctcagttcatggagaactggtgctaccacaagaatactcttttgagcattgcaaagcattatgaaacaggcgaacttcttccagaggaaatttatgcaaagcttgtcgctgcaaagaatttccgtgctggcaccttcagtttacgtcagatacgttttgctagtgtggacatggagctgcatacgacttacgatccaaatggttcattgtccatatatgatgtcgaccgaagagttgctgagcgaacacaggttcttgctcctcttccggaggataaattcctgtgcagctttagccatatatttgcaggaggctatgcagctggatactacagttacaagtgggctgaagtattgtcagctgatgcattctcagcatttgaagacgttggtttggacaatgagaaggcaattgaggaaactggcagacgattcagagaaacagtccttgcgcttggaggtggaaaatctccactcgaggtgtttgtgtctttccgcggacgggagccatcaccggaagctctgctcaggcacaacggcttgctacctgttgctgcattgtgataactcatgctcgattgtccccttcttttttcttttaacttgcgaaaacggcttgtaagatgttattgattgatggcatatcagcaacacgctaaaagtgccgtgtcctgcttacaacatgaaaaacaagttgctgtgcacaaccattatataatgatcatcgctgcttcttgccgttc

SEQ ID NO: 14498 - DNA, 2764 bp, Oryza sativa
  ref <308>: DATABASE ACCESSION NUMBER: AK065078
  ref <309>: DATABASE ENTRY DATE: 2001-12-06
gagtcttctcttcaccttcttctcatcctcttcttctcctcctcggtcaaaccgccttttcttctctcccctatcctccgctccgagggagaaaaaaaaacaaagaaagaaagaaagaaagaaaaagagtactagtagcacccggagagtggaggaaagggagtaggcggagccaaatctcgtttctctttagttgttgttagtacccttagtggaagaatctctccccttttcttgtgtttcttgggttttgaagttttttgttgttgggaggtatgaggaatgaaggcctaacctgaggcaagatcttcgttttccttcatttgtgggggtgtttgttggtggaaacggatcaagaaaagccggaatttcggttctgaaatcgtcggttttgatatcggtttctctctgttgattggagagagagggagagagcaaacgcatgatctgtgtctgattctgacgggccttgtcgcggtccgtatcagttcatccatcccaacttgctgttcgttttgtgtggtggtgtttcgcttttttgggaagagaggagaggaagcaatcattcggcggcgacggccccgcccacttgagttaaacttgattgctctgtcgcatggccagcagtagcgaccatggatccctcatggaggactggatgccaccacccacacccagcccgagaacactcatgtcaagcttcttgaatgaagattttgtctctggttcattttccaatattttcagtgatcatgagagcaacaaaccccaggatcagtttgagagaaacagagagcttgtggatttgagtaaggaagtgccttcccaattcgcaagacccgcattccagagggatgcttccctggatcatagcttggtcagtcctacacagagatcaaactcgcatggtggtttggcagagcgcagggctgcgagggctggtttcagtgtcccgaaaatcgatacatcccgtggtggttcatccacagtaattcgatcgcccgtggcaattccaccaggtcttagtccaacaacacttctcgagtcaccggttttcctttacaacgcaatggcacagccttctccaaccactggcacactgccatttttgatggcttcaaatgctaagtcaacaataccgtcagctaccaagatggacgaagattgcacatttggcaatgacactttctccttccaaccgcatgtagggtcgagacggccaaatttctccgctgcagaaaagggtcccaatgcttgtcaccaaaaccaatcgctgtcgaatatccatcagcgggaatccagtcttcagtcaagctttactgcagtcaaagatatcactgatgaaaaaaacattaaaacaaagacatctgactccatgtttggtgataaccactcttctgatgaacaagatgatgagactaaccaaaatggagaaaactctatgccacctccgaaccaccgttcaggtgtccctctgtcacataccaatgatccagaagtgaatgtcctagagaaccgcggttcacagacatgccataactctgcatccttgtgggacaatgccaaaaatgattgccttcaagatgttcaaagtgaagttattgaaacaagaacagctgcttgtcttccagtatcaaccaattgtgatacatctatcatggagtcccaagatgcagttgatgtgtcgtcaacactatctaatgaggaggatgatagggcaacgcatggcacggcttctatagagtgcaacggggatggagatgagactgattccaagagaaggaagctggatgctttgacagctgcaactgctgctattaccaccaccagtaacattgacatgggagctgcggcatcgagaggtgtccgggagcctcgtgttgttgttcagacaacaagtgaggttgacatccttgatgacggttaccgctggcgcaagtatggacagaaggttgttaaaggaaatccaaacccaaggagctattacaaatgtacgcaccaagggtgttcggtgcgcaagcacgtggagagagcatcgcatgatctaaaatccgtcatcacgacgtacgaggggaagcacaaccatgaagttccagctgccagaaatagtggacatgggagctctggatctggaaacgctccatctgcaccgcaatctaacggctctcagcgcaggcaagaacaagggcaagccagcttcagccagtttggtggcgcggctcccttcagctccttcgttctcccaccaagaaaccaatttggaccatcggcgagcaatttcccctttgggatggtcccgccaggcatggcgattcccatgccatctctagggtctcttgctccagcaaagatggctggtcatccatccaccatgcagggctaccaggggctcatgattccggaaggagagatgaagacagagcccatgtcgcagctcggcttccccgcggtaaaccaatcttcatcatccttccaacagatgatgaacaggcctccatcatttggacctcagatgtaaataataatattaaagaaagaaaagaaaatgatagatgtgcttcagcttctatacatggtagcaatgctacaacatagctttgttgttctagcttttacctgttattttttctttgggcttttattttttggaagcaaagaatgcagaagatgttacccgttttgtttatgttgtaattggaaaaaaaaggtggtggtagtgttcaggacaaaaggcaaaatcattcaattggaagtgctgatggtg

SEQ ID NO: 14499 - DNA, 1628 bp, Oryza sativa
  ref <308>: DATABASE ACCESSION NUMBER: AK065079
  ref <309>: DATABASE ENTRY DATE: 2001-12-06
ggcctgcacagctgtttcaacgacggctgctcggaattcggagggagggaggaaggaatcggagtgttcggtaagcttcgcgaagcgggatggaggcgccgcgcctccgcctcccgttcctcctactggtggccctcgtcgtctcgccgccggcggtcgccgcggcggcgagccgaatgcggatcgagcccctccccaccgccgcgctgcgccgcctctacgacacctccaactacggcaagctgcagctcaacaacggcctcgccctcaccccgcagatgggatggaacagctggaatttcttcgcctgcaacatcaacgagacggtcatccgcgacacagctgacgcactagtctcgacggggctggctgatttgggctacaactatgtaaatatcgatgattgttggtccaatgtaaaaagaggaaaaaaggatcaattgctacctgacccaaaaactttcccttctggcatcaaagatcttgcggactatgtgcatgggaaaggtctaaagcttggtatctactctgatgctgggatttttacatgtcaagttcgacctggatcgctccatcatgaaaaggacgatgctgcaatatttgcttcatggggtgttgattacctgaagtatgacaactgctacaatttgggaataaagcccaaggacaggtatcctccaatgcgtgatgctttaaattcaactggacgccaaatattctactctctatgtgaatggggccaggatgatccagccttatgggctggcaaagttggtaacagttggcgcacaacagatgacatacaggatacatggaaaagcatgactgatattgctgataagaataacaagtgggcatcatatgctggacccggtggatggaatgacccggatatgctggaagtcgggaatggtggcatgacctttgcagagtatcgtgcacattttagcatctgggcacttatgaaggcccctctcttaattggttgcgatgtcagaaacatgactaaagaaacaatggaaatattgagcaacaaagaagtaattcaagtaaatcaagatcctcttggagttcaaggaagaagaattttaggtcaagggaaaaatggatgccaagaggtgtgggctggccccctctctggtaaccgtctggctgttgttttatggaaccgctgtgaggagtctgccaatattatagtaaaattgccatctgtaggccttgatggttcatctccctattctgttagagatctgtggaagcataaaactctatcagagaacgttgttggaacttttggggcgcaagttgacgtgcatgactgcaaaatgtatattttcactcccgccgtcaccgttgcatcaagttgatcatgaagagcatcatgcctgatgctttcctggaagcacccagtatctactcaaattagacctgatgaatcgtccaccattttggtcgaggcaacaggtctactgaaatttgctttgtggagaatgcagttttcccgtttctatggggaagttcgtgcaagcaaaccacgtaaggtttttcttgcaagcttgtggtgtaaatttattggtggcttgacgccgtttgctgtacaggatgcaaataaataatttattctgtcc

SEQ ID NO: 14500 - DNA, 3160 bp, Oryza sativa
  ref <308>: DATABASE ACCESSION NUMBER: AK098888
  ref <309>: DATABASE ENTRY DATE: 2002-08-28
gctgtacaaatgtgctgaggcttgggttctaggctggcttacctatagctagttagcttacatgatggccgccggtggccacgctgccgcggagcaccgcatacagataccagctgccccggcgtcgcagtcgggaccagctgatcataaggcggtcgccgcggcgccggagaagtggctgaattactttcttcgcttgctcgcggtgatcgaaagcgtgggcaacgccttcggcacgctggccttcacctgggccaccgtcgtcctgctgggtggctacccaaccgttctcaagcgcgattttggtattgcgactgcgataattttcctagaagccacgaggatgttcacccgcaacaataggctggattatcaattgttcttccggacgagaggtgcctttagaccactgggctggaacgggctgatggtaatcgtattcttctccgtttctatggtgtccacggttgtttgggacgcacgccggccacgtatagtatttccaattatggtagtattgtttgcggttggccagtttctatgtgctggagttctaggactgcgcctacgtatcaacagtcggttacgccgtcagatgtcgctgtggagccccatggttgcaatcttattgctggcttcctgtatttgcagaagctcgctactggccatatggatagtatatggtgtgctccttgtggttgtgctcctagtgactattagcaggttgcaattcccaattataatcaaccgagtacatggtgctttgggccgcaaatacgtattttggcgcccatttatcctatactcgtgcatgctcgctgcaattgtgttgccgatgttcatgattgataaattatatcgatatgcgatcatcgtcctcgacatatctgccttggtcattgtgtccttcggcaacctacagattccagcagcactcgtgcgtgttgtgctcgcggcgttgggctttgatcaagaggactacgatggtcacggtgacacgacaaatcttccccaatctctaactatcttctatgggatggtgcttggacaaggactactttacatcattgccgcagtattggaggtcttctcgttcatccctcggatacacctcgtccgccgtggtggatttacaggtcgatggggagcagaatctgttgatatgtactacgcatacgcctatgacaaatacatggaaggaggtctgtttgctccaaagaggatcagcctcagcaactttgccatggattctctgaattcggacctgtccaagaatcagctatacggtgtccagatgatgcatatatttctgcaaaatggtctgaccaaggcacggttgctggagaaactcaccacttcaacgcagacgatggccaggttaatcagcatgttggactggagtagtagacatcatcgtgcaactatcaggttatatgccgccaaggtcactgccgagcttgcaaagaacctccgagttgaaactgtccctgggacactgcagcttgtatctacgcttctggatgctgatggaaagccaaaaagaggacacccactcctggatgcagatgatgatcaagatcattttgttgatatagcagatagacaagataaaagacatgatatagctggtaaccaagggcagagacgagagccgattggggacaccaataacctgctggaaacaccaacccgatcaacacacatcaacgaccaaagatacatacctagaatttggcagaggatactggagtactggtcgattcccaaggagcagccattgacagacgatgatctcctccctgcactaggcatgtcaatcatttatagccttgctggctgtgatcaaaataattgtgtggaaatagacagagtaactgatctgatccccaatataattggattcacaagcttcagaagtgcaatggtaaattccgaagcacaacagaaggttctcttaaagtcatcgttgaaggtactgcagaggctcacaagcattgaaggggaaattggcataacactgcggtacaagatatcaaaacatcccttcttactgcgaaaccttgcagagatcttgcgagacaatagcagcaacaaacaagaactaaggaagctcgtggtaggaatcctcagaaaccttgccattgacagacacacaaggcaagagatgggacaaatgcaaatgctcattaccacgctgatcaaggcattcctcgattttaaaggattatttagttcagatgttgattgcttgctgccaaaggtcgccgggcaagcattggtaatgctgtcatcagaaaattcgcataactgctttgttatgttgaaggaaccagatttcattcataaactaaaaaatatgatcctaatccatggtgataaatacatatatgtggcagcgagtctattgcgtaatatgtgcctgtatgctcaacatgagctcacagaatcagaccaaaaggaactatctcacacattgcgagaggtgttggaaagaataatggacactgaaggggcagaactagaaatcctcattggccttagttcacagatatgcaaactcattcctgaagaattttcccaagagctagagcatggacagattaagcggagattcattaagaggctagtggacaccctgaatgcaaacatgaacccaagttctcattgccctgggatccggagggtggtacttgagcaatccatacacatgatggagtacaattctcgctatgccaattatttcaatgaataccagatgatggatgcactgtcgtttgtagaattgacaccctcaagggctgagaattacatggttttcttgggtgacgcaggtttcatggaatgtaacacacctctctctgccctagtggacagggcaaaagaactgatgggtcgtcagtggctgcaaggtatcagcagtgccaactgaaaaaaaaaataaaatgtttttgcatatacagtcagaagaccttgcatattgttagtgcagggcaaacaaagtgattctgcatttacagtcagaagacaacgcatgttgctagaaagaacatatatttacctttaagatgagcaaagggtattgtatctgtacatcatgaatcttgcactgtaatctgtgtgctattgatgatttatccaattatcatttgttgagtggcct

SEQ ID NO: 14501 - DNA, 2610 bp, Oryza sativa
  ref <308>: DATABASE ACCESSION NUMBER: AK065080
  ref <309>: DATABASE ENTRY DATE: 2001-12-06
gatattccccgtccactccgccaaaagcccctcttccgatcttcttcttcttcccccaaaaatctaattaaaatcccctcccccaaaaacccctctcacccgaatttcctcatggactcggtgccggccgccggagtcggcgtcggcggcggcggcgcgggcgcgggctacccggagtccacggagtcatccccacgcagccggggcggcgactcgtgggacgagcccttcccttcctccgccgcggcggcggccgcggctgccgggggagggaggctccgcctcatgtgcagcttcggcgggcggatcgtgccgcgccccacggacaagtcgctgtgctacctcggcggggagacccggatcgtggccgtcgagcggaacgcctcgctggccgacgtccacgcgcggctctcccgctcgctcctcggcggccagccgtttactctcaagtaccagctccccaacgaggacctcgactcgctcatctcggtctccaccgacgaggacctcgataacctcgtcgacgagtacgaccgcatcgccgccacctcctccggcggcggctcctcccgcacgtcgcggatccgcctcttcctcttcccggccaagcccgagtcatcctcctccctcggctccctcctcgacgactcctccaagtccgagtcatggttcgtcgacgccctcaacagcgccatctccggctccctcgacggcatcccgcgcgggatctccaccgactccgcctcagtcaactgcctcctcggcctcgaggacgactcctccacgcactcccgcggcggcccgcctaactcttctcccgccgaggaacagcgcgccaaccagcagaagctcgccgcggccgcggccgttgctgcggcgaggcacccgcacgacgtgcagtccgtgccggactcgccgatgattgacaagaactcctcgttcggatcaacgtcctctgcgccatcgctgtcgaatctaccgccgatacgggtgcggcccgaggatcgcccgccggatagccgactcgccccgcaggttcccgttgaggatcacttcgcccagatggggatctccgatcagccggtgcagcctgtaattgggggatacatgcagccgccgccacaggtgccgatccccaacatggctgtccccagcatctccccctcggatgcgtccagccgagtgttctccgacgatgacaagtccgatcacggcggcggcggaggtcggaagccgcagccacccaagccggaggttccacctgtcgctgaccccaccaacagagccatgtactacaacgatagatcgcctcctgctgaattgaagcgtgacatgccggttggaactgatgctgccagctatcgtgtgcctgtgccagcccaagatgctgctgccgccgccgccgctgcggctgctgctgcccagcaacccccagctgggtatgtgtatgcacagatgcatgcgccgccaccgcagcagcaacccccaccaccacagcagcaacagccagtcccacagcaatatgtcactgcacaaaatcagcatttcactcacaatccagctactggcacattcatcccaatccaatcctattaccaccatccggtccctcagcaagcaccacagccgcccatgccgcagcctgtgccacagccacaacaatcacacgctttcgacccaaatactggcatgtattacattcccatgcgcacgaatgcgcctcaggcatatagcatgcctcctggtgccgctgctgtgccgcctcccacccttgttgacactacaccaaaaccaaccgtgccaattcctcagatggccgtgaagcagcctgaactgcagcaacctggtttgtaccgaactaccgcagcacctacccctgtaccagcgtctaatgctcctgcgtatgctgggatgggctaccaccatgttattcaaacacaccatcatccagcgccacagcctgcagcgactgtggcaggcaattttggatatgactatggtgatcccacgcgagcacaggtcttctactcgcaggcagcggcaccaccaacattgccacctcagtatcagcccatgggctcgcccgatgctggccaggctgacctgaaacaggcccgggcttcatagctcaaggatttgtgaactctggtatgttgagaatcctagaagtgtagttatcctgccgttaattatcactattgttattacatgttacatgagtcagttggcaaccagtggatggatgatggcattaggcagctgtgcatttgggatcaaaataagatgaaaatgggatggtagttcttgtgttgggtgaaactcaagagggtgtttgtgattggttctggagatgccaatcgccaatgctggagcaagtggcggggagtggcttccaattccaattgccgtcttcttattttttaaaaaaataaatatatagtgtctaaagaactcggtacaaattctgaatcaagaactcatcatttgtgtagccctttgtatatttgaacctggaagttattgaggttgaaatgtcagataaaagtgtcattactttgcttgtagaaacttcatttgagttaaatatcatatatatacatcattcctgtc

SEQ ID NO: 14502 - DNA, 5172 bp, Oryza sativa
  ref <308>: DATABASE ACCESSION NUMBER: AK065081
  ref <309>: DATABASE ENTRY DATE: 2001-12-06
ggtaagatttcctcacactcccctcccctcccctcgcggcatctgctcgacggccggcgaccaccgctcgccgccggcgatggcgtcactcttactcgagcagcaggagaagctgcggcggcacgtcgacgagtggcggttccggtgccgcgcggccgtcgccgagatcgggccccgctccgcgtccacctcggtgtcctccgcctcggtcaggctccgggtggcccccaccgaccccggcgtcggtgtgggcgccgcgtccctcttgaccgccgcggcggcggccgaggacaacgtcgacgtctccaagttcgttgccgtgctctcccactcgtgccttgagatatcccgcctctctgatgctgcgtcaagtaatctctatcggcaactgctcctctttgggcacactgcagagggaccaaatgaggcacttctggagggggagccacaaaagacatttgcacactcaattccattgttacttgaggtgtatgaaatcatcaatgggctggtgatgatccttgggaacctgctccggcagctggacgcaatctgctcagtccgtgacaagaatgtgcgtccattgaactcatttaagggtttagatttgacaaccgtatttggatcacttggcgaggggcttatggtgttccttttggtagatgaaattttgaggcacaatggcaataccaggagttacctatctctattctcaaggatgctggacaaggtgaaatctgaggtcgatgtatttagtatgtcattcgaggatgtagatttccttgatcaagttgtacacaacttacagaaactttttgacattggcttcttccaacggttggtgcaagaagattcacctttgtgctcttcaataaccctcgttagatctaataagaaactgttagacacattttattctttcttctctgagagcagttctgagatcattcaacgcatcggttctttgaaggaactccccattgatcgaaggactatactccatcttctaggcctttttttgttcttcacaacgacaactggtgaagctcctgataagaaatcaatgaacctgttagtggagatatttcagttggttccagtggtctatgttgaaggtggaaagcgtattgtgctatctgacttaattaggtttcattgctctccatcactttctttgttgccacccattaaggaagcttgtgaagcttttggtatcatgaagaatagctatctggcacggttaaatgaaatgcattcaagggatattcaagccataaatgattcgttatcatgctggtctgtttcattccagtcagccattcatccatcgtcgcagatgctgactgaagagtgggttcgacatctccagaaacaaattttgcagggagtagtgcttgcagatagaatacatatgcttgtcctatcaatgcttgacttgcatatgcatcttgaggttccactgagaagggagaaagccaagtctctttgccaaatgattgtgtcattgaaggccataggagacttgttccacatgaaagggtctagcttagtgcgcagtcttcctcacataatcaacatcattcaatctgatattgaacaactcataatatcattgaagactaaattacaaaatgaaatagccaaggggagtcaggcagtcaagacaggatttcttagttcattgatacgtggtggtacagacacggagacaaggcttattgattcactttcgttggttctgatgtccttgcaattgcttgaaggaggtgggagttctcagaggcaactgacactttctattacaatggatattctgcacagtctgggttacttggatattgagttggttggtgtgagaaagcttatatcgaagttcagcattctttcgaatttctggtctctgattgatgaaaggacgaactgcagctttttgtattggagaaaagagatgcttgtgacttggttatcaatggtatatggagatgcctgcaaattatcttggctacagaacatcattgatgcattttctgatggaatgtcacttcttacacttgggaatgtgggaactgttactcttcagcactatgaggaagaaattgagaatgctctgcgaaaggaggttgttgccccactgtgtagagatattgagacagacctccgactccatgttcattccactcacttaaaaggatcagtctttgtgaacccaacaaagactggggttcgtaatctttcgtggtacttaagaatgaagcccttgagactaccttccaagtttgttgatattaaatttcttgtggagaaccatctaaattctgcgttctatacttactcagtgatgtctaactatgacaacagggtacgcagttatgcaccatacttttcatgtatagataagaactgtatgaaacttaaatatatttccaaatactttcttatgactggtgttgagtatattctagatgtatgcagagatgcatcaactaggagagctgaaatatggtgttgaactggaagatttccatcttactgtggataccgcggatcaagattttgatctaaaacaatccatggaaaatcttgattcatttagtgaggcatattcctacaacattgtcaagcagatgtttattgagaatgatctgggtggccaaggccgaaaaaacttgagagttttatgtgtggatcatattgcatcttcagctgccatgtgcaatttacagcgaatttctgcatatatagattccatttttgttttcttaaaccggatgtttgtagatcttcatgctttgcttcaaagcaacattgaaattgatttattaagggatttcaaacaatcagaggtaatatttactaccactgttccaaattattcgcaacgtgttactcgtagtttacagggtaaaacatactatttctgtcactgaagttgtcacagtttgtccttaggcacttcatcctgttcagaacacatgcatgtgtttttcataagcactatttaagctaccaaatttaatcaactcttgtagctttacaacagaacactggagtgtccgatgcccatcctgctacccaaggagacatgaaatttgccctaggaaagcttgggcttggagaccatgctctagacttgcttgaacaagtacaagctgctgttactagaataggtagcgtactaggtctcatgatggtacttacggctggccgcacccgttatttgaacaacatgtcacgatatgtgagaaaacccaaatttgacttgagatacacgacaagttgcaagctgctggggtgggatgatgacattgttgaaattagtaaagttttggacatgggcacaagaaacaatgatccatcagacgatagaattcagccattttcaatattagcaaccaacttttcaaaggtactatctttagttctttagtatattctacctccatgccaattgaaaatatgatattccagttaacaagcaaattttaccgcattagttgtgacgcattctgtctgtggttatatttgtttggacaatgttttggaacagttatacaagggaataactccaaactttcatatgatttttcctgtggtttggtatttgcatcattcacctgtaacattgtttctttttctttttcttttttttttgacgtaagaaggtagagctggctctaccttatagtcatttcattgatagaaatgaagtttacagggtttttttaaaagattacaaggttatagaaagaaagaaacaagagagaagagagacagagagaaggagagggatgggggtggatttacaagaggtatatacatgagactgttccttagggaagcctcgaacaccaggagcgaattttctgcctggctatcacgttggctctgagactccaaagctctagggtgtcggagatctgtttctcaacgactagggaactgatgttccatcttttaccctgtacacttgaaatctggacaagttccattatgtgtagtgtgcacttttgtactgttaaaagcatggttactagttcaggtcaatgctagtagtggatgcaagaattccaagttcagggtgatgcttgctgttatgtcgtatttgcaatcagcggttatggccagagtgctagctggtatttggtagtccatggagcatagcagccgaaggctcacttgggtagtcagtggttgaagtgaaaacgagaaaatattgaagaagtgagaagccattttgagtttaagtgaaccgtgcactcatgcagcccaccaaatctaaatcgtgtacttgtaatccgatggataagatccgctcgcacctagttgcttcctaaggtccactgcgtaggataccaaccgaagatttgttatttctttatcactgacagcatacttttcttgtatgcttgtagaagctccagagcaataaacttcacgaaatgaaggatttctttcaaattgttccatccgtaattgcccacatgatggaatgtagacttcttctcaaggataaattattaagacgggggcatgaagacaagagatacacacatacttacgatggtttcctacttggagttgcttttgtcctcaaggtaacattgttcagatgcagttttcatttccttccagtttattttacaggaacatctatgaacatgttcttgttgtcggtattaccctgctggtaatttattcagtttctgatacaaggcttcttccctctgcacacaagttcttgctcccagattaacgtatatgaacgttctatcttgcttctgttaatcatttccaatgtgatggcactaaggttttggagcaagataactcatttgatgaactcaattggttcgcttccacaaaagcaaaattggaaggagaggcaaaggacagggacgacaagaaaaccgatagaaacacgagcggagctagctttgtcagtctgaaactctggcgctcaagtccacctgttaggacagagcagcaaaagggtggtgttgacaaggggacgcgctacatgcaggaaattgagcttatagaatgtctattcaggcttgctagaacagtattgagatgaaattacctgatggcacaacacttctattttgttgcctaatgtactttgcataggtcgttgagtattttttgcatgaaacctaacaaagaattcag

SEQ ID NO: 14503 - DNA, 1020 bp, Oryza sativa
  ref <308>: DATABASE ACCESSION NUMBER: AK065082
  ref <309>: DATABASE ENTRY DATE: 2001-12-06
gactgtgctcatggcttcctcttcctcctcccttggccttggcgccatcttccaaagcggctgccccctcctcccgcctcgccccgccgtccgccgcgcgcccaccaggcgccgcgccgtcgccaccaagatctcctgcatcggatgggaccccgagggcgtcctcggcccgccgcagggcggccacatcgtgcgcctcgagttccgccgccgcctcgagagggactccgacgcccgcgaggccttcgagcgccaggtccgcgaggagcacgagcgacgccgccaggagcgcgaggcgcgggtcatccctgacacggacgccggcctcgtcgagttcttcctcgacacggaggcgcgcgagatcgaggtagagatcggcaggctccgccccaggctcaaccagcccttcttcgactacatccagcgcgagatcgcccagatcaagttctcaatcacccgaacagcggaaatggaggaccgattgatcgagttggaagcgatgcaaaaggttctgcttgagggagtggaggcctatgacaagttgcaaaatgaccttgtcagcgcgaaggaacgcctcacaaagatcctgcaatcaagcgacaaaaaatcgacacttcttgaaatggttgaacggaatgagctcaacatgtccatactaacactcctcgatgaaaatatagcaagcgccaagaccaacaatcaggaagaagctgtggctttcatggagaatgttcgctcatccatcctgaaatatattacagtatgaaattggtaggcatgtggacttagccctgtcacatggttatcaaaattaggtcatgaacctgtaatttgcaaggacatgtcacatattcaagggtctgattatgtttctctcttgtatttagttattgtgttccatatatgctcatgtcagtgtcaatagttttttggtaaagagaaattgtacaatcatatacttgtaccaccaacatatacttgaaccagtttcctggttggacagctagttttacctgttgc

SEQ ID NO: 14504 - DNA, 1817 bp, Oryza sativa
  ref <308>: DATABASE ACCESSION NUMBER: AK065083
  ref <309>: DATABASE ENTRY DATE: 2001-12-06
ggcctagagagatctgagctctggtcagccgagccaagcctgccggtcgccggaggaggcaacgacgaccatgatggcgccgtccttgtccaccgccgtctcctctcttctcctcctcctcctcctagccgctgctatctccgtctcctcctcaccgccgatgccggaggacagcatccgggtcatctccgccgagaaaaggatcgacctcaccagccccatagtcaaagttttcctcacactaaagctcgagaatgatgccactgcccctgaagcatctcaagttctactcgcattcacacccacagaggttgaacatcttgcgattgtcaaggcgaccagagcggaggggaagcgcaagaagaagatatatgtgcctctctctgtgaaagcctctgatcttgctgccgctccaaatggtgctcgcctgtactccattttgctgagcactccattgaaacctgctgaggtgacgacgctggaagtattttatgctttgacacactctttggagcccttcccagcagagatcacccagtcagatccccagctggtttactaccgtgacagtgctgtgcttctatctccgtaccatgttctggagcaggttacctacatcaaaatgccgagcaatagggtggagtcctttacaagggtggaccccaccagtcgagctggtaatgaagtgaaatacggcgcatacaacaaccagcttccaaactcgtatgtgcccatacttgtgcattatgaaaataatcgtccgtttgctgttgttgaggaatttgtgcgcaaggtggagatttctcattgggggaatgtccaaatcactgagcagtataagctgaaacatggtggtgctcagcacaaaggagtcttttcaaggcttgagtatcaatccaggccttctataagtggagtgtcatcatttaagaatcttcttgcaaggttgcctcctcgagttcattcagtatactatcgtgatgagatcggcaacatatcttcatcccatttgcgtagtgattcgcacaagtcagaacttgaaattgagcccagatatccattatttggtggttggcactgcacgttcaccattggctatggtttgccattgcaagattttctctttgaatcagatgatggtcgacgctacataaatcttacttttggatgccctctgttggatacggtggtagatgatcttaccatcaaagtcgtgcttcctgagggatcgacaagtccacaagctgtagttcctttcctgatggaacaatatcttgagactagttattcataccttgatgttgttggaaggacgacagttgtactaaagaagagaaacgtagttggagagcacaatgttcctttccaggtgtattacgaattcaatccgatcttcatgctcgcagaaccgttgatgctgatatcagccgtgttcctgttctttgtagcctgcattgcttatcttcacatggatctttccattgggaaatcataggctccttgaaatatttagaggcgctctccgcacttgcccttctaattatcacagttgaatcaaggctgccttttgtgttagtttgtacggttcccgtgggggagaagatggtctttttgtagaacgttgtcgttgtaggaatgggatgatgaggatgactttatataagtatccatacttgattgatctgctcacttaactacgttacgtaccgctttgttcctaactgtggtattagctgttgcactcacataagtgctcacttttgtggagagggagacttgaagaattgcgccagaatcattgtggcctttttttttgc

SEQ ID NO: 14505 - DNA, 1013 bp, Oryza sativa
  ref <308>: DATABASE ACCESSION NUMBER: AK098889
  ref <309>: DATABASE ENTRY DATE: 2002-08-28
gatttcgaattctagggttttgttggcccccattcctcccccaccccggtgtcctcccctccgccgctcgcgtcgccgcctttttcccctatggcgctgccgaatcaggggaccgtggattaccccagcttcaagctggtcatcgtcggcgatggcgggactggtaaaactacatttgtgaagaggcatctcactggagagtttgaaaagaaatatgagccaaccattggtgtcgaagttcaccctctagattttaccaccaactgtggtaagatccgcttctactgctgggacactgctggacaagagaagtttggtggacttagggatggatactatatccatggtcaatgtgcgataattatgtttgatgtcacttcaaggctgacttacaagaatgttccaacatggcatagggacttgtgcagggtgtgtgaaaacatccccattgtcctgtgtggtaacaaggttgatgtgaagaacaggcaggttaaagccaagcaggtcacattccacaggaagaagaatctccagtactatgaaatttctgccaagagcaactacaactttgagaagcccttcctttatcttgcaaggaagcttgctggtgacccgaacctgcatttcgttgaagctgttgctcttaaacctccggaagttcccattgacctggcaatgcagcaacagcatgaggctgagcttgcggctgcagcagcacaacctctcccagatgacgatgacgatctgatcgagtagagaggatcatgagtctatcatgcttcagcctgagtctcttcataagagtctgaattaggccaatgcatgctagtgttagcttgtctgtggaatgtggacgtttcctgcgtgcctgatgggttgaaaacttttgatgtgtggtgttacatgttgctgccatgaatttgttggctcttttttaacactgctgtgttacttctatggttatgcttaaactatttgtatcatcgagctggtatttatttatccggtgttgc

SEQ ID NO: 14506 - DNA, 4012 bp, Oryza sativa
  ref <308>: DATABASE ACCESSION NUMBER: AK065084
  ref <309>: DATABASE ENTRY DATE: 2001-12-06
ggttttttttttcgttttcttttttcttcctcgctttctctctctctctctcctcctctccctcttcttcttcttctctgccaaatcccatcgcgaaggcgagagagagagagagagaagaaaaagtgaggggattaacaaactcgcgagtttttcttttttttttttgtttattgtgtgaatttggcccacgtcggcggcggcggcggaggagctaaaccctagccggaggtgaggtggtggtggtggtggtcgggaagtggcggcgccggtggtggggcgggggggcgatttggcgcgcgcggccgagctccggatcgccggatttgtgcgtgagcgcgtggagtttgtggcggtgtgctcgtgttgctgttggtggtgaggtgtgaggtgaggtggggtggtgtggcttctgctgctgctgctactgctgctgctggtgcttaattttgctcgggttcgtggggttgggaagcgagggatgcgatctgggaggtgttcgggagctcggtgttgcttaattccggtgctggtttgcggtggtgcgcgcgcggcttcttctcggggtggatttggtggtggttttttttgttgccctcgttgttgcgggtggatttcggggggagggagagtttgagggatgactgctcgttcttgctcaattccggtggatcttacggtggaaggatggcgagctgagtaaaggcgcgcgatatcttgctgcggtttgtgcggagcttcggagcactttgtcattgctggcaaggatgatgccgtcggggccgctcaacccgatgggtcccgggcagccggtgggcgccgccgcctcgctgctccggacgagctcaagcctgcttagtggtggtcagcaggggatgggcagtggcggaggcatgattccttcgcagtcgcccttctcatcccttgtgtcgccgcgcacgcagtttggtgctaatggcctgctgggaggtggctccaatgtttcctccctgctcaaccggccgtttgggaatggtggacatatgctcggtccggggttgatgccaggtggtggtgggattccaatgaataccctccagcagcagagaggagggcttgatggtgctggcgatttggttggcgtgggaggttctgatcctctctcgtttccttcatcgtcgcaagttagtttgggcaatcagctgggttcagataatctgcatcaaccaccgcaacatcagcaacaacaacagcagctggatgctatgcacgacttgcagcagcagcagcatcatcagcaactgccgatgtcttacaaccaacaacatttgccaccgcaaccaccacagcagccacaggctacagtgaagttggagaatggtggcagcacaggtggggtcaaattggaaccgcagatggggcagcctgaccagaacagctcagcccagatgatgcgccatgctagcaatgttaaaattgagcctcagcagttgcaagctctaagaagtttgagtgcggtgaagatggagcagccgacttcagacccatcagcattcctgcaacagcaacagcagcagcaacatttgctgcagctgacaaagcagaaccctcaagctgctgcggctgctcaactgaaccttttgcaacagcaacggatattgcaaatgcagcagcaacagcagcaacaacaacaacagattctaaagaatctgcctttgcagagaaaccaattacaacagcagcagctacttcgccaacagagtctaaacatgagaactccaggaaagtcggccccttatgagcccggaacctgcgcaaagagattgacccattacatgtatcatcaacagaacaggccacaggataacaatattgagtactggagaaattttgtcaatgagtatttttctccaaatgctaaaaagaggtggtgtgtatctctctatggaagtggtcgccaaactactggagttttccctcaggatgtatggcattgtgagatatgcaatcggaagcctgggcgaggctttgagaccacagttgaggtgttaccacggttgtgccaaatcaaatatgccagtggtacattggaagaattactatatgtggacatgccacgtgaatcgcagaatgcctctggccagattgttttggactataccaaagctgtccaggaaagtgtattcgagcaattgcgtgtggtacgcgaaggacatctaaggatagtttttaatccagatctcaagatcgcgtcttgggagttttgtgctaggcgacacgaggaacttattccacggagatcaataataccacaggttagtcaactgggcgcagttgtgcaaaaataccaaagcgctgttcaaaattcgacaaatctgtcaactcaagacatgcagaataattgcaactcgtttgttgcatgtgcccgccaattggctaaagcactggaggtgccattggttaatgatctgggatacacaaaacgatatgtgcgctgccttcagattgcagaggtggtaaactgtatgaaagatttaattgattacagcagacaaaatggatctggaccaattgctagtttgcatagctttcctcggaggacttcatcaggggtcagccctcaccagtcacagcagcaacagcctgaagagcagcaatctataccgcagagttcaaaccaaagcggtcaaaatgctgctcccatgaccggtgtgcaggcttctgcctctgcaaatgcagatgtgacatcaaataattctctcagctgtgcaccctcaacgtctgcaccttcaccatccgttgttgggctcctccaaggttcaatgaactctagacaagatcatccaatgagcagtgctaatggtccatataccagtggaaacagtgctgcaattcccaaggtgaactcgacaacctcactgcagtcaaatccatctacctcttttccttcacccatgccaacaacatccaataacaacatgatgcctgcccctcagagcacaaaccaactcagctccccaaccacatcatcaaacctaccgccaatgcagccacctgctactcggcctcaggagcctgagccaaatgagtcccaaagctcggttcagagaatattgcaagatttgatgatgtcaccgcagatgaatggtattggccagcttgggaatgacatgaaaagaccgaacggacttacatctagtgttaacggagttaattgtttagttggtaatgctgttacaaataactcaggaatgggaggaatggggtttggggccatgggtgggctaggtccaaatcatgcagctagtggattgagaactgcaatggtgaacaatgcgatggcaatcagtggtaggatgggaatgaatcacagtgcacatgacctatcacagttgggccaactacagcagcaacagcaacatcaacagcagcagcagcagcagcaacatgacttaggaaaccaactgttgaatggacttagagcagcaaacagcttcaataaccttcagtatgactggaaaccatctcaataaagatagaacattacaagttcgacaacacggctgctctcattggcctcattgcttatgaagcatcagtaagagtgccaacacctcgaactgtgtcaaagcatttggcctttgcaataatgctgtcatggaaaaaggtcattcgcgacagcaagcatctgagcctgtcaactgtatgttgtaattgttcgtttagctgcttgtgtgttgtgcaactatggcattttgctgcttgcttcagttgtcttaccgaaagatagagttaaaaggattagagccttgcctgcacctgttgctatcccttgatggtacggtgttacttcttacccggaaaagaagttttacctccctttttttccatgtcagatgacatccgatatgtaatttatcgtcccctccaccttccgcccttagcaagcatatgttctgatatctttctttgcctggggattctctctttgtagccttacttgactttgtataagctgccataatttagtagt

SEQ ID NO: 14507 - DNA, 1159 bp, Oryza sativa
  ref <308>: DATABASE ACCESSION NUMBER: AK065085
  ref <309>: DATABASE ENTRY DATE: 2001-12-06
ccccccccctctcttctctctttttctcccctctccccggggaaacgcggcggccgccgatcccgatcccccccaccgccgccgccgcccgatccgaccaaatccccactacgcgtcccaattccgggccaattcgaccccccgagcgaccgccatctactcacctcccgatcgattcggatccccaatctagcgggcgcggggcggggcggggaggcgggattgggctagggttttgtgggggattggtgtattggattaggtgatggcggagaagggatgcctcaagcgcctccagaaggagtaccactcgctctgcaaggagccgccgccgcagatcgtggctcgcccgctgcccaacgacatattggagtggcattttgtacttgaaggtagtgctggcacaccatttgaaggtggatattattacgggaaactcaaatttccacctgattacccttttaagcctccaagcatcagcatgacaactcctagcggaaggtttgcccctcacaaaagaatatgcctatcaatgagtgactttcatccggaatcttggaatcctatgtggtctgtggcaagcattctcacgggcctcctttcattcatgatggatgatgctctgacaactggaagcatcaggagtacagagggggaaaagagacgtttagcaaaggcttcccttgcctacaactgtgagagcaaaaattgccctcacttcaggaaaatgtttccagagtacgtcgagaaatacaaccaacagaaacagatggagcaaaccgtagcggaaccagaaactcaagagaaccctgccccagctccatctcctgcggtccaacaacaggctgcagtagtagccaataaggcgaaacctgcggcggaggccgcaggcgagcagaagcagaagaagcgagtgcccttctggatgatgctggttatgttttctgtttttggtgcggtgatggccttgcccctgatgcaactctgacaaataaaataaaaagaggctataaaagtgtgataccggggggtaatttttgtatagttttcccaaggtttgcgtaactcgattcttctgtggactctcttcactttggtgatggtaaaatctgtagaaccatatcctctctttacagaatctacagaacagctttgtttg

SEQ ID NO: 14508 - DNA, 2611 bp, Oryza sativa
  ref <308>: DATABASE ACCESSION NUMBER: AK065086
  ref <309>: DATABASE ENTRY DATE: 2001-12-06
gactagcaagctcagagctcagagctcacgactccagagagcggaggcaatggggacgtcggggtcgaaggggatcgacggcgtcgggggagtcggcggcggggcggcggggttggggggaggggaagcgggcgacggcggcggcggggtgggcggcgcggcgtcccggtcgtggcacggcggggcgcagctgtacgtgtcgctcaagatggagaacgcgcggatcaccggcgacctcgtcccgcacgtctacggctccgagcccatcatcggatcctgggaccccgcccgcgccctcgcgatggagagggagctggcgtccatgtgggcgctcagcttcgtcgtgccgcctgaccacgaaacactcgacttcaaattcttgctcaagcccaaggatgcagacaccccgtgcatcattgaggaaggtccgacccggcatctcactggaggcatgctcgagggcgatgtgaggattgcatggttcaagatgaatggggatcatgagacgcttgagttcagggttttcaataaggcagacattgtgtccccacttgatcttgcagcgagttggagggtgttcaaggagaattttcagccttccaaagtccggggaatccctgatgtcagtataaatgtcgcacctgcgcatgggaccgaggatacatctactgaaagtttggagcttgacttggagcattacgttattccaacaccatctgcagcaacatctgaatatgcagcaaaccttgccgcaaacccagcatcattgattcaaactggagctttatggacaaatgacatgcttctcagtgatggcatccagagtccaagtagcgccactgcagattttgaagatcacaataactgtaacaatgataatgtggccttgccatcagattctttcaagaagttacaagtttctggaattgtagagtcaaaatcagttgacaccttaacaacactgcaaaagcaagatggacaaaagggactttttgtagacaggggtgttggctctactaagtttggaaaatcatcaagtgcatgttccctggcttctggtcttaattttggaacaggaaaggccatgccagaagcagcaggagctgttgcagctgcagctgtagctgaccgattgcatgggtcaaaggaggaccgaaaactagctattgttttggttggcctaccagctcgtggtaaaacttttaccgcagctaagcttacaaggtaccttcgttggttaggtcatgaaaccagacatttcaatgttggaaagtaccgccgcctgaagcatggagcaaatcagtctgcagattttttccgtgatgataaccctgaagggattgaggcacgcaatgaggtggctgctttagctatggaggacatgatagattggatgcatgggggaggacaggtcggtatatttgatgcgacaaacagcacaagaaaacgaaggtatatgctaatgaaaatggctgaagggaactgtaagattatatttctggaaactatctgtaacgatccgaatataattgaaaggaatgtacgtctgaagatacagcaaagtcctgactatgctgaccagccagattatgaaactggagtgcgggacttcaaggaacgcctggcaaactatgaaaaggtgtatgagccagtgcaggaaggttcttacattaaaatgattgatatggtaaaagggcagggaggccagttacaggtcaacaatatcagtggttatctccctggaaggattgtctttttcttggtgaactctcatcttacacctcgacctattttgcttacaaggcatggtgagagtttacacaatgtcagaggaagagttggtggtgacacggtcctgagtgaagatggagagctttactcgaagaaattagccaacttcatagaaaagaggctcaaatctgagaaaactgcatctatatggaccagcacgcttcagaggacaattttgacagcaagtccaatagttggattcccaaagatacaatggcgtgctcttgatgagataaactctggggtgtgtgatgggatgacgtatgaagagataaagaaagttatgcccgaggaatttgaatcacgcaagaaggacaaattaagatatcgatacccccgtggagaatcttaccttgatgtgattcagagactggaacctgttatcattgagctagaacgccagcgagcaccagtagtcgttatttcccaccaggctgtattgcgggcgctatatgcatatttcgctgacaggcctctgagggaagtcccagatattgagatgcctctccacaccataattgagatacaaatgggagtcacaggtgttgaggagaagaggtacaagctcatggactgaatatacatacatctaggctcagtaggacagcaagtctttgctgttttcagatagtcatacagtaacacagatatacgatcgagtcactacaggtctacagctaccacattgtcatttttctcccgacggtgcaaaaacaaaaactagcacctccggtgtaaaactgtaacccactatacccatgaatcactgtaaaaagaagcattcacccaatcagtagttaaaaaaaaaaaactgtaaaat

SEQ ID NO: 14509 - DNA, 1677 bp, Oryza sativa
  ref <308>: DATABASE ACCESSION NUMBER: AK065087
  ref <309>: DATABASE ENTRY DATE: 2001-12-06
gggtctctcccccaaattccaattccaatttcatcatcttcttcgtctacctccagctcgcctcgcttcccccaccaattgcttacgtacgactactcctccacgccccaaatccaaaattccccaatccgatctctcgcctaccaccaagctcatctcgtttcgttagctacctaccaaattaataagggtagctacagacagcgtagcggacgaggaatccaaatcaaatccaatcctcaatcgaagaaatggagtgcgagccggaggagctgcaattcctgggcatggtgggtatctacagggaggcggcgtccatcctgcgcgcccaccggccgctcttcgcccgcatcgccgccgccttcgtcctcccgctctccctcctcttcctcctccacatcgccatctcccacgccctcttctcccacatcgactccgacgactccgccctcgactccgccgccccgggcacccccgcccagcgccgcctcctccaccgcctcgccgacgactggctcgccctcctcctcttcaaggccgcctacctcctcgccctcctcctcttctccctcctctccaccgccgccgccgtcttctccgtcgcctccgtctactccgccaagcacgacgccctctccttccccagggtcctctccgtcgtcccccgcgtctggcgccgcctcgccgccaccttcctcgccgccttcctcctcctcttcgcctaccacctcctcttcgtcgccgtcttcgtcgccctcctcgtcgccgccgactccggatcgggcctcgccgcgctgctcgccttcctcctcgccctcgcctacatcgcgggcctcgtctacctcagcgtcgtctggcacctcgccagcgtcgtctccgtcctcgaggactacaagggattcgaggccatgcgcaagagcaaggcgctcatacagggcaagctctggaccgcctccgccatcttcttcgtcctcaacgtcgtcttcatcgtcgtcgaggtcgccttccgggcgtgggtggtgcgcggggccacccacggcctcggcgccggctcaaggctcctcctgggcctcgccatgctcgccgcgctctgcgctgtcgtgatgctggcgctcgtggtgcagacggtggtgtacctggtgtgcaagagctaccaccacgagagcatcgacaagagcaacctctccgaccacctcgaggtctacctcggcgagtacgtcccgctcaaggccagcgacgtccagatggagcaattcaacctctgatcatcaaccctccgctccatccgatccgatcgctgtgagttgcgcttggattatatctctgtaatcatcatatttttattctcatcaacacagatactcataccacaaaaacacagtttgggatggctcaaaatcaggctggatctcaattgggagaataacctgtcagctgtatttgtaccagtagacattagaggttgtgtattgcattttctgttttgatcgaattcaatcccaaaaagcaacaacaaagtatactagtgcaaattagaacaacaaaggctagctacgttgattcaacggtttcttagctgtgaaaacatgatcatgcattcatgctaagctttggataattcagtgcgctcctgtattactagtacactactatcatttgaaggttaaaaaaaaaatc

SEQ ID NO: 14510 - DNA, 3446 bp, Oryza sativa
  ref <308>: DATABASE ACCESSION NUMBER: AK065088
  ref <309>: DATABASE ENTRY DATE: 2001-12-06
tgacggtagcaatgcacagcggcgtcaatggctgctgcccgcttcggctccccgccgccgccgctgtccacggccgccggatcccgccgctgctgcccccacggggggcgtggccgggttgtatcgccgcgccggcgctgcacaggaagcccggccgcggcggcggcggcgcgctctccagctgcaggcgagcatcgcatcatgagaagttacaggttgctgcactgccatccaaagctacactcgagtttgaacatggtgtctcacttcgaagtgcatatattgttcctgaagatgttcaagctgcagggttccagattgatgctgatgaactagcatctattgttgaaagtcgcgacactaaaaagttgactgtgcatggccaattaaatgggatcgcagacaaattaggaacatcattaaccaatggtatagttacagacaaggacctcttgaatcaaaggcaggacatatatggagtaaataagtttgctgagaccgagattcgcagcttttgggagtttgtatgggaagcactggaagacacaacccttataattcttagtgcgtgtgctattttctctttggttgttggcataaccacagaaggatggccacaaggagcccatgatggcgttggcattgttgcaagtatcctccttgttgtttctgttaccggaacaagtaactatcagcagtccttgcaattcagggaccttgacaaggagaaaaggaaaattcttgttcaagtcacaaggaatggcttgagacaaagagtactgatagatgaccttcttcctggtgatgctgtccatcttgctgttggagatcaggttcctgcagatggcctatttatttctgggttttctgtgttggtcgatgagtctagtctaactggggagagtgaacctgtttttgtaaacgaagataacccttatcttttatcagggacgaaagtgcttgatgggtcctgcaaaatgctggttacagcagttgggatgagaacacaatggggcaaattaatggctgttcttactgatggtggggatgatgaaactccacttcaaaccagacttaatggagttgcgaatactattgggaaaattggtctattttttgctgtattgactttcattgtcctctcacaagggataattggccagaaataccttgacgggcttcttttgagttggtccggagatgatgtgctagagatattggatcattttgctgttgcagttacaattgttgttgttgctgtacctgagggattgccattggcagtcactttgagccttgcatttgcaatgaagaaaatgatgaatgacaaggcacttgttcgacagttggctgcctgtgaaaccatgggctctgccacagtcatttgcagtgacaagacaggaacactgacaacaaaccgcatgactgttgtaaaagcctgcatctgtgggaataccatacaagttaacaatccacagactccaaacatgtcttccaatttcccagaagttgctgtagaaactcttctggagtccatatttaacaacaccagtggcgaagtggtgactaaccaagatgggaagtatcaaatactaggcacccctactgagacagctttgttggagtttgcactgttgctagacggagattgcaaagaaaagcaactgggaagtaagattgttaaagtggaaccttttaattcaaccaaaaagaggatgagtaccattcttgagcttcctggtggaggatatcgtgcacattgtaaaggtgcttcagaaatagtattggctgcatgtgataagtttattgatgaaagaggttgtattgtcccccttgatgataaaacttccagtaagctcaatgatataatcaaagccttttctagtgaagcgctcagaacactttgccttgcttatagggaaatggaagaagggttttctactcaagagcaaataccgttacaaggatacacttgcatcggcattgttggtattaaagatcctgttcgtccaggtgtcaggcagtctgtggcaacttgccggtcagctggcatttcagtgagaatgattacaggagacaatattgatacagcaaaagcaattgctcgggaatgtggcatacttaccaaggatggcattgcaattgagggtgctgagtttagagagaaaagtgctgaagaactccatgatttgattccaaaaatgcaggtactagcccgttcttccccacttgataagcatacacttgtgaagcacttgcccaccgcattcaatgaagttgttgctgtgactggtgatggcactaatgatgcacctgcgctgcgtgaggcagatattggacttgccatgggcattgcagggactgaggtggcaaaagagagtgctgatgttgtaattctggatgacaacttctccacgattgttactgttgccaaatggggacgctctgtttatgtgaacatccaaaaatttgtgcagttccagcttactgttaatgttgttgcattactagttaacttcacttctgcatgtttcacaggggatgctccacttacagctgtacaacttctttgggtcaacatgatcatggataccctaggggcgcttgcactagccaccgaaccacctaacaataacttgatgaagaaagcaccggtaggaaggaaagggaagttcatcacaaatgtgatgtggaggaacattgtggggcagtcgttataccaattcgctgtcatgtggtatctacaaactcaagggaaacacttgtttgggctggaaggctaccatgctgatattgtactaaatacaatcatattcaacacttttgtcttctgccaggtgttcaatgaaataagctcaagagagatggaggacatcaacgttctgaggggcatggcagggaactccattttccttggtgtcctcaccggcaccatcttcttccagttcatcctagtccagttcctgggcgatttcgctaacaccacacctctgacccagcaacagtggctcatcagcatactcttcggcttccttgggatgcccattgctgctgccatcaagttgattgctgtagaacctcatgaaaaagccgatacacgtagaacgccgtaaaccacacacaccaggataagacattcaatcaattttgtgcaccaataatccaagtatacctccactctatgatcaaagattggcagcattttgcgaagaaaatttgatgcaatggagttcctgttgggtttggccaatctaaccagccacgaaactgatgagataagagagccaattagtggttctgggaatatgtagaagtgattttttttgaggtattattttgtacacgctgatctagtattatgaaaatgtaaagccaactggcatagttgcgtagagtgtaaacagatgagattgtacataaatacaagactgacatttgatgatagc

SEQ ID NO: 14511 - DNA, 913 bp, Oryza sativa
  ref <308>: DATABASE ACCESSION NUMBER: AK065089
  ref <309>: DATABASE ENTRY DATE: 2001-12-06
tcgtctccgccgccaagcatgccgagggagcatcatgcgtcttgtgccatagacggcaacagcggcgagcaggcctcgactcgcttgagctacaagcaggcggcaggggaggaggcaatgagcagcagctgaggaaccttcgagctggcgctaggtatgtgaatggtcgctctactgggaggaaggtcatggacttctataagatgattgatttgtatggacatgtgagttgttttggaaatctgacatagtttcagcggatttggccgctgctgacgatagccaccaacagctcgggttctctctgctatcgatgcttcttactatttgaccagtgcttctgtttacagatttgttggtctacatattagtaaattcagatgagctgatgaatcagggaattcagtttcaggtataaaaacgacttggacttctatttcatggagtcatggttaacatcaatattccttattcccaaatttgaggacttcatgggcatcctacgagttcctacaccggatattaactacatcattcagattccacagaggagctgcattcctggttctgctgtaactgagggttgatctgcctgatgttgatggagctactgcctgacgttgatgtgctgttcagctgttgctgttatgaagtgggaagctctattaccaaatgatacctttcttattgttgcctcctctgatggcgtatttgagaaagtgactatgcaggatgtctgtgatctgatgttgtacgtgaaacttggtgttaagcaagaattaggatcctttgcattaacacaacagaatttggcagattatgttgttgatctttctttatagatagggacaacagacaatgtagaagctgtgattgttctattgggatctcagtatagctttaaagttacact

SEQ ID NO: 14512 - DNA, 1333 bp, Oryza sativa
  ref <308>: DATABASE ACCESSION NUMBER: AK065090
  ref <309>: DATABASE ENTRY DATE: 2001-12-06
gatgtgcaaagcggagtgaggagagtagtccacaactccggccggccactacgactctacgagtacgtacactgcaaattaaagctcaagatggccgcaacagcgggcaggaccgcgggcgcattggccgtcctgcagctcgcctccatcgtcgccgctgccgtcctcctctcctccccacctgcggctgctgctgagccgtctgtggacttcattgacgtggtggcgtgctcgcagtcgcaggtggactccatcgtgcgctcagccgtgcaggcggcgctccagcgtgagatcgccctcgccgccggcctcatccgtatcttcttccacgactgcttcccgcagggctgtgacgcgtcggtttacttgagtggcgccaactcggagcaggggatgccgcccaacgccaactcgctgcagccgcgggcgctgcagctggtggaggacatccgcgccaaggtgcacgccgcatgcgggcccaccgtctcctgcaccgacatctccgcgctggccacccgcgcggccgtcgtcctctccggcgggcccacctaccccgttcccctcggccagctcgacagcctcgccccggccccgctgcgcctcgtcaaccagctcccgggcccgggcacctccagcgtccaggctctcatcgacctgttcgggagcaggggcatgggagacgccgccgacctggtggcgctctccggcggccacaccgtggggaagtcaaagtgcgccttcgtgaggcccgtggacgacgccttctcccggaagatggccgccaactgcagcgccaaccccaacacgaagcaggacctggacgtcgtcacccccatcaccttcgacaacggctactacatagcgctcaccaggaagcagggggtgttcacctccgacatggcgctcatcctggacccccaaactgcggccatcgtcaggcggttcgcgcaggacaaggccgccttcttcacgcagttcgttacgtccatcgtcaagctgagcaaggtgccgaggcccggcgggaacaaaggcgagatccgccgcaactgcttcaagaccaacagcggagcacgcctcgtggacgtcgtggagggcttcgctgcctctgcttaattcatgtcatgtcgctcatcgatcataatcgagatgaatatctagggtcgacatcattatgccgttgtatgtgtgacctagtacgtccgccccttttgggcccggtcggtcggtctcgccagtatggcctttgtatgtttcgttacggccgtgcgcgcgttaataagatgtactcccgcaccgtaataattatgttgtttaattttttttatctttaagc

SEQ ID NO: 14513 - DNA, 847 bp, Oryza sativa
  ref <308>: DATABASE ACCESSION NUMBER: AK065091
  ref <309>: DATABASE ENTRY DATE: 2001-12-06
gatctcccgctttttctcctctcctctctctctctctcacactgacgacggcgagggcgggagcggcgcggtgcgctcgggtggggccggtcgacgtctgcagcggccacagcggtgggcgggagcggcgcggcaacggcgggctcgacggccggcgccctcctcctcccagatccagcggcggcgcgcttgggaggggccgggagcggccacggcgggcggcgggagcggcgcggcagtccgctcaatccctgctgtttgggtgctgatgagatggatgtggctggatgttgttggtgtgcggttgctcctatgcgggaagagctgccagctgcagtggatgaaaaatatccatgcaattttcggcttgctaaatggtgaaacaattagaggaccagaaagaggcagcaaggaagaatgaagaagaaactgagaagctgaggcagcaaggaagtgaaatccaaagcttcgttcgctccttgattggcagcaagtttgcatcattagatgctcagcagtaagctctcatactcaattaggttccagatgatattttggtgacactgaacttgcgaccattgtgattgtgagatgttattttggtgctgttgtgcttctggccgttgtgctgttgctgttgtgcttttggtcattgcgatgctgatgctgtgaagctattgcagatgtgctgctgttgctctcgatgtaggaggaagatgaaatttgagactttggatatgtattgaattagtggatggatgtactgatattgcattttcagacttgtggagtgtgaaatgcatatgacattgcaatcatttgtggaatgttaattcatttgaatctg

SEQ ID NO: 14514 - DNA, 2224 bp, Oryza sativa
  ref <308>: DATABASE ACCESSION NUMBER: AK098890
  ref <309>: DATABASE ENTRY DATE: 2002-08-28
gagctcacctcctcctcactaccaccaccaccaccaccacctgcttcctccgcggctgcgtgcgccgcctccccaacccttcgtcctccccgccggccgccgctgagatccgacgcgccggagcggagctcgctgagattttgttcctgctggatttctgaaattttactggaggactagagatatcaagacaccaacaacaaactagtacaaagttttccttccagttaatctgttcctggatctccttgccatacgcgaagcagtggatactatgcagtaattggttaggaggtctttactgaaccataatggctgatactccaacttcccgaatgattcatcccttcagcaatataccgagccaaaacctgaagcagttccagtattctgataatccacagcacccttgccacccttatagggcaccttcagacacccacgttgtgccacatcattatggcctaaagtcacattcaccggatgctggttatgaaagccaggctactcctaacaagtacacattggactcctctgaaggtgctggttgtatgagacatgattctccttccagtcaaagtttcacaaccagaagtggtagccctctatctcaggaagacagccactctgactcgactgatggatctcctgtaggcgcctcctgtgtcactgaggatcctaatgatctgaagcaaaaactgaaggatctcgaggccgttatgcttgggccagactcggaaatagtcaacagccttgagaattcggtggcaaaccaactttccttggagccggagaagtgggtgcgcatgatgggcattcctagaggcaacttgaaagagctactgattgcctgtgctagagctgtggaagagaagaatagctttgctattgatatgatgattccagagctgagaaaaatagtttcggtatctggtgagccacttgagaggttgggagcctacatggtagaagggcttgttgccaggcttgcctcctctggcatttcaatctacaaagctttgaaatgcaaggaaccaaagagctctgaccttctgtcttacatgcacttcctgtatgaggcctgtccctacttcaagtttgggtatatgtcggcaaatggtgctattgcagaggctgtcaagggagaagacaggattcatatcatcgacttccatatctctcaaggggctcagtggatctctctccttcaggcccttgcagccaggcctggtggaccaccaactgtaaggatcactggtattgatgactcagtgtcagcttacgcacgaggcggcgggctagagctggtcggaaggaggctgtcgcacatcgccagcctgtgcaaggtgccctttgaattccacccacttgctatctccggcagcaaggtggaggcagcacatctcggagtcatccccggggaagccctcgccgtgaacttcaccctggagctgcaccacattccagacgagtcggtgagcacggcgaaccaccgtgaccgcctcctaaggatggtgaagagcctgtcgccgaaggtactcaccctggtggagatggagtccaacacgaacacggcgccattcccgcagaggttcgcggagacgctggactactacaccgccatcttcgagtccatcgacctgacgctgccgagggacgacagggagaggatcaacatggagcagcactgcctcgcgagggagatcgtcaacctcatcgcgtgcgagggggaggagagggcggagcggtacgagcccttcggcaagtggaaggcgcgcctcaccatggccgggttcaggccgtcgccgctcagctcgctggtgaacgccaccatcaggacgctgctgcagagctactcggacaactacaagctcgccgagagggatggggcgctctacctcgggtggaagagcaggcccctggtggtctcgtcggcgtggcactagcgttgtgactttgtgaggtgatctgacgacgaacttcccttgtaaccatcttggctgggggctttagaaagctatagtgatcatggactggtaagggtagctgtaacaatggtgttgtaatggtaaggtagcggctagggtcaaactcgaaaatgggcaaaatgctgatgaggtgtagaagtgtagtacatgtttgagagtatatgtttcagtttttcttttaaatgtcttgtagtaatgttgtggcacactaatgtctatgatcagaattatcatcc

SEQ ID NO: 14515 - DNA, 2508 bp, Oryza sativa
  ref <308>: DATABASE ACCESSION NUMBER: AK098891
  ref <309>: DATABASE ENTRY DATE: 2002-08-28
gacggaacaaccagccggcgactgcggcgactccgactcctcgcacgcacgcacgcacgcggccgtggaaatcgcgccggctcgcctcctccctccccacccccacccgctagatctcgccggcttccgtaggtcggtagatctcgctgcctcctcctcctgggaatctccgtctcctccgcaagattccaatcgggaggcggcggggcggcggagaagctcgctttggtggagtagtttgactaaccggtgcggcaggatgagggggccggtgcggtgggcggtggtggtggtggtgatggcgatggtggaggcggcggcggggaggttcgtggtggagaagaacagcctgcgggtgacgtcgccggaggggatcaaggggaagtacgagtgcgccatcgggaacttcggggtgccgcagtacggggggaccttgcatggatgggtcgagtaccccaaatccaaccagaaggcttgcaagagcttcgaggacttcgacatctcattcaagtcaacccggtccggaggacgcccgaagttcgtgctcatcgaccgtggacagtgctatttcacaacgaaggcatggaatgcacagaatgctggggctgcagcagttcttgttgtggatgacaagtcggagcctttaatcacaatggataacccagatgatgctggaacagagcaccttgaaaacatcactattccctctgtgcttataacgaagaaattgggcgatgacctaaaaaaatctgctgaaaatggtgatatggttagcgtccttctggactggagagaatctcttccacatcctgatgagcgtgtagagtatgaattctggacaaacagtaacgatgaatgtggtccgaaatgtgatatgcaaatggactttgttaagagctttagaggaactgcacaaattcttgagaagaagggatacacccagttcactcctcattatattacatggtattgccctgaagcttttgttgtgagcaagcagtgcaaatcacagtgtatcaatcatgggaggtattgtgcaccagacccagagcaggatttcagccagggatatgatggaaaagatgttgtggttcaaaatctacatcaaatttgtgtattcaaggctgctaatgagagtgggaagccatggttgtggtgggactatgtgcatgacttctcaattaggtgccctatgaaggagaagaaatacacacctgaatgtgctgttcatgttattaagtcactcgggttggatgttgagaagataaagaagtgtgttggagatcctgaagctgatgaggaaaaccctgttctgaaggcagaacaagatgcccaaattggtcatgataaacgaggagatgtcacaatactgccaacccttgtcatcaacaacaggcaatatcgaggtaagttggacaaatctgccgtgctcaaagcagtctgcgcaggatttgaggagacaactgagcctgctatttgtttgagcgaggatgttcaaacaaatgagtgtttggaaaataacggaggttgctggcaagatagggataataatgttactgcatgcaaggataccttccgtgggcgtgtttgtgaatgtcccgttgtgaaaggtgtaaagtttgttggtgatgggtacaccaattgtgaagcttctggcattggtaggtgcgaaattaaaaatggaggatgctggaaagaaactagaaatggcaagacaatatctgcctgctcaaatgaagtatctgaaggctgcaaatgtccaccaggtttcaagggtgatggaataaaaagttgtgaagatattgatgaatgcaaggaaaaactttactgtcaatgcaagggctgcagctgtgagaatacatggggtagctatgagtgcagttgtggcggtaacaacatgttatacatgagagagcatgacacttgtctcagcaaggaggctacgttagctgttggctggagttttctgtgggttattttctttggacttgttcttgctggggtcggagcatatgcggtgtataaatacaggctacggagctacatggattcggagattcgcgcgatcatggcccagtacatgcctttggataaccaagaagcagctaaccaacatcatgtcgcgcatgctggtgatgatatttgaaacggcactcctttcccgggtgcgcgaacatttcatatgtgtactgatgcaccggtggccatcgactttacaggggtcaactgggcgcaaaagatagtgtgtgtgcgcgagaaagattagccgtatacatgtatgattgtaagagagacatcgtttgagatcatctttctgtaaaacccaaagaacagcataggcaaatattgtgacagttttagcccttcctcagactcagctgctcctgctgcatacatgagtactgaatacatgatacattcaaatgtcgtgtaaatacctgtctgttcttcagactagagaattcctcctcgcctcaacttaataaaagctcgagtcttgaaggggtc

SEQ ID NO: 14516 - DNA, 2719 bp, Oryza sativa
  ref <308>: DATABASE ACCESSION NUMBER: AK065092
  ref <309>: DATABASE ENTRY DATE: 2001-12-06
gggatgttgattctcgcctagaagctatgtaccgaaaggcgacagaactcattggcattagcaagccaaaaaatgagctaactaagcaactcttggaatatgacggctcatccagccaacaatcaaatataatttctattgttggattcggaggcttaggaaagacaactcttgccaattcattatttcaggagcttaaggcaaaatttgacagctattgttttgtttcggtgtccttgaatcctgatataaacaagattctcaagaacattcttctccaacttgatgagaaaatgtattcccacatagatgaaacatgggaaacgaagcagctcatcgacaaaattagagacttcctcaacaatagaaggttcttgtgcgtgattgatgatgtatggaaaaaatcagcgtgggatactatcaaacttgctgtgcaagatgctaaacttggtagcaaaataattgtaaccacgcgaaacaaggtcgttgcagaacatgcaggcagtggtgtttatgaaatgaaacccttatctgatgatgattccagacaattgttctgcaaacgaatatttgactctaacgatgactgtcctgctgatttgtgtggtgtcactgagaaaattttgaagaaatgtggtggtgtaccgctagcaatcatcactacagcatgcctacttgctagcaaaccaaggaattcagaggaatgggacaaggtcaataagtctatcagtttggggcttgagaacaaccttgatgtggacaagatgcggaagatattaagcctcagttacaacgatctaccttttcatttgaagacttgcttgttgtctctaagcaaatatcctgaggatgaactaattagaaaagatgttttgatatggggttggttagctgagggttttattacagatgaaacacgacctgtagggacaagcttgcaggagattggagagagctacttcaacgagctcatcaatcgaagcttgatccagccgatgagtgaggacaatttttgggatgaagatggtaaggtgcatgttttttgggatgaagatggtaaggtgcatgcatgcaaagtacatgacatggtgcttgagctaataaatcagctgtcagtagaagaagattttgttacaacgtatttatcagatggtcaacaaacaggtaaacatacatgtacagcacaaaagaagaagattcgccgattatctctccataacagcaataaatcctatgcctcaccagaagcaagagaacaattgtccaaagtaaggtccattactatcttcggcaaggtcgactcgataccacccttgtcgagctttcatgtcctgcgtgtgttgcagcttgaggactgcagtggaatggacaagaaccatcttaatcatctcgataagctacgcctcctaagatttctgcgtctagggcactatagtgccactgagctccctgaaagcattgggaaactggaatctctcgaaaccttggacataagaggtgcacgtaaaccaagttcttttaaatctcataaggtactgtttccaatgtcttttgccaaactaaggaaactgttgcggctatatgctggcagagtgaagctggcgcaaggtctgatgctggggaatatgaaatctttacaggagcttgtaatagaagctacccgaaaggtaataaaagagattggtaatttgacagagctaaggactcttaggatcgttttcggtagtgaaaaaacatttgagttaaaggaatccattcaaacgtctatacaaaggctcaccaatttgcaagacctagatttgagaaataatattagttttgaagaaatcatagacatgcaacaggttccttccggtctccaaaggttgttcatgcccgattcgtttatgaaagcattcccatgttggatcaattcattgatgctctcccacctcaccaccttatccatttgtctggatttcgaatatctccagtctgaccaccttgatcgcctcgctgagcttccatctcttcgctttctcaggctacagttagcatttgtttcggaacaactacaggaaaagctcactatccacagaggtgcatgtgcatttcggagtttaaaagattttcagttttatagctccatgatgccatcgtttcaaccaggagctatgccccaccttgaaaggctttatctttctatttggaccagactaaggaggggtggcttaaatgatttaggtttggagaatctctactcccttcggcatgcaaccatttattcctttgatgatgacagcaaggctgttattgaagaggcacttaaggactatcctaatcaagcagcgctcaaaatacaatcgatgatgatgaactaactcaggcgtcttactcgtcatgtaattatggtcattcagtatcacctgcaatctatcatcgtaagcccaacaagggagcacacgaacaacaggcgatgcaacagagtgggtgaaattatcagtttatctatctatctatctatctatctatctatctaccagttgttttggttgtttccattccatgaaattagaatggagttgtttagttggctctctataaagagcagtactatgttatttggaattcaagcaagaagatataagaccctgttagttttcatattattcatggtgggattgttgaaatggattatttactccacggattgaaatatatattctccactgcatttgtt

SEQ ID NO: 14517 - DNA, 1851 bp, Oryza sativa
  ref <308>: DATABASE ACCESSION NUMBER: AK065093
  ref <309>: DATABASE ENTRY DATE: 2001-12-06
gctcctttgggtttgtctctacctctctctcctcccttctcccacccaccccttctctctctacctctctctcctcccccttgtgggtgtgtgctgtggtggagaggagaaagggaggaagaagaggagagcaagaaccaaaaaccaagagctgctgccaaccctgcacagcctgggcttgtgatcattgattgcccaactattactaccttcctgtttttttcttctcatatagaagaatcccatctatctatcccttatacatatctcttcttctctttggttcttggaaatctcccatctcttctagatttcctttgtggcttcaagggcctccacaccatatcttgattagtagttggttgctcttcttcttgttcttggttttcttgattgcttagggggttggaattttgcggttcttggtttcttggtctttccccccaatctttgcaagtcttgtagagagtatttgagttgttccttccgcttgttggggagccatggatgataggattccgccaccctcgcccttgcagtactcgccgtctcccgtccattcttctcctcaccccctcagttctttgaggtattcttcctctgaaagagagagatatctggctgagttgcttgccgagaggcagaaattagctccatttgtacaagttcttcccttctgcaccaggctcttgaaccaagagattctgcgggcgtcttctttgccacctaaccataattttgttgatcctgagagaatcgagcatggtagcccattgaggttacctggcctcccagtgaatggtcagccaatggatctggagggatggtcagggatgcaaacagagaatatgagggttctgcaagcatcatctatgggctggaatggtcctccagcaattactggcacccctgttgtcaagaaagttgtgaggctagatgttcctgtcgacaagtatcctaattacaactttgttggtcggttgttggggccacgaggtaactccctcaaaagagttgaagcttcaacccagtgtagggtttatattcggggacgtggttcagtgaaagattctgttaaggaggacaagctgagagataaacctgggtatgagcacctgaatgaaccgctgcatgtgcttgtggaagcagagttcccggcagatattattgatacccgtctaaaccaagctgtgactatcctagaggatcttctcaaaccaattgatgagtcaatggactactacaagaagcaacaactgagggaattggccattctaaatggcaccctgagagaggaaagcccaagtcctcacctgagccccagtgtatcccccttcaactccaccgggatgaagcgcgcgaaaacagggcggtgatctcggttccgaaagcattattattctccaaatctggtcatggtttctatgtctgatcacatgctgctgtgctttgctggagatgattggtgatgcatatgctgggatcatcagtgctgctggcctatgcctgtcatgatctgccttgttttatcatccttgggggtgaatgatcctctctgtgggcttgatgtttgacggtattattatttattctttgtgcatctgacttctgaatattaacattattggtttgggtaagttaacaacaaggcccggtttggccaatctagaaagaattgggatcccaagtgtcggacaataatcaggttttgtcggtgtacctgaaagaaatagtagtaatttgtcaaaggggctggtgctcttgtgtgctagtgcttagtacaagacagccaagcaatgaagcaagtatagctgaagagacaaccctccattaatgattatttgcattcat

SEQ ID NO: 14518 - DNA, 1873 bp, Oryza sativa
  ref <308>: DATABASE ACCESSION NUMBER: AK065094
  ref <309>: DATABASE ENTRY DATE: 2001-12-06
gaagctggagagctagcagaaacaaacccctctcactcccagatacctgctgctgccactagcccactaccatggatccttgcaagttccggccgtcgagctcgttcgacacgaagacgacgacgacgaacgcgggagctccggtgtggaacgacaacgaggcgctgacagtggggcccagggggccgatcctcctcgaggactaccacctgatcgagaaggtggcgcacttcgcccgggagcgcatcccggagcgcgtggtccacgcccgcggcgcctccgccaagggcttcttcgagtgcacccacgacgtcaccgacatcacctgcgccgacttcctccggtccccgggcgcccagacccccgtcatcgtccgcttctccaccgtcatccacgagcgcggcagcccggagacgatccgcgacccgcgcgggttcgccgtcaagttctacacccgcgagggcaactgggacctcctcggcaacaacttccccgtcttcttcatccgcgacggcatcaagttccccgacgtcatccacgccttcaagcccaacccgcgctcccatgtccaggagtactggagggtcttcgacttcttgtcccaccaccccgagagcctccacaccttcttcttcctcttcgacgacgtcggcatccccaccgattaccgccacatggacggcttcggcgtcaacacctacaccttcgtcacccgcgacgccaaggccaggtacgtcaagttccactggaagcccacctgcggcgtcagctgcttgatggacgacgaggccacgctcgtcggcggcaagaaccacagccacgccacccaggacctctacgactccatcgccgccggcaacttccccgagtggaagctgttcgtccaggtgatcgacccggaggaggaggagaggttcgacttcgacccgctggatgacaccaagacatggccggaggacgaggtgccgctccggcccgtggggcgcctcgttctcaaccgcaacgtcgacaacttcttcaacgagaacgagcagctggcgttcgggccggggctggtggtgccggggatctactactccgacgacaagatgctgcagtgcagggtgttcgcgtacgccgacacgcagcgctacaggctggggccaaactacctgatgctgccggtgaacgcgcccaagtgcgcccaccacaacaaccactacgacggcgccatgaacttcatgcaccgggacgaggaggtggactactacccatcgcgccacgcgccgctccgccacgcgccgccgacgcccatcacgccgcgccccgtggtggggaggaggcagaaggcgacgatacacaagcagaacgacttcaagcagcccggggagaggtacaggtcgtgggcgccggatagacaggagaggttcatccgccgcttcgccggcgagctcgcgcaccccaaggtctcccctgagctccgcgccatctgggtcaactacctctcccagtgtgatgagtcgttgggggtgaagattgcgaataggctcaacgtgaagccaagcatgtgaagaaactaaggcacaagaatgcatcatctcttgttaattaattggagtactaccaaccaaataaggccagacaatgtcagatgcacgcatcttctgttgtcgttgggccatcttttgtatgcatcctattgttaattactagtacatgatatccaagtgatcatcagcaaggctacagaaattctgtaatacgataaattaaaagaaaccaaaatggagcctgcatatgtgtaacttaattaatgtactggcgtattaatgccactgctgcatgttgtaatactccatcaaagagtctattactattaagtatttaaattatc

SEQ ID NO: 14519 - DNA, 998 bp, Oryza sativa
  ref <308>: DATABASE ACCESSION NUMBER: AK098892
  ref <309>: DATABASE ENTRY DATE: 2002-08-28
gtagggtttgggattttagccgccgccgccgccgccgccgctcacccgcgccttcgacgagctccagcccgtagacctcgccggatctccccgatggccgtgaccttcaccgacctccacaccgccgacgggctcaaagccctcgagcagcacctctccggcaagacctacgtctccggaaacgcgatcagcaaggacgacatcaaggtgttcgccgccgtgccatcaaagcctggagctgagttcccgaacgctgctcgctggtatgataccgtcgctgcggccctcgcttcaaggttccctggcaaggcagttggagtgaatctgcctggaggaggtgcggcatcgtctgctgcagcggctgcgccagctgctaaggatgctgatgaagatgatgatgacctggatctttttggtgatgagaccgaggaagacaagaaagcagcagatgagcgtgcagcttccaaggcctcttcaaagaagaaagaaagcggaaaatcatctgtcctgttggatgtcaaaccatgggacgacgagactgatatgaagaagttggaggaggctgtccgcagtgtgcagatggagggtctcacctggggagcatcaaagcttgtgcctgtgggttacgggatcaagaagttgcagatcatgttgaccattgttgatgacttggtgtctgtggatagccttatcgaagaacatctgactgaagagccgatcaacgaatttgtccagagctgcgacatcgttgcgttcaacaagatttaaaatatcaaaaggggatgttgctacttatccaaaaactgggactgggactggttgttctggaagcatttttcatcccatcttattatccttcacagaaatgctagtttgagtttatttttgagtgatgcctgtcattagtgcctcttatctttaagtagttgaactgcagagcggcttgtaatggcgaaacatatgctatgtcaaagtacatccgtccatttttactgtgc

SEQ ID NO: 14520 - DNA, 2944 bp, Oryza sativa
  ref <308>: DATABASE ACCESSION NUMBER: AK065095
  ref <309>: DATABASE ENTRY DATE: 2001-12-06
gaaaaggaaatcgggaaatcaatccccatcgtcccccaagcctccgggggccgaccggagtgaggaggggggcgaggggcgtcctccggcgggaaacggcaaaaaattttcgcgagggcctcagggcccccaaaacttccctcccccggaaccccaaatccctaaacccctccagtggcgaagccctagagccgaaaccctagccagcccagccatggtgatcgcggtggaggggggcttcgtgcacgaggaggaggaggtggaccacccaattcgctacctcccacttggccgcgtctactcctcctctgctccgtgccctctccccaagaagccccgctccgccgaggacggcaagccccccgtgatcgtctactaccgccgccgccgtaagaagccgcgggtcgaggggccacctccctcgcctgccacagcaccaccgatgctgcacccccgggaggacgacgaggatgaggaggttacacggcggaagggttctctcaagtacgagctgctgagcctggggcaagccccgcccgcattaggcggggatggggaggagcccgcgcggcggcgctgcctgaggcgtagcggaggggctgagaggaggggttacttctctgaacccaagaggcggcagcggcagggcgtgcacaaggaagctgcctcctcggctgggaggagatggttggagttggaaattgaggctgcggatccactggcctttgtgggattaggatgcaaggttttctggcccctcgatgaggattggtacaagggttctatcacagggtacaatgaagcgactaagaaacattccgtaaagtatgatgatggcgaatcagaggaccttaacctagctgatgaaaggataaaattttctatttcatctgaagaaatgaagtgcaggaacttgaaatttggaatttccaatctgaacaagaggggctatgatgagttgcttgcccttgctgttagccttcatgattaccaaggtcttgatccaggtgatcttgtgtgggctaaacttacaggtcatgccatgtggccagctgttgtggtggatgaatcaaatgttcctgctaacagggctttgaagccaggccgactagatcagtcgatacttgttcaattctttggtactcatgattttgccaggattaagttgaagcaagcggtgccctttctgaatggccttctttcttctttgcatcttaaatgcaagcaagcacgcttctatcggagtttagaagaagccaaggagtttctctgcacacagcttctcccagaaaatatgttgcaactacagaaatccatggaaaagggcagttctgatgctaattccaataaagatgtacattcttgtgacaatttatctgaagataaaacagctgaaagcggaggggattatgatgagatgactccaatagaactaggaaatcttcgtgtgagcaaattaggtaggatagtaactgactcagactatttccataacaaaaagcatatatggcctgaagggtatactgctttcaggaagttcagatcagtgaaagatccacatgtagtaatactttacaaaatggaggtactgaggaattcagatataaaagctcggccattgtttagggtcacatcagaagatggaacacagattgatggctctaccccaaatacatgttggaaggagatatattgtagattaaaggaaaaacagcgcaatgtggcctctggattggacagagatgtttgtcagggatctggttcctatatgtttggcttttcaaatccacaaatacggcaacttattcaggagttacccaatgcaaggtcatgcttaaagtattttgaaaatgctggagacacctttcgtgggtatagagctgttcatgtaaattggaaagatctagactattgtagtgtttgtgatatggatgaggaatacgaagacaatttgttcttgcaatgtgataagtgccgtatgatggtacatgctagatgctatggtgaactcgaaccattgaatggagtcctttggctttgcaacctgtgtcgacctgaggcgcctcgtgtttctccacgatgctgtctttgtccagtaacagggggcgcaatgaaaccaacaacagatggtcgttgggctcatcttgcatgtgctatatggattcctgaaacttgcttaaaagatgtgaagagaatggaaccgattgatggattgagcagaatcaacaaggaccgctggaaacttctatgcagcatttgcggagttgcttatggagcttgcatacagtgttctcatcctacctgtcgtgttgcatatcaccctctttgtgcacgtgctgctgatctttgtgttgagcttgaagatgatgacaaaatccacctcatgttacttgatgaggatgaggacccatgtattcgtctactttcatactgcaagaagcacagacaaccatcgactgaacgtccatctcttgaaagtaaccttgctaagcctgctgtggtagttcagacagatgcagttccaccatccggttgtgcaaggactggaccttataatatccatgggagaaggggccaaaagcaacctcaagttatggctaccgcttctgtaaaacgtttatatgtagagaatatgccttatattgttagtggtttctgccaaaatagagtaggccatgatgctatcagtgaaccaattcaatcagttggctttttggatgttgcacatcaagaagctgttggcaacgtgtcttctatgattgaaaagtataaaagcatgaaggctacattcaggaggagactagcttttggtaagtccattaatctgtaccagtagcatctccatggaattatcgtttttgtggactgaaaatagaactatcattttatgttgtaaagctgaccaaatccttaacattgttgcaataataataatgctttcagg

SEQ ID NO: 14521 - DNA, 1557 bp, Oryza sativa
  ref <308>: DATABASE ACCESSION NUMBER: AK065096
  ref <309>: DATABASE ENTRY DATE: 2001-12-06
gaatctttctttaatccttggctccttgcatcctcgtcttcttcctctcttcttttgtttgttccttcaaaaattccccttccagtattcagttcttgtctcctccctcttgttatgaccgatgggcagctcttcctcctacagcgcgatcccaggcgatcaaagtgagctaatcacaggatgtgatgaagatgaccatggattagccaaaaccaaggggaagaattggggaattttcatctgctggctcctcggaaatggatgcctcttcgggttcaatggcatggttacaatcgaagattactatgtttacctcttcccgaattaccatcctacaagaatgatcactctcgtttatcagccattcgtcctcaccacaacagctctgttcgcatatcacgaggcaaagatcaacactaggatgcgcaacttggctagatatatgctgttcttcctgagctcatttggagtgatcgttctagacgttgcatcttcaggaagaggagggattgcaccgttcgttggtttgtgtctgatcgccgcggctttcggcgttgcagacggccatgttcagggtgggatgactggagacctgtccttgatgtgcccggaattcatccagtcgttctttgctggcattgctgcatcgggtgcaataacctctgcattgaggttcttgacaaaagcaatttttgagaactccaaagatggccttcgcaaaggagctatgatgttctcctcgatagcatgcttcttcgagcttctgtgtgtcatactctacgccttcgtcttcccaaagctgccaatcatgaagttctaccgcacaaaggctgcttccgaggggtctctgacggtcactgctgacctcgctgccggtggcatcaaaagtcagccagaaaatcctttggatgaagaagaccaggctttcgcagaacgattaagcaacagatagctgctaaatcagaacatggactacgctctggacgtgttcatgatctatgtcctcacactgtcaatcttcccgggctttctggctgaagacaccgggacacacagcttgggttcttggtatgcgcttgtgctgatcgcaacgttcaatgtgtccgacctgatcgggagatacatgccactgatcgagcagatcaagctgacatccaggaaatggctgctaatcgcagtcgttgcaaggttcttgttcgtccctgcgttctacttcacggtgaagtattgtgacgagggctgggtgatcatgctaacgtcgtttcttgggttgagcaatgggcatctcaccgtttgtgtcatcactgaggcgcccagaggctataagggacctgaacagaatgctttgggcaatatgcttgtgttcttcctcttggcgggcatattttgtggggttgttcttgactggatgtggctcataggcaaagggtggtgataaaaaaatgtttttgtttttgcatgtacaggaaatctgaatattcgacatcattgtaaaacacgaaaatgataatcaattgtgatattatatcaaatcagaaagaaacaacattaagcatt

SEQ ID NO: 14522 - DNA, 1483 bp, Oryza sativa
  ref <308>: DATABASE ACCESSION NUMBER: AK065097
  ref <309>: DATABASE ENTRY DATE: 2001-12-06
gtgctttagtccaccccgtgaccttcgctgacaccgtcgctttctctcatcgatcagccatgcctactctcgacgctcgcctccgcctccctctcgccggactatcgccggcgacgacctccttcccgggatccacccccaagccgggcagcctctcgttcgccctcaggccgccctccgcctccctgtcatcctccgccagtgccccggcggcggcggcgccgcccatcgtcgtcgtgggctccgccaacgccgacatctacgtcgaggtcgaccgcctcccgctcgtcggggagacggtggcggcgcgcgccggccgcagcctcgcgggcgggaagggcgccaaccaggccgcctgcgggggccgcctcgcggcggggcccacctacctcgtggcgcgcgtcggggacgacgccaacgggcggctcctcgagggcgccctcgcggacgccggcggcgtccgcctagaccgcgtcgcgcgcgcgcccggcgcgccctcgggccacgccgtggtgatgctgatgcccggcgggcagaactccatcatcatcgtcggcggcgccaacatggaggggtgggcctcgggggtcggctcggacgacctggacctgatccgccgggctggcgtgctgctgctgcagcgggagatacccgattgggtcaacgtgcaggttgcgcaggcagcaaaaggtgcaggtgtgcctgttatcttggacgccggtggaatggaagctcctgtccctggggaactactgagcctggtggatatttttagtccaaatgaaacagagcttgcacgtttgactgggatgcctacagaaacatttgaacagatcagtcgagctgcaggagcatgccataaaatgggtgtgaaagaagtgctggttaaactcggatcacaaggatctgctttatttattgaagggggggagccgatcaggcagccgataattcctgccacagaagttgttgatacgactggtgccggtgacactttcacctcagcttttgctgtagctctagttgagggtaaacctaaggaagagtgcatgagatttgctgctgctgctgcatctctatgtgttcaagtaaagggagccatacccagcatgcctgaccgaaaatcagtaatggaccttctggaatctgttcaggttgaataactgtagatctcatgattgtttctcttcagcctccattcatcctcaataatggggcgcgcggccaaattcgacggatccaatgaagctcccatagaccctcatggcctcatctgctctgctcatcctccaataatgtgacaaccttggagtggaaaaacgcatttcccgggtgccactgccatccatagtaaacgcacccaacccccaaataaagaatggacatttcacgcatccatcctgttgctgtaggccactgtaaatacaatgaacagttttcacactgccctggagctatcagacggtgacaccgtgctgttact

SEQ ID NO: 14523 - DNA, 1594 bp, Oryza sativa
  ref <308>: DATABASE ACCESSION NUMBER: AK065098
  ref <309>: DATABASE ENTRY DATE: 2001-12-06
gatcactactccgttccctaaccaccattcctcgccatggcggccccggcggacgactactacggcgacgacgacgacgagtacgacgactacaacccccacccctacggcggcggctacgacatcttcgccacctacggctccccgattccgccctcccccaccacctgctaccccgtctcctccgctgctcctacggccccgccgcctaagccgtcgcctactccgcctccggcttctccaccgcctgcgcccactcccccgcaaacgcggccgccttctccgccgccgcagcagcagcagcctcggccggtttcgccgccgcccgtggcggagccgtactactggcccaagccctacgactacggggatgcgccgcgcgagcagccggcgtacgccacgccggaggtcttccggggctggcccttcttcgcgggggcgcgctgccactcgcggtgcggcggccgcgactactggaggcagttcatgcgggggctggattacctcttcggccacgccgatggctacggggagcgccgtattggggtggactaccacggcgtccccgtctacgccaacaggaagggaggcgtcgaggaagccgtcgtcatacaagtggagccgccggccaccgggactgtagagtggcaccacgccgccgacgacccggagtacaactacaacaacggcaatcgcttatcttgggatgacaatgccaaagatgaaacatatgcatatgtgcagcacaattacagttcgtatgatcgctcttatgatcagtcttacagtcttgatgccgtttccgatgaaactacttggtttcctaatcagaactaccagcacgtgtacaaagaggaggaatctcagtatcaggaaatcttgtccagctcttgtgcagaaagtaagatttcagctcagcctatttattgttacaaccagcagtttagtgaacaaccgctacatgttcttgttgagcccccagaaacagtttattctcagaagttggagtactatgagagcttctcaacatacaaccaccataacagcaacgatgattcagatatgttgggacattcatatgacatacagctgcccgatgaacatgtgccagatgaaccatttgaaccaattaagccttcttgggctatgcattcgggatactatcagtcctgcacagatggggcatctgctgaattcgaaaatcatactttaagctccagtgaattcagtggtattgcaagcttatttgcaacttccttctaccctcaacaaacacaaatttatgagtgtcatggagatgagaatgtttccttgcagcaaaattggcagtgcaactggaatgtggtttctgaaaatgatttccaatcgggttacgattccaaccatatgaatggctccttctggccgtttggagatcattcagcataataccacatagtctatattgttgtaatttcactcttatcttttttatgtacatttcatttaaatttacccggccaaatgtaaatgaaaaaaatatatataagaggttatgcaccaatgtatctaggttcagcatataatgtaagatcattgacgctgttgttgaccg

SEQ ID NO: 14524 - DNA, 4458 bp, Oryza sativa
  ref <308>: DATABASE ACCESSION NUMBER: AK065099
  ref <309>: DATABASE ENTRY DATE: 2001-12-06
gtcggggccatggggtcgctcaccagggcggaggaggaggagacggcggcggccgaggagtggtcgggcgaggcggtcgtctacgtcaacggcgtccgccgcgtgctccccgacggcctcgctcacctcaccctgctccaatacctcagagacattggtcttcctgggacaaagcttggatgtggtgaaggtggctgtggagcctgcactgtgatggtctcatgctatgatcaaactacaaagaagacacagcattttgcaatcaacgcatgcttggctccgctttattctgtggaaggaatgcacataatcacagtagagggaattgggaatcgtcagcgaggtttgcacccaatccaggaacgtttagccatggcccacggttcacaatgtggattttgcacccctggttttgtgatgtcgatgtatgcattgctgagatcaagtgaacagcctcctactgaagagcagattgaagatagccttgcaggaaatttatgtcgctgtactggctacagaccaataatagacgccttccgtgttttctcgaaaagagatgatcttttgtacaacaattcatctctgaaaaatgcagatggccgacctatctgcccttcaacaggaaaaccatgttcctgcggagatcagaaagacatcaatggtagtgaatcttcattattgacacctacgaaaagctactcaccttgttcatacaatgagattgatggaaatgcgtacagtgagaaagaactcattttccccccagaacttcagttgagaaaagttacgtcacttaaattgaatgggtttaatgggattcggtggtatagacctcttaaactaaagcaagtattgcatttgaaagcatgctacccaaatgcaaaactaatcattggtaactctgaagtaggagttgaaacaaagttcaagaatgcccagtataaggtcttgatctcagttactcatgttccagagcttcatacccttaaagtgaaagaggatggtatacatattggttcttctgtaagacttgcacagctccaaaatttcctcagaaaggttattttagagcgtgattcacatgaaatttcatcctgtgaggcaatactgcggcaattaaaatggtttgctgggacacaaatcaggaatgttgcttctgttggaggtaacatttgtactgctagtccaatatcagatctaaatccactttggatggctacaggtgcaacgtttgagataattgatgtgaacaataatattaggaccattcctgcaaaagatttttttctgggttatcgtaaagttgacttaaaacctgatgagatattgctctctgttatactgccatggacaaggccatttgaatttgtcaaagaattcaagcaggcacatagaagggaggatgacattgcgttggtgaatgctggaatgcgtgtctatataagaaaagttgaaggtgattggataatttcggatgtttcaattatctatggaggggtagctgcagtttcacaccgtgcttcaaaaactgaaacctttctcactggaaaaaaatgggactatggattgttggataagacttttgatctgttgaaagaagacgtagttctggctgaaaatgcacctggtggaatggttgaatttcgcagttcacttactttgagtttctttttcaaatttttccttcatgttactcatgaaatgaatataaaaggattttggaaggatggattacatgcaaccaatctttcagccatacagtctttcactagacctgtcggtgttggaactcaatgttatgaattggttagacaaggaactgcagttggccaacctgtggttcacacatcagctatgcttcaggttactggtgaagcggaatatactgatgacacaccgacaccccccaataccttgcatgctgctctggtgctgagtacgaaagctcacgcacgcatattatctattgatgcttcacttgccaaatcttcccctgggtttgcgggtctcttcctttcaaaagacgtgcctggcgctaaccatactgggcctgttatccatgacgaggaggtttttgcatctgatgttgttacatgtgttggccagattgttggacttgttgtggcagatacccgtgataatgcaaaagctgctgcaaataaagtcaatattgagtattctgaacttccagcaattttatccatagaggaagctgtgaaagctggtagctttcatccaaatagcaagagatgcctagtaaaaggtaatgttgaacaatgttttctgtcgggtgcatgcgatagaattatagaaggaaaagtacaagttggaggtcaagagcacttctacatggagcctcagagcactcttgtatggccagttgattctggaaatgaaattcatatgatttcatctacccaggctccccagaagcaccaaaagtatgttgctaatgttcttggtcttccacaatcaagagttgtttgcaagactaagcgtattggtggtggatttggtggaaaagaaaccagatcagcaatatttgctgcagcagcatctgtagctgcttattgtttaaggcagcctgtaaagcttgttttggacagggatattgacatgatgacaactggacagaggcacagtttcctagggaagtacaaggtgggatttaccgatgatgggaagatattggccttagaccttgatgtttataacaatggtggtcattcacatgatttgtcccttccagtcctggagcgtgctatgtttcattcagacaatgtctatgatataccaaatgtcagagtcaatgggcaagtatgtttcacaaatttcccaagcaatactgctttcagaggttttggtggtccacaagctatgctgattgcagagaattggattcagcacatggctacagaactcaagcgaagtcctgaggagataaaagaacttaattttcaaagtgagggatctgtgcttcattatggccagttgcttcaaaattgtacaatacattcagtatgggatgaactaaaggtttcttgtaattttatggaagctcgcaaagctgtaattgattttaacaataataaccgttggagaaagcgtggcattgctatggttcccaccaagtttgggatatccttcactacaaaattcatgaatcaggctggtgctttagtgcaagtttacactgatggaactgtccttgtaacgcatggtggggttgaaatggggcagggtttacacacaaaggtagcccaagttgcggcttcatcattcaatatccctcttagctctatatttatctcagaaacaagcactgataaggtaccaaatgcaacaccaacagcagcctctgctagttcagatttatatggtgctgcagttttggatgcttgtcagcaaattatggctcggatggaacctgttgcttcaagaggaaaccacaagtcctttgctgagttggttctagcatgctacctggaaaggatagatctctctgctcatggattttatatcactcctgatgttgggtttgactgggtgtctggcaagggaactccattctactatttcacatacggagcagcatttgcagaagttgaaattgataccctaactggggatttccacacaaggacagtagatattgttatggatcttggctgttcaattaatccggctattgatattggccagattgaaggaggttttatccaaggattaggttgggcggccctggaagaactaaaatggggggatgataaccacaagtggattcgacctggacatcttttcacttgtgggcctggctcttacaaaataccctctgtaaatgatatacctctaaacttcaaggtctcacttttgaagggcgttttgaatccaaaggtcattcactcatccaaggctgtaggagagccaccgtttttcctcggttcagccgtcttgtttgccataaaggatgcgatatctgccgcaagagctgaggagggtcacttcgactggttcccactcgacagcccagcaacaccggaaagaataagaatggcatgcgtggattccatcacaaagaaatctgctagcgtatattaccgtcccaagcttagcgtatagtggctactgccaaagtacaagggtcattaaaggtttatgcttgtcgtacgtatatttgtacagtcccaagctactgtgtaaacataaatataggcgacagtttaggggataaaaagttaccttttcctcttcttttttaccccccaggaagaaaacactagaaataaaagcaatgttcacatcgacttgctgtctagctgtgtactggaatagaagtgcagggctcagcccaatggcgtgttctcagatgctgtctactccatgtgtttaaaactatatagtaattttcagggttcaaaatttatattgaaatataacaacttctcaacctattcggtt

SEQ ID NO: 14525 - DNA, 2646 bp, Oryza sativa
  ref <308>: DATABASE ACCESSION NUMBER: AK065100
  ref <309>: DATABASE ENTRY DATE: 2001-12-06
ggagagggcaactaatactactagtatagtgtatattgccacgctaattactaattagcgtgaaataaaccaggagaagcagggtagggaggaagatgacggtgacgccgaggataacggtggcggaggggaggctggtggcgcatggccggaccatcctcaccggcgtggcggacaacatcgcgctgacgcacgcctccggcgccgggctcgtcgacggcgccttcgtcggcgccaccgccgacgagcccaagagccttcacgtcttcaccttcggcaccctccgggatttgaggttcatgtgctgcttccggttcaagctatggtggatgacccagcggatgggcacgtccggccgcgacgtcccgctggagacacagttcatgctcctcgagagccgcgacggcggcggcggcggcgaggcggtgtacgtcgtgatgctgccgctgctggaggggcagttccgggcggcgctgcagggcaacgaccgcgacgagctcgagatctgcatcgagagcggtgacaaggcggtgcagacggcgcaggggacgtacatggtgtacgtgcacgccggggccaatcccttcgacaccatcacccaagccgtcaaggtggtggagaggcatctgcagacgttccaccaccgggagaagaaaaagttgccgtcgttcttggactggttcgggtggtgcacatgggacgccttctacaccgacgtcaccgccgatggcgtcaagcaaggcctccaaagcttggcggaaggcggcacgccgccgcggttcttgatcatcgacgacgggtggcagcagatcggcagcgagaacaaggaggatgccggcaatgccgtcgtccaagaaggcgcccagttcgcgagcaggttgatcgggatcaaggagaacaccaagttccagaagacgacgacgacggcaatggcggatggcggcgagacggcggcgtcggcggcggggctgaaggcgttggtggaggaggcgaagaaggagcacggggtgaagtacgtgtacgtgtggcacgccatggcggggtactggggcggcgtgaagccggcggcggaggggatggagcactacgagagcgcggtggcgttcccggtgcagtcgccgggggtgatggggaaccagccggacatcgtcatggactccctctccgtgctcggcctcggcctcgtccacccgcgcatggcgctcgccttctacggcgagctccacgcctacctggcgtcgtgcggcgtcgacggcgtcaaggtggacgcgcagaacatcatcgagacgctcggcgccgggcacggcggccgcgtgtcgctcacgcgcgcgttccaccgcgcgctggaggcgtccgtggcgcgcagcttccccgacaacggctgcatctcctgcatgtgccacaacaccgacatgctctacagcgccaggcagaccgccgtcgtgcgcgcctccgacgacttctaccctctcgacccggcgtcgcacaccatccacatctcctccgtcgcctacaacaccctcttcctcggcgagttcatgcagcccgactgggacatgttccacgtatacgcttcgtcgccattgctgctcaatctactgctctgttcctgaatccaagatgatgatgatggtggtggtggtgatgtcatgaacttgcagagcttgcacccggcggcggagtaccacggcgcggcgcgggcgatcggcggctgcccgatctacgtcagtgacaagccgggtaaccacaacttcgagctgctcaagaagctcgtcctccccgacggctccgtgctccgggcacggctccccggccgccccacccgcgactgcctctttgtcgacccggcccgcgacggcgcaagcttgctcaagatatggaacgtgaacaagtgcaccggcgtggtgggcgtgttcaactgccagggcgccggctggtgccggatcaccaagaagacgcgcgtccacgacgcggcgccggggacgctcaccgggtcagtccgcgccgacgacgtcgacgccatcgccgacgtcgccggcacgggctggaccggcgacgccgtcgtgtacgcccacagatcaggtgagctgatcaggttgcccaagggagcgacgctgccggtgacgctcaaggtgctggagttcgagctgttccatgtctgccccgtcatgacggtggcgccgggcggcggcggcggcggcgttacgttcgcgccgatcggcctgctcgacatgttcaactccggcggagcggtggaggaatgcgacgtcgtccgtgccctcgacgccgcaggcgaggccgaggccgaggccgaggccgccgtcgtgcgccttagggcccgtggctgcggccggttcggcgcctactcctcccggcggccggcgcggtgcgcgctggacgccgtggaggtggagttcagctacgacgccgacacggggctcgtcgcgctcgacgtccccgtgccggcacatgagttgtacaaatggaccgtggagatccaggtctaggaggagcctgattcctgtgattctgtgtgagaggaatggaaaacatataatgctgtgccctctgcctgaataaaccctatatgtaccactgaacagtttgcataagcaataataaattactactctgtatgatgatgct

SEQ ID NO: 14526 - DNA, 2155 bp, Oryza sativa
  ref <308>: DATABASE ACCESSION NUMBER: AK065101
  ref <309>: DATABASE ENTRY DATE: 2001-12-06
ggatggagccacctcaaaagcccccgcccatccaccgccacgcggcgatccaacccccttccccttcgccggcgcagcatcggacctcgccgccgcggcggttcttctgagcggggccggggcggggcggcagctggggattcgtcccgtgccccgtgctcttcctctgcgtgggccggggcggagggagggaggggaagtcggtggtgaggtggcgtgttgtgtggcgcagatgtgagggcggaggaatgcagaggtcgcggagagcccttctgaagaggaaggcggcggcggcggcgaaggaggaggaggaggaggcaggggtgggcgtggctaccgcggcggctgtacggcttctccgtctcgcttgtcgtcgcctgctgggtcgtcctgctcctgctcaaccccctcgtcggtcatgggaacggtcaacgagatgaagggatttttgcggatgaaggaagctctgatccctcgtttgattctgttgagcctaccttgagcgaaggctctgttgattcagttgtacagcaggagaatggggaaaatcatgcgttgccaggtgatagctgtgctaaacccgatgaaaatcatgtgctttctgaagagacactgctggagaaagatcagctttgctccaatgatgaggcacagggtgatagcatggatgctctgcccaaggataacgttgatcaggtgagaatcttccacggacagatgatgattctgtagttcatccagagggggaggtggagagcgaaggtgttccaagaccagcaaggttatcacgagttgtccctcctggtcttgatgaattcaagacacgagcgattgcggaaagaggaaagggtgtccctagtggtcaacctggaaatgtgatccacagaagggagcctagtgggaagttgtacaattatgcctcggcagctaaaggggctaaggtcctggaattcaacaaggaggccaagggtgcttctaacatcctagacaaggataaagacaagtatctccgcaatccttgctcagcagaggggaagtttgtcattatagagctgtctgaagaaaccttggtagatacaatcgcaattgcaaattttgagcactattcttctaacttgaaagaatttgaaatgctgagcagtctgaattatcccacagatagctgggaaacactcgggagattcactgttgcaaatgccaagattgctcagaattttacttttcctgagccaaagtgggctagatatctgaaactcaacttgcttagccattatggttccgaattctactgcacgctcagtatgcttgaagtgtatggaatggatgcggtggaaaagatgctggagaacttgattccagttgagaataaaaggctggaacctgatgacaaaatgaaggaaccagtcgatcagcaaacacaattgaaggagcccactgagggaaaagaatcctcacatgaacccctggatgaagatgagtttgaactagaagatgataaactaaacggtgattcatcaaagaatggtgctcatgatcaagttaccgagacaaggccaattcaggctggcaggattcctggagatacagttcttaaggtactaatgcagaaggtgcaatctcttgatgtgagcttttctgtcttggagcggtatctagaagaactaaatagcagatatgggcaaatttttaaggattttgatgctgatattgataccaaagatgcactcttggagaaaatcaaattggagctgaagcatcttgagagaagcaaagatgactttgcgaaagaaattgaagggattctctcatggaaactagttgcttcctcacagttaaaccagctactcttggataatgtcataatcagatcagaacttgaaagatttcgggaaaagcaggctgacttggagaatagaagctttgctgtaatattcctgagttttgtttttggatgtttagcgattgctaagctgtctataggcatgatatttaatacctgtagattatataattttgaaaaattcgatagggtaaaatctggatggcttgtgttgctgttcagcagttgcattatagcctccattttgataatacagtgatgtacctatcaactccatataattgcggctgcgctttgtaattgcctgaggtgtct

SEQ ID NO: 14527 - DNA, 2851 bp, Oryza sativa
  ref <308>: DATABASE ACCESSION NUMBER: AK065102
  ref <309>: DATABASE ENTRY DATE: 2001-12-06
gactctgtgctgcgagtgtcgctgcttcgtcttccttcctcaagttcgatctgattgtgtgtgtgggggggcgcaggtagggcgaggagggagccaaatccaaatcagcagccatggcgcagatgctgctccatgggacgctgcacgccaccatcttcgaggcggcgtcgctctccaacccgcaccgcgccagcggaagcgcccccaagttcatccgcaagtttgtggaggggattgaggacactgtgggtgtcggcaaaggcgccaccaaggtgtattctaccattgatctggagaaagctcgtgtagggcgaactaggatgataaccaatgagcccatcaaccctcgctggtatgagtcgttccacatctattgcgctcatatggcttccaatgtgatcttcactgtcaagattgataaccctattggggcaacgaatattgggagggcttacctgcctgtccaagagcttctcaatggagaggagactgacagatggctcgatatctgtgataataaccgcgagcctgttggtgagagcaagatccatgtgaagcttcagtacttcgatgtttccaaggatcgcaattgggcgaggggtgtccgcagtaccaagtatccaggtgttccttacaccttcttctctcagaggcaagggtgcaaagttaccttgtaccaagatgctcatgtcccagacaacttcattccaaagattccgcttgccgatggcaagaattatgaaccccacagatgctgggaggatatctttgatgctataagcaatgctcaacatttgatttacatcactggctggtctgtatacactgagatcaccttggttagggactccaatcgtccaaaacctggaggggatgtcacccttggggagttgctcaagaagaaggcctgtgaaggtgttcgggtcctcatgcttgtgtgggatgacaggacttcagttggtttgctaaagagggatggcttgatggcaacacatgatgaggaaactgaaaattacttccatggctctgacgtgaactgtgttctatgccctcgcaaccctgatgactcaggcagcattgttcaggatctgtcgatctcaactatgtttacacaccatcagaagatagtagttgttgaccatgagttgccaaaccagggctcccaacaaaggaggatagtaagtttcgttggtggccttgatctctgtgatggaaggtatgacactcagtaccattctttgtttaggacactcgacagtacccatcatgatgacttccaccagccaaactttgccactgcatcaatcaaaaagggtggacctagagagccatggcatgatattcactcacggctggaagggccaatcgcatgggatgttctttacaatttcgagcagagatggagaaagcagggtggtaaggatctccttctgcagctcagggatctgtctgacactattattccaccttctcctgttatgtttccagaggacagagaaacatggaatgttcagctatttagatccattgatggtggtgctgcttttgggttccctgatacccctgaggaggctgcaaaagctgggcttgtaagcggaaaggatcaaatcattgacaggagcatccaggatgcatacatacatgccatccggagggcaaagaacttcatctatatagagaaccaatacttccttggaagttcctatgcctggaaacccgagggcatcaagcctgaagacattggtgccctgcatttgattcctaaggagcttgcactgaaagttgtcagtaagattgaagccggggaacggttcactgtttatgttgtggtgccaatgtggcctgagggtgttccagagagtggatctgttcaggcaatcctggactggcaaaggagaacaatggagatgatgtacactgacattacagaggctctccaagccaagggaattgaagcgaaccccaaggactacctcactttcttctgcttgggtaaccgtgaggtgaagcaggctggggaatatcagcctgaagaacaaccagaagctgacactgattacagccgagctcaggaagctaggaggttcatgatctatgtccacaccaaaatgatgatagttgacgatgagtacatcatcatcggttctgcaaacatcaaccagaggtcgatggacggcgctagggactctgagatcgccatgggcgggtaccagccataccatctggcgaccaggcaaccagcccgtggccagatccatggcttccggatggcgctgtggtacgagcacctgggaatgctggatgatgtgttccagcgccccgagagcctggagtgtgtgcagaaggtgaacaggatcgcggagaagtactgggacatgtactccagcgacgacctccagcaggacctccctggccacctcctcagctaccccattggcgtcgccagcgatggtgtggtgactgagctgcccgggatggagtactttcctgacacacgggcccgcgtcctcggcgccaagtcggattacatgccccccatcctcacctcatagacgaggaagcactacactacaatctgctggcttctcctgtcagtccttctgtacttcttcagtttggtggcgagatggtatggccgttgttcagaatttcttcagaatagcagttgttacagttgtgaatcataaagtaataagtgcagtatctgtgcatggttgagttgggaagaagatcggggatgcaatgatgcttgtgaagttgtgatgccgtttgtaagatgggaagttgggaactactaagtaattggcatgattgtactttgcactactgtttagcgttgttgatactggtt

SEQ ID NO: 14528 - DNA, 765 bp, Oryza sativa
  ref <308>: DATABASE ACCESSION NUMBER: AK065103
  ref <309>: DATABASE ENTRY DATE: 2001-12-06
ggatctgagatcggcgttggtcggggagagtcaagagttggggatatatacatggacgcgtacgcgtggtgccggcgcggcggcgcggcggattgcgaggagcaggaggaggatatcgggtcgccgtccacgtcggcggggagctcggcgcggtcgtcggggtcgtcctcggagctcgccgacgacgcgagctcctcctcctcctccagctcggcggagcgccgcttcgagatgtccgacctcatgacgcagctcccgttcaagagggggttgtcgaggttcttcgacggaaagtcgcagtcgttcgcgtcgctggcggcggtcgcctcgctggaggacctggcgaagccgccgaggaagcgcctcaagccgtcgcagagctgcgggggaggcctggacgcgcaccgcgggcgcgtcctgtcgccgcgccggcattgccccaaggccgtcgtcgccggcgccaagaaggcgaccgcgagggccgccctctcgatgctcgccgcctcgccgaggcggccgccgctggccgcgccggcgaggccggagggggtggcagctaagtttctcgtcgttaactaggtagtagaaagtttggtgatagttgcagtcgaagcaacgtgtttacccgtctgtacataagtactctgaatgaccggcattttcgctgtttggtggtccatttccactgtccgtggtaatttgttgggtgagcttgttgtaacataaatccacgattgatgaggtggatagttagaatgctcaatt

SEQ ID NO: 14529 - DNA, 1832 bp, Oryza sativa
  ref <308>: DATABASE ACCESSION NUMBER: AK065104
  ref <309>: DATABASE ENTRY DATE: 2001-12-06
gtgcggttcatcgccgcggcacaaaatgctccgccgcagccgccacttcctcccacccagaccccgccgccggccgagacctcgccgcgaggcccccgccgccgagccgcccaccccgacctacacccgcgacgtcgtccgccgcgtcgacgccatcctccgcggccacccctggtcggcggcgcggccgctcctcctctccctcccgggcctcgcctgggactcccacaccgtcgcgcgcgtcctcaaggcgcacccgcctctccacaaggccttcctcttcttccgcctcgccgccggcgcaggcggcgggttccgccacgaccgcttcacctacacctccatgctccacctcctcggcgaggccggccgcgtgccggccatgatgcgcctcctcgccgagatgctccgcgcgggggtggaccccgacgccgccaccttcaccacggtcatgcactggctggcgcacgccggggacgtcgacgccgcgatgcgggtgtgggaggagatgcgcgcgcggaaggggaagtgtcggcccaccctcgtgagctacacggcgtgcgtgaagatcctgttcgacgccgggaggcctgcggaggccagggaggtgttccaggagatggtggccgagggactgcggcccagctgcaagacgtacacggtgctcatcgagcatctcgcgaacgtagggaaatttgaagctactatggaaattatggacaagatgcaagaagctggtgtagaaccagataaagcactctgtaatattctagttcagaaatgctccagggctggtgagacatcagtgatgacccgaattcttcaatacatgaaggaaaatttcatcgtgcttcgccgacctatatttttggaagcacttgaagctctaaaagctaatggtgagagtgacaatcttcttcgggaagtgaatccgcatcttgcatttgaaggcatcgaatgtgacccagcatttactgatctaggctacattactgtcaggagtacgatcctgtaccttttggcttctagaaactggtccgccgtagaacacatgataaatgaaatgacccccaagaatatcaaggttgaatcacatatcctctctgacattattcaagcaagctgtgcaaactgcagaccatcatgtgggcttgcagttctgcgttacagtctaagaataggcaatgaacttggtagatctgcatatggcagccttcttggtcattacatcagaaatggttcattcgatttggtgtttgagatcgttgaaatattgattaaatctggctgcaatcttgggacatatctatcatctatattaataataaaactggcttgtgctgggcattcttcaaccgcagtgcgcatttttggattattgactacagacaagaatgttgttacgtacactgcccttatgagtgcctattttcaagatgggaaagttgataaggctctccaactattcttgcaaatgagtgctaatggagtatctgcatgcccaggtacatatgaagtactgatacatggattacaaatggctgggcggaaacaggaatctgaacattaccgaagagagagaatggagatgcaatggcatcttcagtatcgcaatgagcattcccctgaagatagcttatgtaaccatctgttttgtgattttcatggttagaagatggtccaaaatcttcatctttcattagctgaatccttccagcacctattgctgcctgaacatgatgatattgacacacaggtctgttggtatttttaattttatttaatatatacctaaacatggaactgtaaatgatttggttaatctttactct

SEQ ID NO: 14530 - DNA, 2009 bp, Oryza sativa
  ref <308>: DATABASE ACCESSION NUMBER: AK065105
  ref <309>: DATABASE ENTRY DATE: 2001-12-06
gagcgcggcagaagaaaaaccccacccaaaaccgccgaacccaatcccgactcctccctccgccgccgccgccgccgccgcgatgccgaaggcggcggcctccctcgcgtccctcctcccgcagctatggcaccgccccgtccagccccctcccttcctccaccgcgccctctcctcctcctctcccctcctccgacgccaccgcgccgccctccactcgccggcggcgcccctctccgccgctgcggtgtccacctccgccgcaaccgtcgaagccccagcgaccgcagcgtatccagtttatggcaggctcttgccttgccctctgcaagatgaccctccaaggatcgagcacctcgtcgcgcgggaagacgaggtcgccgtcgatttcatctccaggtcactcaccctccctccactatctcatcaagtttggggctgtttactatgcgcttgtcgcgccgcagccgcctcctcacgcggctccggagcatgttaggatttttagagaggtgaccgagccttcggtcctgtgccgtaggaaatccattaaagggaagacggtgagggaggcgcagaagacatttagggtgacagaccccaaccagcgcctcgaggccggcacgtatctgcgggttcatgtgcatcccaaacgttttcctaggtgttatgaaattgactggaaatccagggtaatagcagtaactgataactatgtcgtacttgacaaaccagctgcaacatcagtgggaggagcaactgataacattgaggaatcctgtgtggtttttacttcacgcgcactaggattagaaacacctttaatgacaactcatcaaattgataactgttctgaaggctgtgtggtattatctaaaactaaggagttttgctcagttttccatagaatgataagggaaaaacaggtcaataaacgttaccttgcacttactacagcacctgtgtctacaggaataatcacacattacatgcgtcctattaatcgtgctcctagattagtttcagaagatcatattaaaggatggcatgtttgtcaaatggagatattggactgtaagaaggtcccatggccaagctctctgatcagaaaagtccataaagtagacaactgtggttggccccaacaggaggctgcctatgaatgtaaaatcaatctcttgacaggaaaaactcatcagatacgagcacaacttgctgctataggcactccaattgtaggggattctgcctacatgacggcagcaatggcagcaatagttaatccaagcataaatccatttggtcgatggggacagaactatgatagtgaagatgaaaaggcagctgctgttgaagcttggatttcttgtcatggcaaagaaccaaaatcagtaattggcctacaagcatctgagatctcatgggattatgaaggtgaacaccattcttataaggcaggagttccatggtggcggcaagatgcagttgaatctgacttgatctgaagaagaacaggagtatatgagaattttagccctgaacctcagcctggggtggctcattttgtgtgttctggcagaggtcggatctccaaggttatttggccgccaaagagaaacataaaaaaaaatgccaaatatgaaaaccacagaatgcgtggtgccaccgatgaaaagcttacacgccaaaaatcttcccacatccttccaaaatatcttgctacagattattctacatctcagatgaaacttactgacagagttgagttgtacacttctagctgttatatctggggtggagtagctcatttgcattgccacacatgcaacattttacttctagagtgtaattttgtcagagttttgcccaaggtgctgtacatcttcgaaatttacatcttttgtcagtaacttgttctggtattttgtactgtcccgagatttgctttcctgcttcacatggcactgtttataaattgaattgaatttgaggtttcaccttttgttctg

SEQ ID NO: 14531 - DNA, 1256 bp, Oryza sativa
  ref <308>: DATABASE ACCESSION NUMBER: AK098893
  ref <309>: DATABASE ENTRY DATE: 2002-08-28
cgccgccgccgccatcctccccgagccctagctctcccctatccctcgccgcacgcaccaccaccaaccatggccggcgcgcaggagtctctggtgttggccggcgtgatgcacggccacaacgacgtggtgacggccatcgcgacccccatcgacaactcgccgttcatcgtctcctcctcccgcgacaagtcgctgctggtgtgggacctcaccaaccccgtccagaacgtcggcgagggcgccggcgcctccgagtacggcgtgcccttccgccgcctcaccggccactcccacttcgtccaggacgtcgtcctcagctccgacggccagttcgcgctctctggctcctgggacggcgagctccgcctctgggacctctccaccggggtcaccacccgccgcttcgtcggccacgacaaagacgtcctctccgtcgccttctccgtcgacaaccgccagatcgtctccgcctcccgcgaccgcaccatcaagctgtggaacaccctcggcgagtgcaagtacaccatcggcggcgacctcggcggcggcgagggccacaacgggtgggtctcctgcgtccgcttctcccccaacaccttccagccaaccatcgtctctggctcctgggaccgcaccgtcaaggtgtggaacctcacgaactgcaagctgcgctgcaacctcgagggccatggcggctacgtcaacgctgtcgcggtcagccccgacggttctctgtgcgcgtccggtggcaaagatggcgttaccctgctgtgggacttggctgagggcaagaggctgtactcgcttgacgcgggttccatcattcactcgctctgcttctcgcccaaccgctactggctctgcgcggcgacccaggactctatcaagatctgggatcttgagtcaaagcacattgtgcaggaccttaagcccgagatccctgtctccaagaaccagatgctctactgcacaagcttgaactggagcgcagatggaagcaccctctatgctggttacacagatggaaccatcaggatctacaagatctcaggtttcagctacgccggctagagatggggagtgttgttttagttatcgcgttctggtaaacgactgtggtatcaccctagtgttctttttggctgtttgaaaggcattaatctgcctgagtacttctgcttaatttacccatctatgtagtagctccagtactgagctcatggatactgtggaatagggatctgttttgcacc

SEQ ID NO: 14532 - DNA, 2622 bp, Oryza sativa
  ref <308>: DATABASE ACCESSION NUMBER: AK065106
  ref <309>: DATABASE ENTRY DATE: 2001-12-06
gttacgtttccttccccttcttcttctctcccacgaggtcaaaccagagagagagagagagagagagagagagagagaagaggagatagaagccgcagccaaacgctccacctccaatgccgcgacggccaccgctcccgtccaacgccgcgccgcctcctctccccctcatcctcgcgcgcgggtcgtagggcttcgccgcgtacgtcgcgcgtttctggtggtgggtataagaggaaggggagagtcgtcacagggaggagggggagaaggggcgcgcggcggtggcgatggaggacgcgtggaggaaggcgaagagggcgctggggctcggcctgtgcgtgcacgtgcccgaggcggaggagggggagagggaggactgctcgagcgagcggcggaggcggctgccggcggcggcgagcggcgcgcggtgccggggcgaggccgcggtgacggtggggccggagtcggtgccggcgccgtcggacgttccggtgccgctgccgctccccggcgtggtgcggaggtccaagtcggggagcagccgatcctcctctaagaggaaatgtgcaatatgctttgactccatgcggcatgggaatggtcaagccctattcacagctgaatgttctcatatgttccattttcactgcatctcatctaatgtgaaacatgggaattatttctgcccaatttgtcgggcaaagtggaaagagatacccttcaatcgatcgctatcttctaacattccgcatggaagaattggagttagccgagctcgattgacccaacaagatgccaatatggctcttctccaccaagttccaaaccatcatcagcgagttcgtcgcccacatacttctgagccagcagacttcaatgatgatgaacctttgcagcagccagaagtttttgacaatcttaatgttcgatctactaagactgcagagataaacacatatccagaattctcaaccataccgcagtcctcatctagagatgattttgctattctgatccatctgaaggctcctagtgctaacccagaccagggcacaggtaaattggcgaatgaaagctcagctggatcttcaagaaaccgtgctccggttgatctcgttactgtgcttgatgttagtggcagcatggcaggcaccaaactagcgctcctaaagcgagcaatgggttttgttgttcagcaccttggaccaagcgatcgtctttctgttattgctttctcatctagtgccagaagactgttccaccttcagcgaatatcacatcatggcaggcagcaggcattgcaggcaattaactcacttggtgctagcggcggtacaaacattgctgatgcactgaagaaagctatgaaggtgattgaagaccgcagttacaagaattcagtgtgcagcatcattcttctgtcggacggccaagatacatacaacatttcctcaagtgttcagggggcttcaccagattacaagtcacttgtcccatcttccattataaatgatgctcgccatacggtgcctcttcatgccttcggatttggagcagaccatgactcggattccctgcactcaattgctcaagcttctggtggcaccttttcctttatcgaggatgaaggtgtaatgcaagatgcatttgctcaatgcattggtgggcttcttagcattgtcatccaagagatgcgagttagcatggaatgtgttcatcctggtgttcaactttcttccatcaaatctggtagctacccaagtaaggtggcaagagatggacgaaacggttccgtcgacattggtcacctgtatgctgatgaggagagagacatcttactgtccgtgaacatcccacaatctcgtcatcagacctcagcactgaaggtttcttgtgcctacagagatccggtgacaggtgagacaatcaagattcaaggtgacgaggtgaagatcaaccggccgacaacatccaacatatctgagcatgtgtccattgaggttgaccgcgagaggaaccgcatacaagctgctgaatccatagagtgtgcaagggctgctgccgagaagggtgctctctctgaggccgtggccattcttgaggattgccggaggacactgtcacagtcattcgcaagccggagcggtgaccgtctgtcgctgtccctcgacgcggagctgcgagagatgcaggagaggatggcaaatcgccagctctacgagtcttcagggagggcttacatgctgtccgggctgagctcacactcgtggcagagggcaacagcacgaggtgactcgacggacagcagcaccgtcatctactcctaccagacgccatccatggttgagatgctacagcactcccagaaccatctcccttcgcctcagggccggcaaaggccacggcccccggtgatcgggcaagccccccggtgacggcgaggtagctcaccgccggctgatcttggcaatttccaaaagctccggcgaggagaccacggtgaagcactctgaagcattcatcgtgttaattagctctcgtagttgttagcttgattgttggtacatagtacctgccgattcttcttgcttaattatttgatttgaggctttgagccgc

SEQ ID NO: 14533 - DNA, 1556 bp, Oryza sativa
  ref <308>: DATABASE ACCESSION NUMBER: AK065107
  ref <309>: DATABASE ENTRY DATE: 2001-12-06
ggagggggtgagctccaggtggcggctagggttagggttttagggtgaactcaccgcgccaccacccctcccgcatcttccacctccgcctctaaaccccgcacgcccgcaacccatcgtgcctgattcgtccatccgccattgatggcggtcttgtcaccggcggcgttgtcctaagtggtttgggtgttgtgcaagagggtggtttcgttgcggggggaggaggatccgatggggacgaagaaccagttcgacctgctcgtcgacgtcgacaacgacgacccctcgcacctcatcgccgccgccgagaagaaggcggcggcggcggggtggtccgccaagccggccgcccaggcaaagctgcccaccaagccgccgccgcccgcgcaggctgtaaaggagtccaggaactatggtgctccagcccgtgagggggcaggccgcaatggaccagggcgtggcagtggtggttttggtggaggcaggataggccaaaggcgtgattttggtgagggtgataccaacggtgtagagggagggtatggcgctagcggctttggggatggaattgtgaggagggaagaaggtgaacacagaccttcagagaggggccatggaccacgccagccttaccgtggcggaggccgacgtggcggttacactggtggggaggctggggatgagtctggtcgtgctcctcaccgtgcctatgaacgtcgtagtggcacaggtcgagggcatgggatgaaacgtgaaggcgcaggccgtggtaactggggaactgtgactgatgaagcccttgcccaggaatctggtgaggctgtcagtattgaagtgtctgttaccgtgactgaggaaaacaagcaggaaggtgtaccacaatctgatgaagtcgagaaacacaaggagggtgaatcaaatgaagaggaagaaaaggaacctgaagacaaggagatgactttggaggaatatgagaaagtactggaggagaagaggaaagctttgctttcactgaaggttgaagagagaaaggttgtggtggacaaggaattgcagtcaatgcaacagctctcagtgaagaaggattctgatgaagtgttcatcaagctgggttctgacaaggacaaaaagaaagaaaatgttgaaagagatgaacgcaccaggaagtctcttagcatcaatgaattcctgaagccggctgaaggtgaaagatactacagcccaggtgggcgggggcggggacgtggcagaggacgtggtgaccgtggaggattccgggatggctatagctctcgaggtcctgttgccgcaccaagaattgaagatcaagcgcagtttcccggcttggctgggagattggtgcactagctgccatgatatgatctccttgcactttttgtgggattttaaaaatgtgtctgcacgcgttgcttgctgcatcagtgttgtactgtcaagctacgcatatgccactgttgtgtctcatgtatacccgtgcggccgagccaaatgtttgaaaggtaattttcaaaaaatctcattggaggttttccgtg

SEQ ID NO: 14534 - DNA, 1924 bp, Oryza sativa
  ref <308>: DATABASE ACCESSION NUMBER: AK065108
  ref <309>: DATABASE ENTRY DATE: 2001-12-06
ggttggcagttgccacaaggatatcgtcgcttccgcttctctccctctctcgccccgctctacctcaatcctcttcctcctcgcattccttgccaacctcgccgccccggcctccgacgatcgccggccgccgcctccacagtttccatcgaacgccaggggggggctaaattaaagaaggatacaaaatggggaggagatggcacgccctcgccgccgtcggcgtggccgcctgcgcggccgccgcagtcgccgccggcgacagggggttcacgttcgccgacgcggtggcggcgccggaggaggtgggctacatgaggaaagtcgtcaactttctgtggagcggcgaggcctcttatcaccacgtgtggccgccgatggaatttggttggaaaattgttttgggagtattaattggattctttggagcagcgtttggaagtgtaggaggagtaggtggcggtgggattttcgtgccgatgctgaccttgatcattggtttcgacgcgaaatcatcaacggcgatatcaaaatgtatgataatgggggcagctgtgtcaactgtctactacaacctcaagctgaagcacccaactttggatatgcctgttattgactatgatctagccctgcttatccagccgatgctcatgctagggatcagcatcggtgttcttttcaatgtcatattccctgattggctcatcacagttctattgatcatccttttcctaggcacttcaactaaagcttttctgaagggtgttgagacgtggaagaaagagacaatactcaaaagggaggcagcaaagcggttggagcaaatagctgaagaaccggagtatagtccgctgcccacagggccgaatgccacagctgagtcaaaagccccatcagatgaagcagcatctctatggcaaaatgtttactggaaggagtttggacttcttgcctttgtttggatagcattccttgtgcttcaggtcactaagaattacatgcctacttgctccacgtggtactgggttttgaactttctccagatcccggtgtcagttggggtgaccatgtacgaaggattgggcttgatgcaggggaggagggtcatatcatcaaaaggagatgaacaaaccaatctaaaatttcaccagcttctggtgtactgcttttttggaatgatggctggtgttgttggcggcttgcttggtcttggtggcggcttcatcatggggcctctgttcttggagcttggaatccctccacaggtctcaagtgccacagccacctttgcaatgatgttctcatcttccatgtctgttgttgaatactacctcttggaccggttccctgtgccatatgctcttttcttcaccgttgtggccttttttgcggcgattattggacagcacattgtaaggaagctgatcaattggttagggcgggcatcactcattatcttcattctgtccttcatgatcttcatcagcgcaatctcactaggtggagtcggcatctccaacatgattggcaagattgcgcgacacgagtacatgggtttcgacaacatctgcaattatgatgtataaggctcaggctcacaagggaaatatatgtgcagttcagtgaatagaacattgtgatgtggatttttcagatgtcaaattgtagcaagtacagattgaagcataggggcatgccgatcaatttttttgcctgtaatttaagtaattattattgcccgacaactctggagaggcaaactccaaacataagcagtcgatattctctgaagagaatagcaagagcagatcatttattattctttttactggtttcgttgtcatcgttttatatttaaatgttgtaagaaaaagctaaacagatttggagctcagtgttactgttatttttttttccagtgttc

SEQ ID NO: 14535 - DNA, 3615 bp, Oryza sativa
  ref <308>: DATABASE ACCESSION NUMBER: AK065109
  ref <309>: DATABASE ENTRY DATE: 2001-12-06
gtgtgtgcagcagagtttgcaatcttacatggcttctaacattagtgcagctgctcccatgttggtagaagctttcgatgcctcagtgtggggcgacttctttgtgaactatactccagaaccgttacaggcatgtttatattattgtttatgtgtactactcacaaaatttatgtagacacattctctagctcttaatatacataagttttcttacatatatgtaatttcagtatttttaattaatgctacagcataacccccaacacatatatagtacgttcatagtactcactttggaaatagattaaagaaatacttagttcatataaatgttagttttagttacatacgttgctttgtaagaccattataactaagcaacccagaataatttatatatcacatataaattaaggctgaactaatctaagcatccattactaaggacctcttcggattgagggatttttagaggattttcaagggaatactgtagatagaaaatatttcctttcctgtcattcggttcatagaaatcaacccaaaggaaaatcagaggaaaaattcctttcctgtggaaacaatagagaaacaaaggaaaatttccatccactcctacctcattttttctatttcctatgtttttcctctgcctatccaaacacatgtttaccaatcctatctacagaattcctgtgttttccaatcctccgttttacacatacattcctatcatattcctacgatttttctattcctacgtttttacattcccgtgatccgaataagccctaagtgtagttagtggtagtctctcttctcttattaagccacatcgcctcagttatttctaacccttgaatgattatctatggtccaaattatcttccatcttttattctcttataaagtccctccttttccttctctcattgacccataccacattagttttgcttttgaataagtaatttatatataattgaaattgttataaaccacatcatattgattgtttgtagctttttgtaatagtcgatcaaagataaaatttatgtaaagtatttatgttatttctacagttattatacaaaactctcacagtagtatgcagggttttatctagttattaatgctacagcataaccccatcatatatatagtacatttttcatagtattcactttggaaataaactaaagaaagaattagttcatataaatgttactttttttaatggtacgcaccagacagtgcgaggttcatattgatagagcagaaaaaattacacgattacaaccctaggaggttgtaaccaggaaaacgaagaaaaaatagccacccccacgcatcgacagcaccaacacacatacccgggagaaagctagcatcaaaccagccaccgctaggccaacaaaggaactacagccgatgtctcccaaaacctaacactaacaaccgacaccaaaccctcactctagccacctctttgggattgagggaaagagggtgagagagaagaatggaaccgctctcccccctaggccctccgacgtggccaactagcatacgctagggcgccgacacaagaggacatgcatctagagagtaagcttgcaccagttgtctaggaggattttggcaagggggttgccttgacgacgtctccatggagaggagtgacaaaaacactggcgctgccatccgtcaaggtctcaaagagagacgagattgggttttcacccgacagccccattggagaagatgagacggcacgacaacgccctcaagagggaaagagaagctcgaaaacgccatcgttgccggccgggccaaggctgagcaaggttttcacccgccgcccgccgcctacgaatccacagttgacgcacaattcggaggaatggatgagggataggctgatcaattgaaggaggaggtaactttgctatttgaaacttgcaaggatgtggaggaaaaattgaaacttgtggatgtgctccaacatttgggaatagaccatcacttcgagagacgtattgccgttgctttaagcgacattcatggtgctgaattcaacagctccagcctccatgatgtcgcgcttcgattccgtttgcttcggcagcatgggctatgggtttctccagatgagttcaacaagtttaaaggcccagatgggagattcaacgctgaagtaatagatgatcccatgggcatgttgagcttatacaatgcagctcacctattaattcatggcgaggtggaattggaagacgctattttgctctcaaggcatcaactcgaaacaataatagcaagaaatctcaagtcgtcaccattatctcaacaagtaacacgggcccttcgaatacctttaccacggaccttgaagaggatagaggcgcttaattatatagcagaatacaatcaagagcaagcatgcaatccctctgtgctccaacttgcaaggctggattttaaccttctgcaacttcttcacttgagggagctcaaggaattttctcggtggggaaataatctatacggtgcagtggaactaacctactctcgagatcgtatagttgaatgctacttttggtcctatacaatttactacgaacagaaatatgcgcaagcacgaatcatccttgccaagatattcgtgctagcaaccttactagatgacacttatgatatgcatgctatattggaagagggccaaaagctcaatgaagcaatacagagatgggatgagagtgccatttctgttttgccggagtacttgaagaattactatgccaagctaatgagtaccttcaaagagattgaggatgaactgaaatcagaggagaagtactacattacttatgctgtaaaagcgtatcaaaggttatgcaagtcttacctccaggaagctgtatggtttcatcagaattacataccaagctttcaagaacatttggatgtgtccatcatctcctcgggctcttcaatgctatctgttgtgtcatttgttagtgccggtgatttagcaacaaaagaagcccttgaatgggcctttggttgcaccgatgctgtcaaggcttgtggcgaaattggacgcttccaggatgacttggctgcattcaagcacgggaagggcaaactagatatggccacctctgttgagtcctacatgaaggagcacaatgtcactggtgaggaagccacggctgtgataagtaatctggtcgaagacgcatggaaaactatcaatcaagcacgctttgagcgttcctcgcttgtgccggctgtgaaccgagtcgccaacttagcgatgagcataatgttcttctaccaaggcagcgaagacgcctacaccttcaacaagctcagcatgaatatcatcaagcagctgttcgtcaagcctatccccataatctagatattatactacactccatgtgccagcagtgaattcctatagtaaacatgagatgcctagatgatcttgtcatcatgcaacgtctttaattctttgtgagtgttgaataattgtgtgcacgcatataattaggtgtttgtgtcctcgcaaaaaagaaaaaagaaaaaaaaagtgtttgtgcttgc

SEQ ID NO: 14536 - DNA, 2578 bp, Oryza sativa
  ref <308>: DATABASE ACCESSION NUMBER: AK098894
  ref <309>: DATABASE ENTRY DATE: 2002-08-28
gtccgatcttcttcttcttcccccaaaaatctaattaaaatcccctcccccaaaaacccctctcacccgaatttcctcatggactcggtgccggccgccggagtcggcgtcggcggcggcggcgcgggcgcgggctacccggagtccacggagtcatccccacgcagccggggcggcgactcgtgggacgagcccttcccttcctccgccgcggcggcggccgcggctgccgggggagggaggctccgcctcatgtgcagcttcggcgggcggatcgtgccgcgccccacggacaagtcgctgtgctacctcggcggggagacccggatcgtggccgtcgagcggaacgcctcgctggccgacgtccacgcgcggctctcccgctcgctcctcggcggccagccgtttactctcaagtaccagctccccaacgaggacctcgactcgctcatctcggtctccaccgacgaggacctcgataacctcgtcgacgagtacgaccgcatcgccgccacctcctccggcggcggctcctcccgcacgtcgcggatccgcctcttcctcttcccggccaagcccgagtcatcctcctccctcggctccctcctcgacgactcctccaagtccgagtcatggttcgtcgacgccctcaacagcgccatctccggctccctcgacggcatcccgcgcgggatctccaccgactccgcctcagtcaactgcctcctcggcctcgaggacgactcctccacgcactcccgcggcggcccgcctaactcttctcccgccgaggaacagcgcgccaaccagcagaagctcgccgcggccgcggccgttgctgcggcgaggcacccgcacgacgtgcagtccgtgccggactcgccgatgattgacaagaactcctcgttcggatcaacgtcctctgcgccatcgctgtcgaatctaccgccgatacgggtgcggcccgaggatcgcccgccggatagccgactcgccccgcaggttcccgttgaggatcacttcgcccagatggggatctccgatcagccggtgcagcctgtaattgggggatacatgcagccgccgccacaggtgccgatccccaacatggctgtccccagcatctccccctcggatgcgtccagccgagtgttctccgacgatgacaagtccgatcacggcggcggcggaggtcggaagccgcagccacccaagccggaggttccacctgtcgctgaccccaccaacagagccatgtactacaacgatagatcgcctcctgctgaattgaagcgtgacatgccggttggaactgatgctgccagctatcgtgtgcctgtgccagcccaagatgctgctgccgccgccgccgctgcggctgctgctgcccagcaacccccagctgggtatgtgtatgcacagatgcatgcgccgccaccgcagcagcaacccccaccaccacagcagcaacagccagtcccacagcaatatgtcactgcacaaaatcagcattttcattcacaatccagctactggcacattcatcccaatccaatcctattaccaccatccggtccctcagcaagcaccacagccgcccatgccgcagcctgtgccacagccacaacaatcacacgctttcgacccaaatactggcatgtattacattcccatgcgcacgaatgcgcctcaggcatatagcatgcctcctggtgccgctgctgtgccgcctcccacccttgttgacactacaccaaaaccaaccgtgccaattcctcagatggccgtgaagcagcctgaactgcagcaacctggtttgtaccgaactaccgcagcacctacccctgtaccagcgtctaatgctcctgcgtatgctgggatgggctaccaccatgttattcaaacacaccatcatccagcgccacagcctgcagcgactgtggcaggcaattttggatatgactatggtgatcccacgcgagcacaggtcttctactcgcaggcagcggcaccaccaacattgccacctcagtatcagcccatgggctcgcccgatgctggccaggctgacctgaaacaggcccgggcttcatagctcaaggatttgtgaactctggtatgttgagaatcctagaagtgtagttatcctgccgttaattatcactattgttattacatgttacatgagtcagttggcaaccagtggatggatgatggcattaggcagctgtgcatttgggatcaaaataagatgaaaatgggatggtagttcttgtgttgggtgaaactcaagagggtgtttgtgattggttctggagatgccaatcgccaatgctggagcaagtggcggggagtggcttccaattccaattgccgtcttcttattttttaaaaaaataaatatatagtgtctaaagaactcggtacaaattctgaatcaagaactcatcatttgtgtagccctttgtatatttgaacctggaagttattgaggttgaaatgtcagataaaagtgtcattactttgcttgtagaaacttcatttgagttaaatatcatatatatacatcattcctgcc

SEQ ID NO: 14537 - DNA, 1702 bp, Oryza sativa
  ref <308>: DATABASE ACCESSION NUMBER: AK065110
  ref <309>: DATABASE ENTRY DATE: 2001-12-06
gggggctgagggctgactaatcatggagcaagcagcgaaggccaccatctcactgtcgccgccgagttacgctggatgttgcatggcagcatgtccctaccgatcaacgcggcacctgcgcagaggaggcggctgctctgctcgctccatctcctccctccggcatgccccttctgctcgtgtttacgccgcagccgcagccgcagccacgccggagtccaagtcgacgaaagagaatgacctcgtcttcatcgcgggagccaccggaaaggtgggatcccgagctgtaagggagttcatcaagcttggcttccgtgtccgcgccggcgttagaagtgcacagagagcgtcgtcccttgtgcagagtgttgagcaactgaaagtcgatgacgatgcaacttcgcccgcagaaaggctcgagatcgtagaatgcgacctggagaagcaggcgcagtcagacatcgtgtcggccattggcaacgcggcgattgtggtgtgctccatcggcgccagcgagaaggacatcctggatgtaacgggcccctaccgtatcgactacatggccaccaacaacctcgtgcaggctgcaactgctgcaaaggttgagcacttcatcctggttacatccctgggcacaaacaggattggcttccctgcttttcttctcaacttgttttggggggttctgtgctggaaaaggcgagctgaagaagcgctcatcggcagcggccttccttacacgatcgtccgacctggtggcatggagaggccaacggacgctttcaaggagacgcacaacctggtggtggcagttgaggacacctacgtcggtggactcgtttccaaccttcaggtggcggagctcatcgcgtgcatcgccagcaacaggagaacggcctactgcaaggtggtcgaagcgatcgcagagaccaccgcgccattgctgcccacggaggatcagctcgccaacataccttcaaagcggcaacctccgcccgaacctgaggtagttcagcagggagagacccctccaaaaccgatccagcaaagccaacgaccactctcaccctacacggcatttgtggacctgaagcctccaagctcgccatcgccgtgcccaccatcagcagcagctcctgctcctacttctacagataccgctgcggcaggttcatcgtcaacgttgaactccagcgccaccggcacccccatcagcgtggatcaaccgaagcagcagcagaggcctctttcaccgtacactagatatgaggagctgaagccacccagctcgccgtcaccgacgccgccatcagcagcttcatcggcttctgtttctgcttctcctgatacacctcctgcagcagcagcttcatcggcggcgttggactccagcgccaacggcactcccatcaccggcgatcaactgaatcagcagcagagtcctctttcaccatacacaaggtacgaggaactcaagcctccaagctcgccaaccccatctacccccaaactatagaagcaagatagttagcatataaggctatattcgttttttgccttggccaatcatcactcaagatccagttatccactactagttaattaccttcatccaggaaaagcgacttgtatttttcatgtccaaattcaaaaaaaacaaagagtagtattggaattggaagtcaacaaattaattctctct

SEQ ID NO: 14538 - DNA, 4130 bp, Oryza sativa
  ref <308>: DATABASE ACCESSION NUMBER: AK065111
  ref <309>: DATABASE ENTRY DATE: 2001-12-06
ggtcttccaacttcctagcagcaggttcatctgcctgcctccagcttcaactgcggcgtcgccgcgtcgccgtcgcagtcgccgtcgcggcgactctccggctctcccccgaccgcccccgctataagcctgagctgctcaggcgacggcacgcaaccccagccaggcagccagcctagggagagggaatggcgaccgacaccgccgctccagctgccatgaaggtcgacggcagcgccctcgccgggcgcgcgctggccgcggccggggcgcggcacatgttcggggtggtgggcatcccggtcacctccctcgcgtcccgcgccgcggccgccggtgtccgcttcctcgccttccgcaacgagcagtccgcgggctacgccgccgccgcctacggcttcctcaccggctcccccggcctgctcctcaccgtctccggccccggctgcgtccacggcctcgcgggcctctcccacgccaccgccaacgcctggccgctcctcatggtctccggctcctgctcccagccagacgccggcaggggcgacttccaggagctcgaccagatcgccgccaccaagcctttcatcaagatcgccgtcaaggcaaccaccatcgccgacatccctcgcctcgtcttccaggccctcgccgccaccgtctccggccgccccggcggctgctacctcgacatcccatccgacgtcctccaccaaaccctcacggaatcggaggccgccgccctcatcgacgctgccgccgccgattcggccaaatccgattcttctccacccaagcacaagtccctggacgagggaatcgagaaggcggcggagctgctccgccgcgcggagcggcctctggttgtgtttgggaagggcgcggcgtattctcgcgctgaggacgccatctggaagctggtggataccacgggcatccccttcctcccgacgccgatgggaaagggtgttgtgcccgacacgcacccactgtcggccaccgcggcgcgctctctcgccattgggcaatgtgatgtggcattagtcgttggtgctcggcttaattggttgcttcacttcggtgagccacccaaatggtccaaagatgtgaaattcatacttgtggatgtctgcgaggaggagattgagctccggaagccgcatgttggaattgttggggatgccaagagagttgtggagcttatcaatagggagatcaaggaccagccattctgcttggcaccatcacacccatgggttgaagcaatcaccaagaaggccagggacaatgttcttaagatggaggctcagcttgccaaggatgttgtgccattcaatttcctgacacctttgcggattatccgggatgctatacttgctgagggaaaccctgctcctgtagtggtctcagaaggggcaaacaccatggatgtcggcagggcagtgcttgtgcagaacgagccgaggactagactggatgcaggtacatgggggacaatgggagttggattgggattctgtgttgcagctgcagttgctgagcctgatcgacttgtggttgctgtggagggtgattctggatttggattcagtgcaatggaggttgaggtatgaataatggcattcctgttccactttgacaaataaaacatctaccacaattcacaatttatttgatttaatttgcacaatgctattattagcacctttgttggctcatattctttacttttgctcctgccatgctgttgtgcggtgcaagtgatattcatttttgctcatgcaaaaagtagttgattaagcatgtcatgatatcaaaactattcagacaattctatatagtaataactacctgtcataatattagtataactatgagactgccaactacaatgagctaacaaatccccttaagttatgaaattgggatatcatgcaaataaaatcctctaacaaatagataaagatgacatggcatttaaatagcgttcccaagaatcatgtatcatttatagctgtgctggttgtattatttcttttagataatgaaaatgtttttacatcaccggcttctgccataaggcacacagccaacgcactggttgtttgtatatatttaaataaaaaggtagaagatcctttatcaactcaaattgatcactattgtaccattggtccctaatttgtcatatgtcaactcaaattgatcactattgtagaccgtttctttgacatatgacaaattagatgtacatggataaaagagttgaggatggtccaaggtgaaacaatggcaaggttacctggtccaaagtgaaaacattggttaaagggtgatccaaagtgaaacatcggtaaaaaatgtggcccaaagtgaaatttactcgtattttttatatgttgatcgtagttgtaccttcgtaatatcgaagtaaaaagaatcagaaattcaggatacccttagtcctaaattatacattttacagggaacctaaaattacagcattttacgagaggcctatctggaaatattgccaattggcaaccatgcaattctgtatttatgttaaccttgttgtttcttacattaatgcacataattttcttgaaactaataatgctcattttttgtcattataacaaaatgatatgcttcaatttattaattaaaatccagctgtaaggtaaggccattccaagctttatgttcttctcaatgctatatctgatgtgggagttgtatagcttgtttaataataaatttataagatgacatgatttagtatatagttgtgtttaacccattcaatgaattattagtggagcactcctaaattgtagggtgtaggactcatgctcaataattcgcttcgagtattaataactgtttgagaatttgtggtttgctactactacttgatagttggatatcaattggccgttgtgtgggtcaagcaacaatggaactgtgcaaattaaattatgtgatatagtgtgattaatatttatgtgccaaatattgtcaattgttcctcttgttatgattagatcagccattttaatttttttgcctcttaagtggtagggaggtatactcctccgaaagatgggagaaaacctcactgcttctgtgcctgctaactagttgcacttttaataaaaagagagtagtacatagctattccctctggttttaaatatatggcaccattgacattttccttaaacttcgaccaacaatagtacactagttattcagttacttagttaagtgaaaagagtaccactagacctgtcatcaatagttacactagttattcagttacttagttaagtgaaaagagtaccactagacctgtcatcaatagtactttaaacgtgccgtgtatgtttgtctatttgcatatttcttgaaaagacagtcaaacgaattaaagaaaacaatggtgtcatatattatcggcggtactatgttctattttcacaatattgtactaaaggtaccttaacgtttatactttgttgttcactttgcagacattggtaaggtaccagctgcctgttgttgtaattgtcttcaacaataatggagtttatggcggtgatcggagaagccctgatgagataaccggaccgtacaaagatgatcctgccccaacctctttcgttccagctgctggttaccataaaatgatggaagcttttggaggaaaaggttatcttgttgagacaccagatgagctaaaatccgccctttcagagtcgtttcgtgccaggaagccagcggtgataaatgttatcattgatccttatgctggtgcagagagcggtagaatgcagcataagaactgaaggtgtttgtatcataccagaacgcaggtcccagttaataagcaatgtcctattgaaattaaaacggacacccatggaagaacatcttatatcactgtccctgaaataagaaagatcctgggtagtactccgtacttaatggcatgtgagatatcgaattcaagctgtctgttttgtaatgtaccgtacccgtgttaccgtgtacagtatactaaagaaaaaatgtttgtggttagtaattcactcatgatgtcgatgcatttataagtttgtacctgt

SEQ ID NO: 14539 - DNA, 1843 bp, Oryza sativa
  ref <308>: DATABASE ACCESSION NUMBER: AK065112
  ref <309>: DATABASE ENTRY DATE: 2001-12-06
gatgcgcagttcagactttcagtttagctatagctcgcgaagccgccatgggctcgcacggcgacgacggcggcggcggcggagctcacgtgctcctcctgccgtacccaagccagggccacgtccacccgatgctccagttcgccaagcgcctcgcgttccacggcatgcgccccacgctcgctgtcacccgctacatcctcgccacctgcgcgtcgcccgacgccgccgcggcgggcgccgtccgcttcgccaccatctccgacggctgcgacgcgggcggcttcggcgagtgctgcgacgacgacggcggcggcggcgtcacggcctacctgtcccgcctcgagtccgcgggggcggcgacgctggacaagctcctccgggacgaggcctcagactccggtggacgacgccccgtgcgcgtcctcgtctacgacgcgttcctcccgtgggggcgccccgtggcggcgcgccacggcgccgcggcggtggcgttcttcacgcagccgtgcgccgtcaacgtggtgtacggccacgtctggtgcggccggctgcgcgtccccgtggaggccggcgacggcgaggatggcggcggcggcgccgtcgcgctgcccggcttgccggcgctgtcgccggaggggttgccgtggttcatcaaggtcggccccggcccgtacacggcgtacttcgacctggtgatgaagcagttcgacgggctggagctcgccgacgacgtgctcgtcaattccttctacgagctcgaacccgaggaggcggcgtacatggcgtcggcgtggcgcgccaagacgatcgggccgacggtgccggccgcctacctcggcgacggccgcatgccgggcgacaccaagtacggcttccacctgttcgagctcaccacggcgccgtgcgtggcgtggctgggcgcgcacccgccgcgctccgtcgtgttcgcctccttcggcagcctctccgacctcgacccggccgagatgcgcgaggtcgcgctcgccctcctcgacgccggcgccccgttcctctgggtggtccgctcgtcggagtcccacaagctccccgccggctacgccgccgccgccgccgccgccaacgggatggtggtgtcgtggtgcccgcagctggaggtgctggcccaccccgccgtgggctgcttcctgacgcactgcgggtggaactcgacggcggaggcgctggtcgccggcgtgccgatggtggcgctgccgcagtggacggaccagccgatgaacgccgagtacgtggaggccgtgtggggggccggcgtgcgcgtgcggccggccgccgccgccgggctcgcggcgagggcggaggtggcgcgcgggatcgaggaggtgatgcgcggcgagaggagcggcgagtaccggaggaacgccgcagcgtggatggagaaggccagggcggcgagccgggagggcgggagctcggaccggaacatcgccgagttcgtggccatgtacggatgatatgattttgttgttgcgcacgtgtgcgtgtgtatgttcgcacgtgcgagaaccattaatgataggtatcacatggaatcatatggatggattaaataagggatttattattactggagtaataataagtaaataaatatggcatgattttgtattttggttgaatagtttgtgggtataattcgatcagtttgtggatgctatttcacttgttggtgaaactagggggtgggggaaattctctgcagctttcgttgagatgatgttcagccttcagggcagattttgatatatgattttgttaaagtctctgttgagcattgtaatagggaagctaattgtgtagc

SEQ ID NO: 14540 - DNA, 2796 bp, Oryza sativa
  ref <308>: DATABASE ACCESSION NUMBER: AK065113
  ref <309>: DATABASE ENTRY DATE: 2001-12-06
gactagctccggcggcgagcatgccctagcttcgtctccatcgcaatcgcagcctcctcgagcaggtttggatccagaggcgacgccgccggcctccatcgcatcgcggttcgaatcgaaggatcaagaaaaattgggggttcagctgagctctatgccccaagtgaggcctgcctctgccgagaagccgactcggcaatgggcggcatggacacgccaagaggaacagagctttttcaatgcgctgcgcctggaaggaaaaaattttgagaagatcacgctccgtgtccagagcaaaaacaaggatcaggtcagacattattactatcgtcttgttcgacgcatgaagaacttcttggtcctgagttctcacttgatgcaaaaaattcaaaggacactgttgctgctatgctccgctggtggtctctgcttgaaaaatttagctgcagtgcatcaaaactgcatctgaagcctcggagattcaaaacattcgtagaagcattggtgcatgaccatttgttactttcccactcctttgtaactgtaaaaatgttcatttttgttttttttttctcatgtgatatatccaactttatagggaaatcaactgctaaaggacaggaataaaaccagaaaaaagtgtccacgaggggatgagtgcctttcttcttcatctccaattctgaacaggactgctggaaatgaatcttcctcagtaaaactcctacctgtggatgtctcaaatggtagcaaagtagcatcttcaaaaggggcagttttcaagaggggtgcagaaccaaattccaataacaagtcaggttcaactaaatgggacctctctgccacaattactgtgaaacagaaaaggagagcaggtggtggcattgcatctactgcatataaaaaatgggagagagatgccatggctggtgtttctttagtcgctgatgcagctgaagagcttgagcgcaacacagtgaatgttgatgcaaggacattatctccctcatcaaacaatatccaggcacaaatcgtatgaatgaagcagatcaacaagcacctgcaaagctgaaattgcagttatttccaatcaatgaagccacacgaaaggcattggaaaaggacgaacataatccacatctggaactcacagttagcgctaggaaaaaaatatcttctgtactagaacatcttaaccgcaagtggggcagctcaaacattgcgtctggagagcttttgctttttccatattgtgctcaccgagaagatttagctacctatcagagatggaccacaagagatacagttgtggtggctgatgtttttctttctgtgaatagcccgcctgtttttcgattaaggtatggatgaattcctgggtaacaaactataatattgtgataagaccatttgttgaaagccgtaacaagtgctaactgttgtcgccaataaggtatggttggttttcccttgctgagcttgaaggaggaagtggaatatcttcaactcattttaagaattgcatgatgcctgaagacatccatgccaaatctccctcagacgcttgtgtgcagaaggatggtacttttctcaatagttgtgctcctgaggaacacctttgtaattcaaaagatcggccggcattatttcttgctatgacatttagtacaggcaagagcgctaaggggcaagagcagcacagtgattttcccgcctcatggtttagcaggcagaagcaagaaaaagattccacaaaccaagttttagaggctaatctggggatggattgtgctataatatctgaaggagagtgggcagatacccttactgatatcagtgttggatacttactaacagaagcatccataggtactaatacagattgtccagggacagctattgccaaaaacacattgtttcttgagaatccctgcagctatgattcatttgatgctgctgttgctcttcacgcttctcgtcataaaacagtagagcagccagcccttgcatcccattcgaccatctggggtgctgaagaaacctgtgatgagttcagttttaacttggcagcatctaggaagcaagaaagttcaaacacttcagctagcagctgccctggtagtgatagtggtgttcttccttcaacctcacaagggtttcaaggctttcttcaggacttagcaggagcaaaggttgctgataatccttgtatggatgatgccaaagatatggaggcactttgtgccaattctccacctcgaagtaaaagtgattctgggttaaaggatcaatctctagctgacttatattgggctgattcacttggaccactggacttagagataccatccgtgagataccaagctgaggacttactcttaggagacagtcagaatagttggaatcgcatgatggtgaatagcctggatgcgtttcgaaacctgtcattcttcatggcagataagaatgactcaatcccatccatcatgtagaactgtgaattctgggcgccgttcattgctctcgtcgcttgctatattggctagtgaagtactaccaaggatgcatctcgctgtagaggagggtttgcattgtccaagtgaagctgtttgtgggaaatccaacagctgcggacttgctgttctttgcagtcaagagggacgcattctgctgtgtaagatatatagtaagagctgtactaagatgttacatgtatgtcgtgtaaattgtggtgtccctgtacaaaaagctcacacaatctcttggttacagtaaagcttctgatgactgccgtgt

SEQ ID NO: 14541 - DNA, 1396 bp, Oryza sativa
  ref <308>: DATABASE ACCESSION NUMBER: AK065114
  ref <309>: DATABASE ENTRY DATE: 2001-12-06
tgacgatcccccggtgaagtgccgagctaagctctcgtctcctcgagccatccgcctccaaatccgcggaccagccgcctgcccgccgtcccgcaccgatggccgtgctggaagaagatccggccccggtacccgccgccgattctacctccggtgctagcgatgatgagataacagtggaagaaacttcctttgtgcatactgagcctcctcaagatggcactgctccacctgtggttacctctgatatggaagtccttaatgataaagtcaaaaagcaagtcatcaaggaaggccatggcaagaaaccctcaaggtttgccacatgctttgttcactatagagcatgggttcaaggttcttcgcacaaattcgaggatacttggcaagaacagcattcaattgaactagtacttggaaaagagaaaaaggaaatgactggtttaggcattggtgtcagtaacatgagaagtggggagcgtgcattgttacatgttaactgggagcttggctatgggaaagaaggaagcttttcattcccaaatgtccctccaatggcagaccttgtatatgaagttgaacttattgggtttgatgatgtcaaagagggaaaagcccgaagtgatatgacagtggaagaaaggattgaagcagcagacaggaggaagattgaaggcaatgaatatttcaaagaaaagaagttcgaggaggctatgcagcaatatgaaatggcaattgcatacatgggggatgatttcatgtttcaattgtttgggaagtacagagacatggccttagctgtgaaaaatccctgccatctcaacatggccgcatgcctgatcaaactgaagagatttgatgaagctatcgcacagtgtacaattgtgttgtcagaggatgaaaacaacgtgaaagcgttgttcagacgaggaaaagctagagctgaacttggtcaaacagaatcagcaagggaggacttcctgaaggccaagaagtattctccagaagacaaggagatccagcgcgagcttcggtcgctcgcggagcaggataaagctctgtaccagaaacaaaaggagctatacaaaggtctgttcgggccaaggcctgaacccaaaccgaaggcgtcaaatttcctagttctcttctggcgatggctggtctccttaattggctatcttgttaaactgttcaaacgcaaggatgagtagggataggacatgttttactggaaaaattatgcagtattgaccatcttgtactgtaggttggaaattcgagttgtgcagcacgcaatcggtgtcaaatattgttgttagaaactcctgacatttttgtgcttcgtgagcattggagctatggttcgtatagagcttttaaccttttgcttgtgggt

SEQ ID NO: 14542 - DNA, 1417 bp, Oryza sativa
  ref <308>: DATABASE ACCESSION NUMBER: AK065115
  ref <309>: DATABASE ENTRY DATE: 2001-12-06
gcccgaagcaccacaccacaaccacaacacaccacagcgggtaggccgagagcgcgaatggcgtccctggcgcagcacgtcgcggggctggcgagcccgccgctctggtgtgcgggaccacgcgctcaccaaggaggagcgggagcgggagcggatgtgccagctgttcgacgaggcctccgagcgctgccgcaccgcgcccatggagggcgtctccttctcgcccgaggacctcgactccgccgtcgagtccaccgacatcgacaccgatatcggctcactcattaaaggaacagtgttcatgaccacttcaaatggtgcatatgttgatatccaatcgaagtctactgctttcttgcctttggatgaggcatgccttctcgatgtcaaccatatagaagaggcggggatccgtgcaggtttggtagaagagttcatgattattgacgagaatcctggtgatgaaactttgattttgagcttacaagcaattcagcaagaccttgcctgggaaaggtgcagacagcttcaagcagaagatgttgttgtcacgggtaaagtaattggtggaaacaaaggaggtgtggtagctcttgtggagggccttaagggatttgttccattttcacaagtgtcatcgaaatcaactgctgaagaactgcttgacaaagaactacctctgaagtttgtggaggtcgatgaggaacaaggcaggcttgtcctcagtaaccgcaaggcaatggcagatagtcaagctcagcttggtattggttcagttgtcttgggaactgtcgagagcctgaaaccttatggtgcatttatcgacattggtggaatcaatggccttctccatgtcagccagattagtcatgaccgtgttgcggacatctcgacagttctgcaaccaggagatacgctcaaggttatgattctaagccatgaccgtgaaagaggccgtgttagtctttctactaaaaagcttgagccgacacctggtgacatgattcgcaatccaaagcttgtttttgagaaggctgatgagatggctcagatattcaggcagaggatagctcaagcagaggcaatggctcgtgctgatatgttaagattccagcctgagagtggattaactctcagttcagagggcatcttagggccattatcatcagacacaccttctgagggctcgggagaagggcaaaccacagatgaatagcttcaataggaagattacgtctgagtagaaagctgtgatggtagctcatcaactcattttcccacgatctaaaaggcatgaagaagacctattgtattccaaccatttcccatcttcgatctgtgcttgtatcaatcaatgtgtatgaaagtaaagttactgaaagaaatggatgttgcttccctgttgtaaagttgtccg

SEQ ID NO: 14543 - DNA, 1757 bp, Oryza sativa
  ref <308>: DATABASE ACCESSION NUMBER: AK065116
  ref <309>: DATABASE ENTRY DATE: 2001-12-06
ggccccctcctccctccgttggtctccgcccacccagaggaaaccacccgcccccggtccccggaggaaagcttcggccatggcggcggcggcggcggctcggaggggatgcctggtcgcgcttctggcggtgctcttcttggcctgcgccgctgaggggggtgcggcggcggcgtcggcggcgcagcagcagcagcagctacggcggcggaggcatctgctgcggcggcagcggcaggtgcacagccacctcaggcggctcaacaaggcgcccctcgccagcatcgagagtcctgatggagacatcatagactgtgtgcacatctccaaccagcctgcctttgatcaccctttcctcaagaaccacactatccagatgaggcctgattaccacccagaaggcctgtatgatgagtccaaggttgcatcacagcagaacacccagacaatcacccaaatgtggcacaagaacggcgtgtgcccggagaacaccataccaatcaggaggaccaagaaggaggatgtcctaagggccagctccatcaggagatatggcaagaagaagcacaagagcaccccaaaccccatgtctgtcgaccctgatatgctcaatgagagtggccaccagcatgcaatagcatatgtggaaggtgataagtactatggagctaaggctaccatcaatgtgtggcagccaagaattgagcaggccaatgagttcagcctgtcccagctctggatcttgggtggttcctttgggcaggaccttaacagcattgaagcaggatggcaggttagcccagatctgtatggggacaacaacactagactcttcacctactggactagcgatgcgtatcaggcaacaggatgctacaacctgctgtgctcggggttcatacagataaacaatcagatagccatgggcgctagcatctccccactctccaactatggtggttcccagtatgatatcaatattttggtctggaaggacccaaaggagggcaattggtggttgcagttcggtaatgactatgtgttaggctactggccatccttcctcttctcctacttggcagacagtgcctccatgatagagtggggtggtgaggtggtgaactcggagcctgatggcagccacacctccacacagatgggcagtggccacttccctgaggaaggatttggcaagtccagctacttcaagaacatacaagtggtggattcatcaaacaatcttagggcaccaagtggtattgggtcattcactgagcaatccaactgctatgatgtgcagaatggcaacaatggtgactggggcacatacttctactatggagggccagggaaaaacccaaactgtccatagtagaaatggaaaaattctatccatgcccctaacaaacccttgacacctctgtattatgcagtaaattagtttacacctcttctctttttctcctcttggtttttgttttggtttcaccattttcccaccaggttattaacttctaggtaagtgtttgacatgtgaaatttgttctcttcctcagagatgttggtctggctcttgggaggagtgcggtcaagtttctgaagagaaacaggcctgtttggttggttggtttgtgcacttgtgcctcatgttttgtcaaatattttttgttttctcccatgcatgccttcaacttgattgttggagccttggaggtactgcacttgttaagttgaattcaattaattaagctgttggt

SEQ ID NO: 14544 - DNA, 3198 bp, Oryza sativa
  ref <308>: DATABASE ACCESSION NUMBER: AK065117
  ref <309>: DATABASE ENTRY DATE: 2001-12-06
gactactaccattgccaagccaggccaggccagaccggccatctgcattgcatttgctctctctctctctctctctctctctcggcaccacggacactcgtacagctgccgcctgccggagggttggtggtgtgtttcaggttccagaaaaatcctccagctttttgtggtcgcttgaggagctgagctgtgtgagccttgcaaggtttgcatcaacaagcttgggggtttttcctatcttgttgttctgagggaattcaagaaatgctccaaatggtctgaattcgtaggtttatttgggctggaatctctcagagggtttaagaggaaaaaggaaagaggagaaattgtaaggacaagtagagaagaacatggctgacctggaagcaggcatggttgctgctgccacagaccagggcaattcaacaaggtcacaagatgacgcagccacactgatcccgaacagtggcaatctgggctcgagcaacaggagcaccaagacggccaggttcaaggacgacgacgagctggtcgagatcaccctcgacgtgcagcgcgattcggtggcaatccaagaagtgagaggggtggatgagggtggctccgggcacggtaccgggttcgacggcctgccactggtgtcaccctcgtcgaagagcggaaagctgacgtcaaagctcaggcaggtgaccaatgggctcaagatgaagagctccagcaggaaggcgccatccccgcaggcgcagcagtctgcgaagagggtgaggaagaggctggacaggaccaagagcagcgccgccgtggcgctcaaaggattgcagtttgtgactgcaaaggttggcaatgacggctgggccgcggtggagaagcggttcaatcagctgcaggtggatggtgtgctgctccgttcaagatttgggaaatgcattggaatggatgggtccgacgagtttgcggtgcaaatgttcgattctctggcgaggaagagagggatagtgaagcaggtgctcactaaggacgagctcaaagatttctatgagcaattgactgatcaggggtttgacaatcgtcttcggacattctttgacatggttgacaagaacgctgatggaaggctcacagcagaagaggttaaggagattattgcccttagtgcatcagcaaacaaactttccaagatcaaggagcgagctgatgagtacacagcactcattatggaagagcttgaccctacaaacttgggatacatcgagatggaggacttggaagcactattgcttcagtcaccatctgaagctgctgcaagatcaacaacgacgcacagctccaaacttagcaaagctcttagcatgaagcttgcgtctaacaaagaaatgagcccagttcgtcattactggcagcagttcatgtacttccttgaagagaattggaagcgcagttgggttatgactctgtggatctcaatctgcattgcccttttcatttggaagttcattcagtaccgtaatcgagccgtattcggcatcatgggttattgtgtgaccactgcaaagggtgctgcagagaccctcaaattcaacatggctttggtcctacttcctgtctgcagaaatacaatcacatggattcggtcaaagacacaggttggagctgttgtacccttcaacgacaatataaactttcataaggtcatagccgcaggtgttgcagttggtgttgctttgcatgcaggtgctcatctgacatgtgattttccccggctgctccatgcgagtgatgcacaatatgaactaatgaagcccttctttggggagaagaggccaccaaattactggtggtttgtaaagggaactgaaggctggacaggtgtggtcatggtggtgctcatggcaatagcatttacattagcccaaccatggttccgacgtaacaagctcaaggactccaatcccctcaaaaaaatgactggcttcaatgccttctggtttacccaccacctgtttgtcattgtgtacactttgctctttgtccatggaacgtgcttgtatctaagcaggaaatggtacaagaagacgacatggatgtacctcgctgttcctgttgtcctgtatgtaagtgagcgtattcttcggttgtttaggagccatgatgcagttgggattcagaaggttgcagtgtatcccgggaatgtattggctctttatatgtcgaagccacctggtttcagataccgtagtgggcagtacatcttcataaaatgcactgctgtgtctccatatgaatggcatccattttccataaaatcagcacctggagatgattatcttagtgttcatattcgcacaaggggtgattggacttcacggcttagaactgttttctctgaggcatgccgaccccccactgagggagaaagtggactacttagagctgacctttccaagggaataacggacgaaaaagcaagattcccaaaacttttggtcgatggaccgtatggtgcaccggcacaagattaccgtgaatacgatgtgctacttctcatcgggctgggcatcggagccacccctttgattagcattgtgaaggacgtgcttaaccacattcaaggtgagggatcagttggaaccacggagccggagagcagcagcaaggcgaagaagaaacctttcatgacgaagagagcctacttctactgggtgacgagagaggagggctcgtttgagtggttcagaggcgtcatgaacgaggtgtctgagaaggacaaggatggagtcattgagctccataaccactgctcaagcgtgtaccaggaaggcgatgctcgttctgctctcattgtcatgctccaagaacttcagcatgcgaagaagggcgtcgatatcttgtcgggaactagtgtgaagacccatttcgcacgacctaattggcgaagcgtcttcaagaaggttgcggtcagccatgagaaccagcgcgtcggtgtgttctactgtggtgagcctgtgctggttccccaactaaggcagttgtcagcagatttcacccacaagacaaacacaagatttgatttccacaaggagaacttctaatggtacaaattgagaaatacccgtgtatggttttgtatgtagttctttatcatgtgaattatatggtttctaatatatataaagttggacaaaataaatgaaatgatgg

SEQ ID NO: 14545 - DNA, 2626 bp, Oryza sativa
  ref <308>: DATABASE ACCESSION NUMBER: AK065118
  ref <309>: DATABASE ENTRY DATE: 2001-12-06
ggccctcctcatcggcgcctgtgccttcgcggcggcggcggttgcggcgtccggcgacggttgccgcgccggctgctcgctggccatcgccgcctactacttctccgagggttcaaacctcaccttcatcgccaccatcttcgccatcggcggcggcggctaccaagcgctgctcccctacaacccggccatcaccaacccggactacgtcgtcaccggcgaccgcgtgctcgttcccttcccctgctcctgcctcgggctccccgccgcgcccgcctccaccttcctcgcaggcgccatcccctacccgctccccctcccccgcggcggcggcgacacctacgacgccgtcgccgccaactacgccgacctcaccaccgccgcgtggctggaggccaccaacgcgtacccgccggggaggatccccggcggcgatgggagggtcaacgtcaccatcaactgctcatgcggcgacgagagggtctcgccgcggtacgggctgttcctcacctacccgctctgggacggggagacgctcgaatcggtggccgcgcagtacgggttctcgtcgccggcggagatggagctgatcaggaggtacaaccccgggatgggaggggtctccgggaaggggattgtgttcatcccggtgaaagatccaaatggaagttaccaccctctgaaatcaggtggaatggggaatagcctttctggaggagcgatagcaggaattgtgatagcttgcattgctattttcattgtggccatatggttgattatcatgttctataggtggcaaaagttcaggaaggccacatcgcgtccatctccagaagaaaccagccaccttgatgatgcttcccaagctgaaggcattaaggttgagagatccatagaattctcatatgaagagatttttaatgcaacacagggattttctatggaacataaaattgggcaaggtggttttggttcagtgtattatgctgagcttagaggcgaggttggttcaacatttttctcatcatggacaacctatcagagtgcattcacacataaatcaataaggaggacacaacattttgatgtgcattcttctatcaatttgaaatgacttctctgctgccttcagaaaactgccataaagaaaatgggcatgcaagcaactcaagaattccttgctgaactgaaggtcttgacacatgttcaccacttgaatctggtgcgcctgattggttattgtgttgagaattgcttatttcttgtctatgaatttattgacaatggaaacctaagtcagcatctccaaaggactggttatgcgcctctctcatgggctaccagagtgcaaattgccctagactcagcacgtggtcttgagtaccttcatgaacatgttgttccagtatatgttcatagggatatcaagtctgcaaatatcctattagacaaggacttccgggcaaagattgctgattttggactagcaaaacttacagaagttggaagtatgtcgcagtcactgtcaacacgagttgctggtacatttggttacatgcctccagaagctcgatatggtgaggtttctcctaaggtggatgtctatgcttttggtgtcgtcctttatgaacttctttcagccaaacaagctattgtgagatcaagtgaatctgttagcgaatcaaaaggactggttttcctggtaatatttttcctgctatcaaattgctgtttttcctgttgtcacttgtaaatgttaaccagaattcatgccatgtgctacaattaaatactcagatcaataaatttaccatccttcttccaatagaaaagtaatttcgttatcagtgtatgtaactacgccgatttgattcattaccaaatgttgtgaataagcttgctaatctctcctgttgatctgtgctccaaacctatttttccgtctaaatttgtctgagtggtgatgaaattctaatggtcagcagaatcaaggattgcctcattttgccagaaatcttgcctgaaccatcataacataagtgcatttgtaggatttgaactatccatggaattgtaacacccatactagttactaccatgtatgaaacgctgacgtgcagaaattctcaaagttatggaagatttatgtgtactcgcaactgtatgaactggattgaaaccaggatcttattgttgattgtatcttccacagtttgaggaggccctcagcgctccaaaccccacggaagctcttgacgaactgattgatccgagcctgcaaggggactaccccgtcgactcggctctcaagattgcgtcccttgcaaagtcctgcacgcatgaggagcccgggatgaggcctaccatgagatccgtcgtcgttgccctgatggcgctcacagccaacaccgatcttcgcgacatggactaccaccctttctgaggacaggttaactggaccaagtgtaaaaatgtaaagtgatgtgtaaaaatgtgcagttagtcacttgatggatgcatatcccatttaattgtaggcaaaatttgggtacctgaggaaagcaaaacagaagaatagtttcctgtaattgttttcctctctgattcagtgaaaatatacaagcgt

SEQ ID NO: 14546 - DNA, 1938 bp, Oryza sativa
  ref <308>: DATABASE ACCESSION NUMBER: AK065119
  ref <309>: DATABASE ENTRY DATE: 2001-12-06
gacgcgcgcacccacccacccaaaaccctagcgcgagtggggaggggcgagggggtggtagttgtagtagcagcagcagtagagctaagctagggttttccctccccccgcgcgcgcagcaggcggcatggagagcctggtcctcgcctcctcctgctccgcttctccccgcctgcctcccctctccgcggcccgccgccgccgcccctcctcgcagactctcccggcgacggctgcggcgtccgggcggaggggagctgggaggtccaagctcgtcgtcgtcgccgccgccgccgccgcggcccgcgggtccgggaacggtttcgagggattaaagacaaatggatttgcaagcatgtcgtcttcgaccaacagtgagaatatgtcaactggaacgggttccctacctcccatgccacccccatcgtcatacatcggttcgcctgttttctggattggagttggtgtagcattgtccgcagcattttctatggtctcttcgatggtaaagaaatatgcaatgcaacaagcattcaagtcaatgatgacccaggcaccgccaaacacttttggctcaaactcgcctttcccatttgccatgccaccacaggcagctcctgcagctcctagcagttacccatactcacaaccaaggaaagatacctctcctcaatctgcaactgtcgatgtttcagctactaaagtggaagcaactggaactttggaagaggctgacgtggctgaacagccaaagaagaaatttgcctttgttgacgtttctcctgaagagttgcagcaaaaggaacttcaatcttcactggagacagtggatgtaaaaagtgagagtaaacagagtgaaactatggaggatactgagcaaaaagctccaacaaatggaactgcttttaagatgaatgaaggttctgctagcgggacaactgaatctagcaattcagggcctatgttgtccgttgatacaattgagaaagtgatggaagatccagccgtgcagaagatggtttacccctatttgcctgaggagatgaggaaccctgattcattcaagtggatgctgcagaatccaatgtaccgccaacaactacaggatatgctaaacaacatgggtggatctcctgatcaatgggataaccgaatgctcgatcacttgaagaattttgaccttagcagtccagaagtcaggcagcagtttgcgcaagttggcatgactccagaggaggtagtatcgaaaataatggcaaacccagaagttgctgttgcattccagaacccaaagattcaaacagcgatcatggattgctcacaaaacccgctcaatattgtaaaataccagaacgacaaagaggtcatggatgtttttatgaagatatcacaaatcttccctcaaattaatggctagtggatcgtcgccgtgagattgcagttttgatttttgttgccctatcatctcttccaagtggctgcggtaacatctgttgatcggctgagtaaaaggaaacgaagttcatctgttcagtcattacggacaagatgtaaaagctttcctgtcagggttttttgagttgccaatgtacatcatcatatcgcctagtgtttggtttggtagtgaccctgcctcaagccagagcaggcaacgaagcgaagttaaggattttttttatttacatccccgcgcccccgtacaactgtgtagcttgtgctttgacgttacgaggtttgtggtaggttgtgaagatgcagagatagttcatatcacctcaattttgataatattatgtattatatctgtgttagcattgcaatgcaagcgaacaagtttactatcttccaaagcaacttggttggattggtgcttgtgttactctacatataatttggaggctaataattcaagttcttgaggctactgagctcatgatc

SEQ ID NO: 14547 - DNA, 2693 bp, Oryza sativa
  ref <308>: DATABASE ACCESSION NUMBER: AK065120
  ref <309>: DATABASE ENTRY DATE: 2001-12-06
gccctcccacaaagccaccgcgacgctgcacgactcctctctctctcctcgacctcgacctcgaccggaacgcctctcgccggcggcggcggcggagatggcgatgcggcacctcatcaccgggcagggcaactgcgcgccggacggggcgtcgtcgtccaaccccttcgggaacctcgccaacgccatcttcggccagtcgtccaaggcgcagtcaataaaggaacttccagggtctgcagttaatgttccaacaacatctgaattagggacagctgctcccttatcgaccatccctggttcagagaatgagttcaagcaagatcaactgccacttgcacggggcgctgatttcatccgtgggggtccttctcatgattgggttgaatcttttcggcctccaggactcccagaatttgctgtgccagatgcacagcttaaagaatttgagcaaatttttaacagcacagggccaacctttggaccaccagtcatggatggtccaccacaaagggtcttatctggtgtcctacgttctttcctagcaagtggtcaagctggtgtgccatttcaacctgttccagtaccagcgcttggtttgtctgaaagtgacaagcaatgtatacgtgatcgtagttgcattatggcacgccacattttggctgaccagcctgaagaatatatccaagcacaggtaaacacattgctgcattcacttgatatcgacagtaattatcgaatgaaaggacccatgcacggaccatacccagagatggaggagtattggaatcagtcccaaagcgccatgagatctggtccaatgcacaatgctgcagacaaatggataactgagtttggcaagcaaaataataaccctgaagagtgggctcattcttttgagcagcaatatggttccaatggttgggcctctgagtttgaacagcatcaatctcagatggccatgacaggaggaatgaatatggcaaacctggcagccatggaacaatctcgtatgcttgcacagacattagctagtaataatgacccaaaatttcagaactctaagttcttccagtttgtttcaaagatgagccgtggtgaacttattatagaagataatcaagtaaaacaaggttcagcatcccaatccagtggctgggctgatgaatttcaaacccagtacaatgctaatgcaaactcttgggcggatcagtttgttcatgaagagatgtcacaaggagcagataagtgggctagtgagttctctactgagtataatcagggtggcctcaacgagaactggattgatgagttctccaaaatgcgtgttgacgatgaatgggcagaagagttcagtggaggaacatttggtgaaagctctgctgatccatgggtagatgagttccagaaccaattatcagcttcaaaacagaattctggtgcatctcgaggagtttatgttttttcagacatgaacccatacgttggtcaccctaatccaatgcaggaaggccaggaactgttccgcaaaggcctcctaagtgaagctgttcttgctttagaggctgaagttttgaagaatcctgataatgctgaaggttggagactacttggagtaacacatgctgaaaatgatgatgaccaacaggcaatcgcagcaatgatgcgtgcacaagaagctgatccaacaaacctggaagttcttcttgcacttggtgtcagtcacacgaatgagttggagcagggagaagcattaagatatcttcataggtggcttcagaatcaccccaaatatgggggtatcgcccctccacagccaactgattcaccttatggtcctgatgttattagattgtttaatgaggctgcccaaatgtcacctgaggatgctgatgtccatatagttctaggagtcttgtacaacctatcaagagaatatgataaagctatagctgctttcaagacagcgctgcagctgaaaccacaagactattctctctggaataagctaggtgcgacccaagcaaacagcatccagagtgctgatgcaatattggcctatcaacaggctctggacttaaagcccaattatgtgcgtgcatgggctaatatggggattagctatgccaaccagggattgtatgaagactctattcgatactatgtacgggcggttgctatgaatccaaaagctgacaatgcctggcagtacttgcggatttctcttagtaacgcttcacgagctgacatgatcgctgcatgtgattcacgcaaccttgacgttcttcagaaagagtttcccctgtgagtccaaacattctaggcattgcacttgctcctcaggcccgcccccatgataaagggtacaaggaagtagagaactagcgaaatgggggctgcacattttggaatgatgaaagtgcaaaatggcagtggccgttgtgttgtggttttcggttcgtgtatacgaattgttcattttaacaaggcgcgacatgtatataaaattcaagatgggcacccattcttccgtaggtgtgggaaacgcaaagcagaaggcagttgtcacatgtaattctgtacacagagagggaaagaataaaagaatatcgaacgaatatgtcaaaaggaggcaacacgttcttgtaattttctacagaaaataaagtggtagcaggtttcactgtttcagc

SEQ ID NO: 14548 - DNA, 2729 bp, Oryza sativa
  ref <308>: DATABASE ACCESSION NUMBER: AK065121
  ref <309>: DATABASE ENTRY DATE: 2001-12-06
ggtttttttaggtgtttgggttattgatggtgtggtggtccgcagggcgggggtggcaatgttcgcctgagcgtggtttcttcgccgcgccggtcgtggcctggaaaggtcaagaccaatttctcagttcctgcgactgcgcgaaaaaacaaaaccatggtgactgttgtggaggaggtcgaccaccttcctatatatgatctggaccctaagttggaggaattcaaggatcacttcaactataggataaaaagatacctcgaccagaaatgcctgattgaaaaacatgaggggggccttgaagaattttctaaaggctatttgaagtttgggattaatacagttgatggtgccacaatatatcgtgaatgggcgcctgctgcacaagaagcacagctcattggtgagttcaataactggaatggtgcaaaacacaagatggagaaggataaatttggcatttggtcaatcaagatttcacatgtcaatgggaagcctgccatccctcacaattccaaggttaaatttcgctttaggcatgggggtggagcatgggttgatcgtattcccgcatggattcgttatgcaacttttgatgcctctaaatttggagctccatatgatggtgtacactgggatcctccagcctgtgaaaggtacgtgtttaagcatcctcgacctccaaaacctgatgctccacgcatctatgaggctcatgtggggatgagtggtgaagagccagaagtaagcacatacagagaatttgcagacaatgtgttaccacgcatacgggcaaataactacaacacagttcagttaatggcaatcatggaacattcctactatgcttcttttgggtatcacgtgacaaattttttcgcagtcagcagcagatcaggaacaccagaggatctgaaatatcttgttgacaaggcacatagtttaggattacgagttctgatggatgttgtccatagccatgcgagtaataatgtgaccgatggtctaaatggctatgacgttggacaaaacactcatgagtcttattttcatacaggagataggggctaccataaactctgggatagtcgtctgttcaactatgccaattgggaggtcttaagatttcttctttctaatttgagatattggatggacgaattcatgtttgatggcttccgatttgatggggttacatcaatgctataccatcaccatggtatcaataagggatttactggaaactacaaggagtatttcagtttggataccgatgtggatgcaattgtttacatgatgctcgcaaaccatttaatgcataaactcttgccggaagcaactattgttgctgaagatgtttcgggcatgccagtgctttgtcggccagttgatgaaggtggagtagggtttgacttccgcctggcaatggccattcctgatagatggattgactacctgaagaacaaagaggaccgcaaatggtcaatgagtgaaatagtgcaaactttgactaacaggagatatacagaaaaatgcattgcctatgccgagagccatgatcagtccattgttggtgacaagactatagcatttctcttgatggacaaggaaatgtacactggcatgtcagacttgcagcctgcttcacctaccatcaaccgtggcattgcactccaaaagatgattcacttcattacgatggcccttggaggtgatggctacttaaattttatgggcaatgagtttggccatccagaatggattgactttccaagagaaggcaacaactggagctatgataaatgcagacgtcagtggagccttgtcgacactgatcaccttcgatacaagtatatgaatgcatttgatcaagcaatgaatgcactcgaggaggaattttccttcctgtcatcatcaaagcagattgttagcgacatgaacgagaaagataaggttattgtctttgaacgtggagatttggtttttgttttcaattttcatcccaacaaaacttacaagggttacaaagtcggatgtgacttgcccgggaagtacagagtagctctggactctgatgctttggtctttggtggccatggaagagttggccatgatgtggatcacttcacgtctcccgagggaatgccaggagtaccagaaacaaatttcaacaaccgccctaactcattcaaagtcctttccccgccccgtacctgtgtggcttactatcgcgttgatgaagatcgtgaagagctcaggaggggtggagcagttgcttctggaaagattgttacagagtatatcgatgttgaagcaacaagtggggagactatctctggtggctggaagggctccgagaaggacgattgtggcaagaaagggatgaagtttgtgtttcggtcttctgacgaagactgcaaatgaagcatcagatttcttgatcaggagcaactgttggtgcccttgtaatctggagatcctggcttgccttggacttggttgtggttctttagcagttgctatgtacctatctatgatatgaactttatgtatagttcgccttaaagaaagaataagcagtgatgatgtggccttaaacctgagctgcacaagcctaatgtaaaaataaagtttcaggctttcatccagaataaaacagctgttcatttaccatctctgtttcctgtaacatgatggatacattgaaattgcagaagtttctattggac

SEQ ID NO: 14549 - DNA, 1744 bp, Oryza sativa
  ref <308>: DATABASE ACCESSION NUMBER: AK065122
  ref <309>: DATABASE ENTRY DATE: 2001-12-06
ggctcctccattcttccctcctcctcttccccttcttccagatccattcctcaggaagaaggcagaggctgggagtgggaggaaggcccaagaaccagcaaagaaagaagagaaccatcaaccatgggttgttcttgggctcttgctgctctggttcttggcttcttggtggtggcagtccatggctctgagccgtggctgaatcagacgcaggtctactccaccaatgccaactctggtagcaatggcgtcttcgtcgggattacgctcatccagtcggcggccgccaagggagccgtatgcttggatgggagcttaccagggtatcacctacaccgagggtttggatcaggggcaaacagttggcttgtcaatttggagggtggaggctggtgcaacgatgttaaaagctgcgtgtttcgcaagagcagtcggcgtggttcatcaaatcacatggagagccaactccagtttactgggataatgagtaacaggcctgaagaaaatcctgatttctacaactggaacagagtgaaggttcgatattgtgatggcggatccttcactggtgatggggctgatgcgtctgcaggcctttatttccgaggtcagcgtatttggcaggctgctatggatgatctgatggcccaaggaatgagatatgctaaccaggcacttctttctggatgctctgctggtggtgtttcaaccatacttcactgtgacgagttccgtggattgtttagcggcagtacaaacgtgaagtgccttgctgatgctggaatgtttctggactttgttgatgtttctgggcaacgagaaatgagggacttcttcaatggtattgtgagattgcagggttccggaagaagcctgcctaggtcttgtacctcccgcatggataaaacttcgtgctttttcccccagaatgtggtgccaaacattcaaactccaacttttattttgaacactgcttatgatgtgtggcagcttcaacaaagtgtggcccccaaaagggctgatccgcaaggtctatggcgaggatgtaggatgaatcatgcctcctgtaatagcaaccaactgcaatttttacaaggtttcaggaatcaaatgctcgatgcggtgaggggtttctccggcgcaaggcagaacggtctttttatcaactcctgtttcgcacattgccaaagtgagagacaggacacatggtacgcaggggattctcctcgtctcggtaacaagagaattgctgaagcagtaggcgactggtttttcgatagggcagacgcgaagtacacagactgtgcatacccttgtgatggtacctgccatcatcttacattcaggggagattactaagattcattcttagaccaccaccaaatgtaggtggcaaaaagaggggaaaaaagggacacccaatgggaatatatacagaataagaggaaggtatagatagaggatgcaaagctagtgacttgcatggacatgttcatcattactcagatatgatcttagggcagggcctggtgtgcttgctaatgtggcatgatcaggcctctgcatttagctccacacaccgattgattcttttccattgcctgaattccctggatgatgtatctctgaacatttggaccccaatggtgtatctgtatcataaatttacatatccatgtactaaacgtgataatatgaatgaaataagtaatgtgcctgcaagaaacccaatcatttgtcaggc

SEQ ID NO: 14550 - DNA, 2018 bp, Oryza sativa
  ref <308>: DATABASE ACCESSION NUMBER: AK065123
  ref <309>: DATABASE ENTRY DATE: 2001-12-06
ggggctggagatggagatggagatggagatggagggtgggtttggcacaaatcccgaagcgctccggcgaccactcccaacccagtccccactagggtaacaaccccctttcggattaggtttctagaagcttcttctatgcaggcgccgccgctcgcctcctcgccgtcgccggcgtggaccgccatcctgcccgcgccggcgaggctctgctgctcccgccgcggcgccctccgcctcgaagccaaggccgcctggaggccggcggcccgagggccgcgggtgccggccaagggcgccgtcctcgcctccgaggtggtgggcccctctcccctcctcgacgcgcgcaacgagcaagagctcattttgcatatcagaaaggaagtggagaaagggaagctgcctgcagatgtcgctgccaatctagaagagctatactacaactacaaggacgcggttatgcagagcagggatccaaatgcacacgacatcgtgctttcaaacatggtggccctgttcgattgtgttctgctcgatgtagagaatccgtttacctttccgccttatcacaaagctgtcagggaaccattcgactattacatgtttggtcagaactacattaggccccttgtagactatagaaattcatatgttggtaatatatccattttccaagacatggaacagaagctccaacagggccataatgttgttctgatgtctaaccatcagacagaagcagatccagcaatcattgctttgctgcttgaaagaagcaacccatggatcagcgaaaacatagtttatgttgctggtgatagggttgttacagatcctctctgcaagccatttagtatgggaagaaacctcatttgtgtgtactcaaaaaaagcatatgaatgattttcctgagctagttgatatgaagaggagggcaaatactcgtagtctgaaggaaatggctttacttttacgtggcggttcacagataatttggatagcaccaagtggtggtagagatcgtccggatcctttgacaggagaatggcatccggcaccatttgatgcatctgcagtggacaacatgaggaggcttctggagcattctggtgttcctgggcacatatatccactctcactgctctgctatgaggttatgcctccaccacagaaggttgagaaagagattggtgagcaaagggttatatccttccatggtgtaggcttgtcagtaactgaagagataaagtacagcgacattacggttcatacccaaaatgtcgacgagtgcagagagaaattctcagagtcattgtacaactcagtcgttgatcagtataatgcgctcaagtctgctatctttagaggtcgaggagcagattcatcggacagtgccatctcactctcacaaccatggcgatgaaactccgctttctcagttttgttctgtctggatttctcaatgaagttaccttcatttcttttcgacacagcagatgaactgctgccgacattgcaatttttcctggcagaaccttttaaacttcggtatcctaacccatactaatcatgaaggggaggctgttactgtcatgcaaatcttgcctagtatgatgattttacccagctgaatcccagccacacatgatgcgttcgttcattgtttgcacacaaatattattgcgtcatatgagtattctttgggtcagaactgcacagcaacgcggcctgggcactcaatctggcatgttgtctatggggtgcatgcttgttaacagaagaagcccaacatgtgggattttgttttttgcggttaatttttttcctgttttccttttgttccatgtatatatattcgattttgatctccaggtttggagatacaatggtcaaagtgttatgatagtctcttagtttgttgcctcgaagttatactcgggcgcaacatgtctgactgatattctgatgatgttactcgtttctgaacttcctgacgccaatatggtgcttggatgttg

SEQ ID NO: 14551 - DNA, 2090 bp, Oryza sativa
  ref <308>: DATABASE ACCESSION NUMBER: AK065124
  ref <309>: DATABASE ENTRY DATE: 2001-12-06
gggggagtatttgtgcgtttttatttttgtttttgggtcgcactgttcgatcgtagcatccatgaccactgtggcatcgctgtctttgctgccgcacttgctcatcaagccttccttcaggtgttgctccagaaagggtgttggtagatatggaggaatcaaggtgtatgcggtgctcggtgatgatggagctgactatgcaaagaacaacgcatgggaggccttgttccatgtcgatgacccggggccaagggttccaattgcaaaaggcaagttcttggatgtcaaccaagctcttgaggtggtccggttcgatatccagtattgcgattggagggcgcggcaggacctcctcaccatcatggttcttcacaacaaggtggtagaggttcttaatcctttagcaagggagttcaagtcaattggaaccttgaggaaagagcttgcagaattacaggaagaattggcaaaagctcacaatcaggttcatctgtcggaaactagagtatcatctgcccttgataagttggcacaaatggagacccttgtcaacgacagactgttgcaagatggaggctctagcgcatctacagccgagtgcacttcccttgctccaagcacgtcatcagcgtcccgtgttgtaaacaagaaacctcctcgccggagtctgaacgtgtctggtccagtgcagccatacaatcccagtctgaagaacttctggtacccagttgctttctccagtgacctaaaagacgatacaatggtgccaatagattgttttgaggagcagtgggtaattttccgaggaaaggatgggagacctggatgtgttatgaacacatgtgctcacagagcttgccctcttcatcttggctcagttaatgagggcagaatccaatgcccttaccatggttgggagtattcaactgatggaaaatgtgagaaaatgccatccacaaagatgctcaacgtgcgcatccggtcattaccatgctttgagcaagaaggaatggtttggatatggcctggcaatgacccaccgaagtcgactatcccttctctgctgcctccttcaggatttacaattcacgcagagatagtgatggagctaccagtggagcatggacttcttctggacaatctattagatcttgctcatgctccttttactcatacatccacctttgccaagggttggagtgttccaagcttggtgaagttcttgacaccttcatctgggcttcaaggatactgggatccatacccgatcgacatggaatttcgaccaccatgcatggtgttgtcaaccattggcatctcaaagcctggaaaactagaggggaagagcaccaagcaatgttcgacgcatctccaccagctccatatctgtttgccctcctctaggaataaaaccaggctgctctaccggatgtctctcgacttcgctccatggatcaagcatgtccctttcatgcatatactatggtcacattttgctgagaaggtcttgaatgaggatcttcgactcgtgctcgggcagcaagaacggatgatcaatggcgcaaatgtctggaactggccagtatcatatgacaagcttggtatccggtatcggttgtggagagacgccattgagaggggagtagacaggttgccattcagtaaccaaagtgagagtggatcatagtagctgcattgccaatagcctcttttcaattcttgtcgtatttcttggcgagatgaagatgaagatgaagatgatgatggccagaactagtcagtggatgtatatgcacagtttgtttaggcgtgcgtccctgcatggttggttcaccatctccctgagcttcgttgcagattgaattgggttctggagaggaaaggctaatggaaggagagaatgataggcgacgtcattctgtgtaattttaagtgtacactagcgacagcatcacgggatgcaattgtaatctgaggttgatttgtttttcttctttttttttttctttcctccccttttacccatgtaaaagtcgatcgcatgtcacgctatgatgcatatatatgatcatactattgattattgagcc

SEQ ID NO: 14552 - DNA, 2734 bp, Oryza sativa
  ref <308>: DATABASE ACCESSION NUMBER: AK065125
  ref <309>: DATABASE ENTRY DATE: 2001-12-06
gacctgtcgcctaaaccctagctcgcatctcgaggcatctcgcttcacctcgtcgtcgcggtcgccggagccggagccggaggcggcggaggagatgggcaccggaggcggcgagggggacaagtcggccgtgctgccgctggaggcgctgctggcgctggggctcgaccagcgcacggcggagaacgctctggtcaacagcaaggtcaccgccaacctcgccgccgtcatagccgaggctggtataagtggatgtgataagacggttgggaacctcctgtacacggttgccactaaatacccaaccaatgcgcttgtccatcgtcctgtactcattgactatattgtgtcaacgaagataaagaatcctgcacaactagatgctgctctgtcattccttactaatactggccctgactctttagatactgggaagtttgaagaagcctgtggtgtaggtgtggttgtttcaattgaagagattaaatcaacagtcaatgaggtattaaagcataatatggaggctatattggagcagcgatatcatattaatgttggtaacctatgcggacaggttaggaagaggcacccctggggtgatgctaaggcgaccaaggatgaaattgacaagaagcttgcagagatattaggtccaaagacagatgctgacaatgtaaaaccagtgaaaaagaaaaaggaaaaagcagcaaaagttgaggagaaaaaagctgcagtagtcactgctgcaccgccatctgaggaggaattgaatccatactctatatttcctcagccagaggaaaattttaaggttcatacagaaatattctatagtgatgggaacatatggagagcgcataacagtaaggagattttagagaaacaccttaaggcaaccggtggaaaagtgatgacccgtttcccaccagaacctaatggatatcttcatattggtcatgccaaggctatgtttattgattttggactggcgaaagagagaaatggtcattgttaccttaggtttgatgacacaaatccagaagccgaaaagaaagagtatattgaccacattcaggaaatcgtacactggatgggatgggagccctacaaagttacatatacaagtgattatttccaggctttatatgagcatgcagttgagttaatacgaaaagggctagcctatgtggatcaccagaccgcagaagaaatcaaggaatacagggaaaagaaaatgaatagtccatggagggatagacccattgaagaatcactgaaactatttgaagacatgagacgtgggttgattgctgaaggtgcagcaacactccgaatgaaacaagatatgcagaatgataacaagaatatgtctgatttaatagcatatagaataaaattcactcctcatccacatgctggtgataagtggtgcatctatccaagctatgactatgctcactgcatggtggattctcttgagaacattacacattcgctgtgcacgctcgagtttgacatacgtcgcccgtcatactactggctacttgttgccttgggcctgtaccagccatatgtttgggagtattcgaggctaaacatatcgaatactgtgatgtctaaaagaaagttgaatcgacttgtgacagaaaagtgggtagatgggtgggatgaccctcgtttgttgacactagcaggattgcggcgacgtggagtgtcatcaactgcaattaattcgtttatttgtggaattggaataacaagaagtgacaatagcttaattcgggttgaccgtcttgaatatcatatcagagaagagcttaataaaacagcttcccgtgccatggttgtgttgaatcctctaaaggttgtaataactaacttggaggatgaaaaagtcatagaccttgatggaaaaatgtggcctgatgctcctgcagacgatgcttcatcctactacaaggttcctttctcaagaatcgtttacatcgaaaaaactgattttcgtctaaaggactcgaaagattactacgggctagctcctggtaaatctgccctgctaagatatgcattccccattaaatgtaccgaggttgtttatggtgacaatccagatgacatcattgaaattcgagctgaatatgacccttcaaagactactaaacctaagggtgttctgcactgggttgctcagccagcacctggagttgaaccacttaaggtggaagtaagattatttgataaattattcctctctgagaatcctgctgaactggaggattggctgggtgatcttaacccgaactcaaaagaggtgatcaagggtgcctacgccgtgccatcgcttgcgactgcggttcttggtgacaagttccagttcgagcggctaggctacttcgcagtggacacagactcgacacctgagaacattgtgttcaacaggacggttaccctgcgtgattcgtatgggaaagctgggccaaagtgattgccaacttactgaattttcagtaagtttctttacctgggtgcactgaggttacacagtgggaagaaaactgcagtgtgatacataacgatagtgaaaaaaaagggccctttcttgtaaaatggacttgtttgacttgttatatgtttccatcaaattgtgcatgattgagtatgttctcatgtcaatgaggtttggtgatttgacttctagcatttataaatggtgcaaaccaacattataaacagc

SEQ ID NO: 14553 - DNA, 1507 bp, Oryza sativa
  ref <308>: DATABASE ACCESSION NUMBER: AK065126
  ref <309>: DATABASE ENTRY DATE: 2001-12-06
gcctgcctcctccttcgcacgtattacgtgcgaaaaaaaaaatcatcagcacaagatcgaggaggctttatctgaacaagggagatggcggactacgtgtatgggccggggcggaaccacctgttcgtgcctgggccggtgaacatcccggaccaggtgatccgcgccatgagccgtcagaacgaggactaccgctcgccggcggtgcccgccctcaccaagaccctcctcgaggacgtcaagcagatcttcaagaccaccaccggcacccccttcctcttccccaccaccgggacgggggcgtgggagagcgcgctgacgaacacgctgtcgccgggggacaagatcgtgtcgttcctgatcgggcagttcagcctgctgtggatcgaccagcagcaacgcctcaacttcaacgtggacgtggtggagagcgactggggctacggcgccgacctcgccgccctcgactacaagctccgccaggacccctcccactccatcaaggccatctgcatcgtccacaacgagaccgccactggagtcaccaacgacctttccgccgtccgcaaaatcctcgacaagcacaggcacccggcgctactactggtggacggggtgtcatcgatatgtgcgttggacttccgcatggatgagtggggagtggacgtggcgctgacgggttcgcagaaggcgctctcgctgccgacgggtctgggcatcgtgtgcgcgagccccaaggcgctggaggcgagcaagacggccaagtcggtgcgggtcttcttcgactggaaggactacctcaagttctacaagatgggcacctactggccctacaccccatccatccagctcctctacggcctccgcaccgccctcgacctcatcttcgaggaaggcctcgagaacgtcatcaagaggcacaaccgcctcggcaccgccaccaggctggccgtggaggcgtgggggctcaagaactgcacgcagaaggaggagtggttcagcgacaccgtcaccgccgtcgtcgtgccgccgtacatcgacagcgccgagatcgtgaagcacgcctggaagcggtacaacctcagcctcggcctcggcctcaacaaggtcgccggcaaggtgttcaggatcggccacctcggccacctcaacgagctgcaattgatgggtgccctgagtggagtggagatggtgctcaaggacatcggctacccggtgaagctcggctccggcgtggcggcggcggcggcgtacctgtcgaattcgacgccgctcatcccgtccaggatctgaagcacaacgaacgaaggaaggaaagcaattctcagcagcgatggttctgcctgcagtttggcagaacggaacagcggcaaattaatcctattgcatataatttggtctctgtatgtaaagttaaatttttatacgctccatcgatcagctctatgctaaggagtaaggagtataattttgtgaaggtactgcagcttttacttaattaatcttg

SEQ ID NO: 14554 - DNA, 3158 bp, Oryza sativa
  ref <308>: DATABASE ACCESSION NUMBER: AK065127
  ref <309>: DATABASE ENTRY DATE: 2001-12-06
gactccagccgcccccctggctggctctgcctctggctccggttcttgccgctcgcgatccccaaagcgcggcaatccgccgcacgcgcgcgcgcgcgctcgcactccctccgccccgccgcgccgtccctcctgacgcggcgtctcgccgccgccgccgccgccgccaggttggtggtcgtcgcttcaggttcgcggaagccagcgcgtgggcaagcgtcctggcctccagggacgagccagggttcgccgggaaggaggacggtgagttcattccccatcggattttccagccatggcgctcgaccccgccgacgatccgctgctcgccgattgcaagtacaagttgaatcactttagaataaaagagctaaaggatgtcctgcatcagcttggacttccaaagcaaggaaggaaacaggaacttgtggacaaaattatagcagtattgtctgatcaacaagaacaagactccagattgaatggcttgccaaacaaaaagatggttgggaaagaaactgtggctaaaatagttgatgacacttttgcaaaaatgaatggctccacaaatgctgttccagcctctagaaatcagactgactcggggcacattgtaaagcctaaaaggaagtcagatgattctgctcagttggatgtcaaagtccgttgtccctgtggttattccatggccaatgattccatgattaagtgtgaaggtccacaatgcaatacacagcaacatgtaggctgcgttatcatatctgagaagcctgcagacagtgttcctccagaattaccaccacacttttattgtgatatgtgccgaatcactcgagctgaccctttctgggttactgttaatcatcctgtacttccagtctcaataactccctgtaaagtagcatctgatgggtcatatgctgtacagtatttcgagaagacctttccgctatcaagagctaattgggagatgcttcagaaagatgaatatgacctccaggtttggtgtatcctattcaatgatagcgtacctttcaggatgcagtggcctttacattctgatattcaaattaatggtattcctattagggttgtcaacaggcaacccacacaacagttaggggtgaatggtagagacgatggtccagttttaacagcatatgtgagagaagggtctaataagattgtcctatctagaagtgactctcgcacattctgtttgggagtcaggattgccaagaggagatctgtagaacaggtcctatctttggtgccaaaggaacaagatggtgagaactttgataatgcccttgctcgtgtgcgtcgctgtgttggtggtggaaccgaggcagataatgctgacagtgacagtgatattgaagttgtagctgattctgtctctgtgaatctccgatgccctatgactggttcaaggatcaagatagctggccggttcaaaccctgcgttcacatgggttgttttgatttagaagcttttgtggaacttaatcaacgttcaagaaagtggcagtgcccaatttgcctgaaaaactactctttggacaacataatcattgatccttacttcaaccgcataactgctttggtccaaagttgtggagatgatgtatctgaaattgatgtcaagcctgacggttcctggagagtcaagggtggagcagaactgaagggtcttgcacagtggcatttacctgatggcactctctgtatgcctacagatacaaggtccaagcccaacataagaattgtaaagcaagagattaaagaagaaccgttgtctgaagaaacaggtggccgtcttaagttgggaatcagaagaaacaacaatggccagtgggaaattaacaagagattggattctaacaatggtcagaatggatatattgaagatgaaaactgtgttgtttcagcaagcaacactgatgatgagaacagcaaaaatggaatctataatccagaaccagggcaattcgatcaactaaccagcaatatctatgatcttgattcttctcctatggatgcacattttcctccagcaccaacagagcaggatgtaatagttctgagtgactcagatgatgataatgttatggtgttatcacctggtgatgttaatttcagttcagcacatgacaatgggaatgcattcccacccaacccacctgaagcttcaggaatttgtggggaacaacctagaggagccggcccagatgtgacttcatttcttgacggtttcgatgatctggaactgccattttgggaatcttcgagctctcaagatgctgcaggcacacaggtgacagacaatcaatgcgaaatgcaaaatttcattgtcaaccatcaatttttgcacgagccaattttaggggttaacttgggtggaacagcagcatcaaacacactggaatgtgagcatgatggtgcgttacaagcttgtcagtcgagtgatcaagatggtgatcagaatcaaacatgccatgatgggcactccggggatttgacaaatcttagtatcattagcactcaagatagtttaactaatggcaaaaatgcttctcagaaaaggacaaactgtgaagatggcacggcaggtttagacggctcagttgtcaggagcgcgaatggcttgagaggagagatgccaccacttgggcaggagcaggatcgtacagttagacaaaagttgatattaacaatcgagtcagactctgattagcagctgatgctatttgatgtatggtccctgctatagtgctatgccccccagatgcatgcaccatcaccatcacttattttttggctgtgcactaagaagggcatcacttcttttttggttgtgccctagttgagaagggatagatgttggagctatggtggatggattgatgtttggcggcaagaagctgggtcggttatccttgcttctactaaggtggtattgattgatacagttaggtagggtaggtccattgtgtaggcagcaattttgtagctagcttgcatatacatcacaatggaattgcagtgacagaagttagctgatgtaaatatcatatgatgcttttctgttgcctggtgtacatattatatgatgttttttttttctgttggttggttacatatagagagttactccc

SEQ ID NO: 14555 - DNA, 2139 bp, Oryza sativa
  ref <308>: DATABASE ACCESSION NUMBER: AK065128
  ref <309>: DATABASE ENTRY DATE: 2001-12-06
gatttcaggcaggcaggcgatgaattttagtcttttaggcatagttcatcactgattccggccgggcaattttcaggacactgaaggaggagtatgatcaggctttgggtggtggccacatggctgattgtctgcgcggcggcgcaccccggtgagcagccgctgtcgaggatcgctgtcgagaggacggtccttgccgtcaacgaatcggcgcatgtcaaggcatcgccttgggttcttggactgaagggtcagaacagtgaatgggtagaggtagagttcttccatccaagcccctccaatgacgactggattggagtgttttctccagctaattttagtgctgcaatctgtgagcctgaaaacaagaggcagcgtcccccggtgctatgcacggcacctatcaagtaccaatttgcaaacttcaataatgatggctataataagtctgggaagggctacctgaagcttcagttgatcaaccagagggaagatttctcatttgcactcttttcaggtggcctattgaagccgaagctaattgcagtctcaaacaaggtcgcatttgcaaatccaaaggcgcctgtttacccacgtttggcacaagggaagtcttggaatgaaatgacagtcacctggacaagtggatacgatattaaagaagctgttccttttgtcgaatggggtgcgaaaggaggccgtagttttctttctccagctggaacattgacattcgacaggaatagcatgtgtggtgcaccggcacgaactgttggatggcgccatcctggttacattcatacaagttacttaaaagatctgtggccagattcactgtatacctacagactaggtcataggctaccaaacagtacacttatctggagcaagtcatacagcttcaaagcatcaccttatcctggacaagattctttgcagcgagtagtcatattcggagacatgggaaaggcagaggcagatggttcaaatgagttcaatgacttccagccaggttcactgaacactacttaccagatcatcagagacctggaaaacattgacatggttgtccacattggggatatttgctacgcaaatggttacttgtcgcagtgggatcagttcactgcacagatcgaaccgattgcttcgactgtgccatacatgattggcagtggtaatcatgagagggattggcctggaactggttctttctacggaaaccttgattccggaggagaatgtggtgttcctgctcaaactgtattctacactcctgccgagaaccgtgcgaaattctggtatgcgacagactacggcatgttcaggttctgcattgcccatacagaagaggactggaggccagggaccgagcagtacaagttcatcgagcaatgcctatcatctgtcgacaggcagaagcagccatggctcatattccttgctcaccgcgttcttgggtactcatcctgctcctactatgaagaacagggtacatttggggagccgatggggcgagacacaatagaggagctattacaaaagtacagagttgatcttgccttctatggtcatgttcacagctatgaaagaacatgtccagtttatcagggtcagtgtgtcgttaacgcttcggatcactacaacggcccattcaaagcgacgacgcatgtggtcgttggaggtggtggtgccagcctttcagaattcaccacttcaaagatcaaatggagtcactacacagactttgacttcggcttcgtgaagctcacggctttcaatcattcatccatgctattcgagtacaagaatagccgcgacggcaatgtgtatgatcatttcacaatctcacgcgattaccgggacatcctggcctgctcagttgacaattgtcctcggaccacactggctacctaaagcatgaacggctctagatgggtgagaattgagattggtttgatgtggcctcttagagaactgtagttgctgcacattagttctttttgggactgtaccaataaatctaataagcacagaattttcttggctgtgtattttgttttgttgtagcagtagatgaaattctgaatggtttttgctctaacctggacacctgatgatgaataggttcagaatgtc

SEQ ID NO: 14556 - DNA, 3797 bp, Oryza sativa
  ref <308>: DATABASE ACCESSION NUMBER: AK065129
  ref <309>: DATABASE ENTRY DATE: 2001-12-06
gcggtttttgtttttgttttctttttcttctttctctctcctcctcctcctcctctcttcctctccgcagaggagaaaaccaaatcccatcgcgaaggcgagagagagagagagagagaagaaaaaaagcgagaggagtaataaactcgcgaggttttattttattttattttattgtgtaaatttggcccacggcggcggcggcggagttggcggcggcggcggggctaaaccctagccgaagtggcggtgccggtggtgggcggcggcagcggcgatttggcgggtggacgagctccggatcgccggattcgtggcggggagggggatgaccgcttgttcttgctcaattccggtggatcttacggtggaaggatggcgagctgagtgaaggcgcgcgtgatcttgcagcggtttgtgcgggggaggtttggagcactttgtcattgccggcaaggatggtgccgtcggggccgccgaacccgatgggtcctgggcagccggttggcgcggcctcgttgctcaggacgagctccagcctgctcagcggcggccagcaggggatgggcagtggcggaggcatgcttccttcgcagtcgcccttctcgtccctcgtgtcgccgcgcacgcagtttggtgctaatggcctgctgggaggtggctccaatgtttcctccctgctcaaccggccgtttgggaatgggggacatatgctcggtccggggtcgatgccaggtggtggtgggcttccaatgaataccctccagcagcagagaggagggcttgatggtgctggcgatttggttggcgcgggaggttctgattctctctcgttcccttcatcgtcgcaagttagtttgggcaatcagctgggttcagataatctgcatccaccaccgcaacatcagcagcaacaacaacacctggatgctatgcaggacttgcagcaccagcatcagcatcagcagcaactgccaatgtcttacaaccaacaacagttgccaccgcaaccgccacagcagccgcaggctacagtgaagttggagaatggtggcagcacaggtggggtcaaattggaaccgcagatggggcagcctgaccagaatagcacagcccagatgatgcgcaatgctagcaatgttaaaattgagccgccgcagttgcaagctttgaggagtttgagtgcggtgaagatggagcagcagagttcagacccatcagcattcctgcaacagcaacagcagcagcaacatttgctgcagctgacaaagcagaatcctcaagctgctgcggcagctcaactgaaccttttgcaacagcaacggatattgcaaatgcagcaacaacagcagcaacaacaacagattctaaagaatctgcctttgcagagaaaccaattacaacagcaacaacagcagcagcagcaacagcagcagctacttcgccaacagagtctaaacatgagaactccaggaaaatcggctccttatgagccaggaacctgtgcaaagagattgactcattacatgtatcatcaacaaaacaggccacaggataacaatatcgagtactggagaaactttgtcaatgagtatttttctccaaatgctaaaaaaaggtggtgtgtatctctctatggaagtggtcgtcaaactactggagttttccctcaggatgtatggcattgtgagatatgcaatcggaagcctgggcgaggctttgagaccaccgttgaggtgttaccacgattatgccaaattaaatatgccagtggtacattggaagaattactatatgtcgacatgccacgtgaatcgcagaatgcctctggtcagattgttttggactataccaaagcaatccaggaaagtgtctttgagcagttgcgtgtggtacgcgaaggacatctaaggatagtttttaatcctgatctcaagatcgcttcttgggagttttgtgcaaggcgtcacgaggagcttattccacgtagatcaataatcccacaggttagtcaactgggcgcagttgtgcaaaaataccagagtgctgttcaaaattcgacaaatttgtcaactcaagacatgcagaataattgcaactcgtttgttgcatgtgcccgccaattggctaaagcactggaggtgcctttggtaaatgatctgggatacacaaaacgatatgtgcgctgccttcagattgctgaggtggtaaactgtatgaaagatttgattgattatagcaggcaaaatgggtctggaccaattgctagtttgcatagctttcctcggaggacttcatcaggaggggtaaaccctcaacagtcacagcagcaacagcctgaagaacagcaatctatcccgcagagttcaaaccagagtggtcaaaatgctgctcccatgactggtgtgcaggcttctgcctctgcaaatgcagatgtgacatcaaataattctctcagctgtgcaccctcaacgtctgcaccttcaccgtccgttgttgggctcctccaaggttcaatgaactctagacaagatcatccaatgagcagtgctaatggtccatataccagtggaaacagtgctgcaattcccaaggtgaactcgacaacctcactgcagtcaactccatctacctcttttccttcaccagtgccaacaacatccaataacaacatgatgcctgcccctcagaacacaaaccaactcagctccccaaccgcatcatcaaacctaccgccaatgcagccacctgctactcgacctcaggagcctgatccaaatgagtcccaaagctcggttcagagaatattgcaagatttgatgatgtcaccgcagatgaatggtgttggccagcttgggaatgacatgaaaagaccgaacggacttacatctagtgttaacggagttaattgtttagttggtaatgctgttacaaataactcaggaatgggaggaatggggtttggggccatgggtgggcttggtccaaatcatgcagctagtggattgagaactgcaatagcgaacaatgcgatggcaattagtggtaggatgggaatgaatcacagtgcacatgacctatcacagttgggccaactacagcagcaacagcaacatcaacatcaacatcaacatcaacatcaacagcaacagcagcagcagcagcagcagcaacatgacttaggaaaccaactgttgagtggacttagagcagcaaacagcttcaataaccttcagtatgactggaaaccatctcaataaagatagaacattacaagtttgatatgacgacgtggctgctctcactgggttcattgcttatggagcacaagtaacagtgccgacacctcgaactgtgtcaaagcatttggtctttgcaataatgctgtcatggaaaaaggaatcattcgcgacagcaaagcatctgagccctgtcaactgtatgttgtaactgttcgtttagctgcttgtgtattgtgcaactatggcattttgctgcctgcttcagttgtcttactgaaagatagagttaaaaggattagagccttgccttgcatctgccaccatccttgatggtacggtgttactccttacccggaaaagaagttttccctccctttttttccatgtcagatgacatccgatatgtaatttatcatcccctccgccttccacccttagcaagcatatgtgctgatatctttctttgcctaaggattctctctctttgtagccttacttgactttgtataagctgccataatttagtagtggaaaaagtatcaggaatgttttcgt

SEQ ID NO: 14557 - DNA, 2255 bp, Oryza sativa
  ref <308>: DATABASE ACCESSION NUMBER: AK065130
  ref <309>: DATABASE ENTRY DATE: 2001-12-06
ttttttcctcgtccgctcgctctcgttcatgtacaaataggagggcgcatgcaccttgtttgccattagctctcgacgtagcctagagcgcaagcagcagcagcagctagattggttggttgccaatgatcccggccatctccccgatgatggacggcgccgcgcctctgcttcccgagacgagccccgagagccgccagcaacgtgatccggagagggggaagaggcggacgccggtcctcccggccgtcgtcgcgtccgccgtggtccttctcggcctcgcggcgctcttcctggtgtatggatttcacgacggtggagacgggagggcggccgtactcgcgcccggcaccgtggaggtcgcggcctcgtcgtcccgcggcgtcgtggagggcgtctcggagaagtccaccaccccggcgctgcgcctcggcggcggcgcggtccgggactacgcctggaccaactcgatgctgtcctggcagcgcacggcgttccacttccagccccccaacaattggatgaacgatccgaacggtccactgtactacaagggatggtaccatctgttctaccaatggaacccggactcggccgtgtgggggaacatcacctggggccatgccgtgtcgcgcgatctcatccactggctgcacctgccgctcgccatggtgcccgaccactggtacgacatcaacggcgtctggaccggctcggcgacgcagctgcccgacggccggatcgtcatgctctacaccggcgccacggaggagtcggtgcaggtgcagaacctggccgagccggccgacccgaacgacccgctgctgcgggaatggagcaaggcggaggcgaacccggtgctggtgccgccgccgggcatcgggctgacggacttccgcgacccgacgacggcgtggcgcaacccggccgactcggcgtggcggatcaccatcgggtccaaggaccgcgaccacgcggggctggcgctcgtgtacaagacggaggacttcctgcactacgacctgctgcccacgctgctgcacgtcgtcaagggcaccggcatgtgggagtgcgtggacttgtacccggtgtccacctcgccggccgtcgaggacgggctcgagacgtccaccccgccggggcccggcgtgaagcacgtactcaaggccagcctcgacgacgacagaaacgactactacgccatcggcacctacgacggcgagaccgatacctggacgccggacaacgccgacatcgacgtcgggatcgggctccggtacgactacggcaagttctacgcgtccaagacgttctacgaccccgtcgggcggcgtcgcgtgctatgggggtggatcggcgagaccgacagcgagcgggctgacatactcaagggctgggcctcccttcagtcaattccgaggacagttatgctggacacgaagactggcagcaacctgctccagtggccggtggtggaggtggagaacctccgtatgcgcggcaagagcttcgacggcctcgacgtctctcccggctccgtcgtgccgttggacgtcggcaaagcaacacagctggacatcgaggccgtgttcgaggtggacacttcggcagccgacggtgtcgtcacggaggctggagcagcagcatacagctgcggcacgggcggcggtgcggttggccgtggcttgatgggcccgttcgggcttctcgtgctggccgatgatcagttgtcggagcggacggctgtcttcttctacctggtcaagggagtcgacggcaaccttacaaccttcttctgccaagacgagctcaggtcatcaaaagcaaacgatctagttaagagagtctatggcagcttggtacctgtgctagatggcgaaaacctgtcaataaggattttggttgatcactccatagttgagggcttcgctcaaggagggaggacatgcattacctcgcgtgtgtatcccaccaaagccatctacgagtcggccaaaatctttcttttcaacaatgccacaaatgttagagtcactgccaaatcgctaaagatttgggagctgaactctgcttacatccgtccatatgtagactagatcatttttaatgtaatgggaatgaatgatttgtctacatttgttagttatgtttttataggctaatttatcttttttgcttccttctttatgtcaaactacaactatgacatattactagcaactgaaataaaacataatcaatcatattgttttgcc

SEQ ID NO: 14558 - DNA, 1593 bp, Oryza sativa
  ref <308>: DATABASE ACCESSION NUMBER: AK065131
  ref <309>: DATABASE ENTRY DATE: 2001-12-06
gactactcgaagacgaatcgtaaaagctcaaaaaaaaaaaagagaaaaaaagaaaaaaaagggagacgcggccatggcggggacggggagcttcaaggtgacgaggatctcggagggggcggtgaagccggcggcggcgacgccggaggagacgctgccgctggcgtgggtggaccggtacccgacccaccgcgggctggtggagtcgatgcacatcttccggtcgggcgccgacgcggccccgggcgtcatccgcgacgcgctcgccagggcgctggtcttcttctacccgctcgccgggcgcatcgtggagcccgaggccgggtcccccgccatccggtgcaccgccgacggcgtctacttcgccgaggccgccgccgactgcagcctggaggacgtccgcttcctggagcgccccctcctcctccccaaggaggacctcgtcccctaccccggcgacgaccgcaggggcgtcgagccccacaacaccatcatgatgatgcagatcaccaaattcacctgcggcgggttcgtgatggggctccggttcaaccacgcgtcggcggacggcatgggcgcggctcagttcatcaacgcggtgggcgacatggcgcgggggctcccggagccgagggtgaagccggtgtgggacagggagaagttcccgaacccgagcatcaagcccggccccctgccgggggctgccggtgctggcgctcgactacatcgtcctcgacttccccaccggctacatcgacggcctgaaggcgcagtacaaggcgcacagcggcaagttctgctccggcttcgacgtgctgacggcgaagctgtggcaatgccgcaccagggcactcaacctcgagcccggcgccaccgtgaagctctgcttcttcgccagcgtgcgccacctgctgaagctggacagggggtactacggcaactccatcttcccggtgaagatgtcagcgccgagcgagacggtgctgtcgtcgtcggtgatggaggtggtggacatgatccggcaggcgaaggagaggatggcggtggagttcttccagttcgccaaggaggagacggagcaggacccgttccagatgacgttcaactacgagtccatctacgtctccgactggagcaagctcgggttcgccgaggtggactacggcttcggcccgcccaagttcgccggcccgctcgtcaacaacgacttcatcgcctccgtcgtcatcctcaaggcgccgctgccgctcgacggcacgcggatgctcgccagctgcgtcaccaaggaacactcggaggagttcgtccgcggcatgaaggaggacctgccatgaactgagcaaatgaggtgatgagctttttttcttttgttacttgaagctgctgcttgtgagctgaagtgaagggcttcttctaatagggaggggaacacatgctggtgaaaaatgatgttgttgtaagaggcgtattttgtttgtatttatttgtttctttactcttggttaatacggattcgagttatgttcttagacagtttaatatttgtaccatttgatatgggaataaaagaaaagatatactctccatttgatt

SEQ ID NO: 14559 - DNA, 1185 bp, Oryza sativa
  ref <308>: DATABASE ACCESSION NUMBER: AK065132
  ref <309>: DATABASE ENTRY DATE: 2001-12-06
cagtacatcacacacgcgttatttggggttccggcccaatacgtggcccaatccatcggcatcggatcgaactcccccctctacctcctcctcgtcttccggcgacgcacgccgccgccgccgccgccgccgcctgccctccctactgacgtctcgtctcctcctccagagcagagcaggagagctgagccaggaagccaccgatcatggctgattacgagcaggagcaggagatggaggtggaggccctgcaggccatcctcatggacgacatcaaggagatcgaccccagcgagagcgggctcagcaccacggctcgctgcttccagatcgtgctctcccctcaggatgatgatttcgatgagtcggcttatgtgccagtccaactggctctgatttttgcacacaccgaaaaatatccggatgagcctccgcttttgaatgtcaaaagtgtacgaggaatgaaatcagaagatcttgcatccttgaaagaaaagcttgagcaagaggcaactgaaaatctcggcatggctatggtctatactcttgtcacatcggcacaagattggttaagtgagaaatatggacagaatgctggagatggggaatctgaagaaaatgaggcagaagaagaggaggtcattgtgccccatggtgaagctgttactgtagagagctttctggcttggagagatcgttttgaagctgaattggcgctacagcgtgccaagcttatgccagagtcagctcttacagctccgaaggaaaagaaactctcaggaagacagtattttgaaagtggaaggcatacaatgaaaggagcaagtaccactgctgacgaagaggaggaagaagaggaagacatcgactttgatgaagacttcgatgatgacgaagaggacatgcttgagcattacttagcagaacagtcaggcaagtcggccgcttaaggcttcaaaaccatagaagagagcaaaaatgttttagggaagcacaatgtggttatataatattataggtgaagcctaccattttgtgcgttttcccatgaattggtttgcctgctgatgaataccttcgagaggttatcatcaatctgatttgagtgtattaaagatgaacatacagcggctgcgtaatttacttcgttatgtaatctattgtgtttttggtcggtttgaaccc

SEQ ID NO: 14560 - DNA, 2011 bp, Oryza sativa
  ref <308>: DATABASE ACCESSION NUMBER: AK098895
  ref <309>: DATABASE ENTRY DATE: 2002-08-28
ggtctccgcctgctcctcccaccaccaccaccgctgcttcccttctcccctctcgcccgccgccgcctcgccgcgacgcgcatcggcgccgccccacgaccgcagcagagaagcccaccaccacgcgcggagcggccgaggaggcctcaccactattggtgcgggatggcggaggtcgccgccggcaccgggcagctcattggcgtcgccgtggccacgctcctcgcggcgatcttcctcgccgccgcgctcttggcagccgccggcgccggcggcgggcgccgttggcagggaagcctgcggccgtgggtggctgcggggtggccgacggcgaagggtgcggcggggatggccggaccgacgtcatcgtcgtcggagccggggtcgccggatctgcgctggcatacacgctcggaaaggatggccgtcgtgtgcatgttatagagagagacctaacagagcctgatagaattgtcggtgaactgttacaacctggtggctacctgaaattgatcgagttgggtctcgaggattgtgttcaagaaatagatgctcagcgtgtccttggttacgcgttattcaaagatgggaaagacacaaaactctcctatcccttggagaagttccactcagatgttgctggtaggagctttcacaatggacggtttatacagaggatgcgccagaaagctgcatctttgcctaatgttcaattggagcaaggaactgttacatcattggttgaagaagatggtacagttaagggtgttaaatacaagaccaagtcaggtgaagaattaaaagcatatgcacctctgacaattgtatgcgatggctgtttctcaaaccttcgccgcgccctttgctctccaaaggttgatgtaccatcttgttttgttgggctggtcctggagaattgtcaacttcctcatgcaaaccatggccatgttgtcctggccaatccttcacctatcctattttacccaataagcagcactgaagttcgctgtttggttgatgtccctggtcagaaggtgccttccatagcaaacggtgaaatggcaaaatatctcaaaacagtggttgcacctcagattcctccagaaatctatgattcattcatagcagccattgataagggaagcataagaacaatgccaaacaggagcatgccggctgctccacatccaacccctggtgcacttttgatgggtgatgcattcaacatgcggcatcctttgactggtggcggaatgactgttgcattatctgacattgttgtgctacgtaatcttctcaagcctctccgcaatctgcatgatgcatctgctctttgcaaataccttgaatcattctatacactgcggaagccggttgcttctaccataaacacattagctggtgctctatacaaggttttcagtgcctcacctgatcaggctaggaatgagatgcgccaagcctgctttgattacttgagccttggaggtgtcttttcaaatgggcctattgctcttctgtctggtctgaatcctcgaccattgagtttagtggcacatttctttgctgtcgctatctatggtgtcggtcgcctaatgcttcccctcccttcacctaaacgcatgtggatcggcgtaagactgatttccagtgcatgtggtataattttccccatcatcaaagctgaaggtgtgaggcatatgtccttccccgccactgtccctgcctattatcgtgctcctcgtccaatggagtaaggggggaaaatgaaaggagaagcgaagagaaaatccctgccactgtcctgatcggcggatgtttttcgtggatggcaattttcctgtgtaattggtagtagtcgtcaggccgtgaggttgtgtgtgctgttgttctaatggaacgaggggacctgtatacaccgtcacattccctgtacacttgccactttcgttgttccgtcagggatgcatgtcgactgctaatccttaagctgtatatcccccatgaattc

SEQ ID NO: 14561 - DNA, 1194 bp, Oryza sativa
  ref <308>: DATABASE ACCESSION NUMBER: AK065133
  ref <309>: DATABASE ENTRY DATE: 2001-12-06
gacagttctttagctacccaaaccaactctccgattagattcggcgatccctcttcccccctctcttcgctgcggcacccccgggaatcctccgatccaatccggagcacgccaccgccgccgccgctgccatacggcagccatggcggagccgctctcctcctcttcccagggttcatcggttccctctgctcaggaagaaagggtagtggtaacgaataaacatggagagaaactcgttgggttgctgcagcacatgggttccaacaagattgtagtgatctgccatggctttacagcttccaagaatgatagcatcattgttgatctagcgaatgcacttaccaagaaaggggttggaatcttccgcttcgatttcagtggaaatggagaaagtgaaggggaattccagtacgggaactacagaaaggaggctgatgacttgcattctgttatttcacatcttaatcaggagaaatatgatgtgaaagcaattgttggtcacagcaaaggaggagatgtggtggttctgtatgcctctatctatgacgatgtgcgcacagtggttaatctctctggtcgatttcatttggagaaaggcattgaagaacggctaggcaaagagtttatgaatataattgacaaagagggttacattgatgtcaaaaccaactcaggaaaggttttatataaggtaacaaaagagagtttgatggaacgattgaccactgatatgcataaagcatgcctttccatcagcaaagaatgcaggtttttcacagttcacggttcagccgatgagatcattcctgtggaagatgcatacgaattcgcgaagcatataccgaaccacaagctacatgtcatcgagggagcaaatcactgctacactgctcaccgtaaagagctttctgatgccgtggtggatttcattacatccagtgaggatggggataactcgtcggcataagatgaattgagttgtgatgggttgtttctgtacacttatagaccatttataagcttgttgaagttgccatattatccccatctgaagaatcctggatgttggccattgtgatgtgtgcattcagtatttcagtattgtttctgatttattggtttggaactgaaattctgaaactgtaccatatttgaataagcaataaagcgtcgcaataaatcttttcaacg

SEQ ID NO: 14562 - DNA, 955 bp, Oryza sativa
  ref <308>: DATABASE ACCESSION NUMBER: AK065134
  ref <309>: DATABASE ENTRY DATE: 2001-12-06
gaggagaaaaaacagtcagaagctaaggaagaaaaagtatagacacagtgatacaatggcctgcatcaacacattccagagctgctccgtcctcaagggagcaaagatcaatggtaccaagatcggaggagggaggggatcaccaaccttccggtgccgggcatcgacgttcatggacgggagcctccggctagagatcgacgagaaccctgaagccatcatctccggtgagtggccggagaacttctccctgctcagctacgacgatctccgcgcctacctccagtcacaggaggccgctgctcaagccgacaaccagcgtgtggcgctcctgagtgaagccatgtcggcgcctgtgctggtagccactgccgagcagacgctggaggaggttgagtgccactttgagacggtctcaggtctcccagttatagatgccagcctcagatgtgttggagtgatcgtcaagagtgaccgggccagggcttctcatgggtcaaagacgaagattgcagaagtgatgacctctccagccatcactctaccatctgacaaaacagtaatggatgcggcagctctgatgctaaagaagaagatccacagattaccaattgtaaatcaggacagacaagtgataggtatagttacccgtgctgacgttcttcgcgagttggaagccctgctggaggtttagacgtgcagtggtccatatgcttcggccttgttgtatatatgtaaatatatgccatggtgtttttgaatagcaggcatctctaatctgtaagagtgttgtagcgcgaatcaccaagataagcctgagaaaataaccggagagcttttctttgtacaataagcacactatgagacctccagtgttgtatgcctgtgaaaaaatttacgttagtgaatggtctccacaacaacatagatgaatgaatatgcctagttatctttc

SEQ ID NO: 14563 - DNA, 1926 bp, Oryza sativa
  ref <308>: DATABASE ACCESSION NUMBER: AK098896
  ref <309>: DATABASE ENTRY DATE: 2002-08-28
gcttcttccgcgcctgtttcttggctcccggccgaggacggcgggcgggatgaaggcgggcgagcggccgaagctggtccggggcgtccggcaggagtcgcggcggttccggctgctggtcatcgtcgtcggcttcttcctcgtctccctcaccttcgtcttcgtttccaagcccgacgccatcctcttcagcttgaacggcaagcttccggtggaacaggcgccgacgtccatcctgatccagcagaaggtcaacgagccctccggcgagtcccggaaaacctccaccgacgctctccgtggtgaccccaaagtggtcgacgacgaagctgatgcgaaaccaaaagggacaggaggaggcagcgaggaggaagaggggagagtgctgagcgagccggacccgaccagcggaatgatggagccgacccacaacaaggacggcaacggccataaatctcaccaggagacgttaggcggtggaggagacggggagagtaaagggaatgacgaggagggcgaacacgcggagcagaagcataaagtcaccctcccaacagtttccaattacacaattcatgatgctgctgaggacactgaaaatgccaagcaagaaggtatgaataatgtccagcagggtagcaagcccttgtgtgatttctctaatttcagagcaaatgtctgcgagatgcgtggtgacgttagaattcatccaactgccacttcggtcttgttcatggagcctgaaggttcgcagagggatgaggtgtggaagattaagccgtaccctcggaaaggggatgaattctgcctcagccatatcactgaggtaaccgtgaaatcgagcaaagtggcgcctgaatgcaccaaataccacgatgtgcctgctgtgatcttctcactgaccggctacacggggaacctgttccatgatttcactgatgtgctcgtccctcttttcacgactgcaagcgagttcaatggagaagttcagttccttataacagacatggcactttggtggacgatcaagtaccagacagttctccagaagttatccaagtatcctgtgattgatttcagcaaggatgaccaagtgcactgcttcaagcatgccattgtcgggctgcatgcctatatggagttcacaatcgactcaaccaaggcaccgcacaactattcgatggctgatttcaacagattcatgcgtggagcttactcgctgggcagggacagtgtgaccgtgctcggtgagtaccccaagatcaagccaaggttgctcatcatcaagaggcaccgtacaagaatgtttctcaacctggatgagatcatttccatggcagaggagcttggctttgaggtggtgattgacgaggccaatgtgagctccgatatctcccggtttgcgcggctggttaactccgtcgacgtgatgatgggtgtccatggtgctgggctcacaaactgtgtgttcctgccacagcatgcgacgctcattcagatagtgccatggggtggcctggactggatatcacgcaccgatttcggcaaccctgcagagctgatgggtctgaggtacaagcaatacagcatcggcgtcgacgagagcagcttgacagatcagtaccctagagaccacgagattttcaagaatcctatctcattccaccagcgcggattcgatttcatcaggcagactttcatggacaaacagaatgtgaagctggactgcaagaggttcaggcctattcttctggaggcactggataatctaaacccgtaggctttgagatgctcttgtacaatgttccatttttcttttcacggttcgttccttttacttttatgtagtaaatctgttgtttattctctctctatctctcatggctttcatgaggagatgcaaattgtctgaattatagaaaaatt

SEQ ID NO: 14564 - DNA, 1927 bp, Oryza sativa
  ref <308>: DATABASE ACCESSION NUMBER: AK065135
  ref <309>: DATABASE ENTRY DATE: 2001-12-06
gctccttccgcgcctgtttcttggctcccggccgaggacggcgggcgggatgaaggcgggcgagcggccgaagctggtccggggcgtccggcaggagtcgcggcggttccggctgctggtcatcgtcgtcggcttcttcctcgtctccctcaccttcgtcttcgtttccaagcccgacgccatcctcttcagcttgaacggcaagcttccggtggaacaggcgccgacgtccatcctgatccagcagaaggtcaacgagccctccggcgagtcccggaaaacctccaccgacgctctccgtggtgaccccaaagtggtcgacgacgaagctgatgcgaaaccaaaagggacaggaggaggcagcgaggaggaagaggggagagtgctgagcgagccggacccgaccagcggaatgatggagccgacccacaacaaggacggcaacggccataaatctcaccaggagacgttaggcggtggaggagacggggagagtaaagggaatgacgaggagggcgaacacgcggagcagaagcataaagtcaccctcccaacagtttccaattacacaattcatgatgctgctgaggacagctgaaaatgccaagcaagaaggtatgaataatgtccagcagggtagcaagcccttgtgtgatttctctaatttcagagcaaatgtctgcgagatgcgtggtgacgttagaattcatccaactgccacttcggtcttgttcatggagcctgaaggttcgcagagggatgaggtgtggaagattaagccgtaccctcggaaaggggatgaattctgcctcagccatatcactgaggtaaccgtgaaatcgagcaaagtggcgcctgaatgcaccaaataccacgatgtgcctgctgtgatcttctcactgaccggctacacggggaacctgttccatgatttcactgatgtgctcgtccctcttttcacgactgcaagcgagttcaatggagaagttcagttccttataacagacatggcactttggtggacgatcaagtaccagacagttctccagaagttatccaagtatcctgtgattgatttcagcaaggatgaccaagtgcactgcttcaagcatgccattgtcgggctgcatgcctatatggagttcacaatcgactcaaccaaggcaccgcacaactattcgatggctgatttcaacagattcatgcgtggagcttactcgctgggcagggacagtgtgaccgtgctcggtgagtaccccaagatcaagccaaggttgctcatcatcaagaggcaccgtacaagaatgtttctcaacctggatgagatcatttccatggcagaggagcttggctttgaggtggtgattgacgaggccaatgtgagctccgatatctcccggtttgcgcggctggttaactccgtcgacgtgatgatgggtgtccatggtgctgggctcacaaactgtgtgttcctgccacagcatgcgacgctcattcagatagtgccatggggtggcctggactggatatcacgcaccgatttcggcaaccctgcagagctgatgggtctgaggtacaagcaatacagcatcggcgtcgacgagagcagcttgacagatcagtaccctagagaccacgagattttcaagaatcctatctcattccaccagcgcggattcgatttcatcaggcagactttcatggacaaacagaatgtgaagctggactgcaagaggttcaggcctattcttctggaggcactggataatctaaacccgtaggctttgagatgctcttgtacaatgttccatttttcttttcacggttcgttccttttacttttatgtagtaaatctgttgtttattctctctctatctctcatggctttcatgaggagatgcaaattgtctgaattatagaaaaatt

SEQ ID NO: 14565 - DNA, 3334 bp, Oryza sativa
  ref <308>: DATABASE ACCESSION NUMBER: AK065136
  ref <309>: DATABASE ENTRY DATE: 2001-12-06
gcttctcgcaccgaacccaaccccaacaacactcttccgctcccaccccccgcacactccccgtatttcggaacacgtccccgacggcccgactgccgcacgcggcgaggaggccgcggtaattacgggcttagtccgagggggagaacgcaaaaagaccaggagaagacgaccagggagcgcacgcgcaccgcctcccccccaccctcgccgccggcgaggtctcccgccgccgcctgccattgggagacgtgggctggagagaggcgggagcagcgcgtcagccgtttcccgttcccccccgtcgagaggctccccccgtgatcctcctcctcctcgctcgtcttcttcgccgccgccgccgccgccgcggggatggaggccggcgggtactacaactgcaagaagacggacggcatctgcgaggacgtctgcgacagcgaggtgagcggcccggctccctcctcctcctccttccgccatcagatctgtcgctttcactccccgcgccgcgtgtttctctctctctcgaacccgttcttgacggcgccttgccttgttctgctatttttctttttatcgcgtttggtttgctatgagaaaaaaagaaatttgctcctcaatctcaatctcgattagtggtggctttagctttctctcggagagctcaggttttcgattgatttagtcgcgaggtttgcttgattgctttcgaggaatcgggggcatctgctcgagattgggattaggtggagttcgaggcttggatgcatctggtgccggtagaatctcgcgagctggcagaattggctgtccagcctataattctggagctttattatttttcttggtagaaagtatctggaaatcatctctctttgtggcagtccagatttggatcattcatgccgtggaagaaaataattttgcaaataaatgattagatgattccccactttttctttgtttggtggatctgcattagcatgttattcatagggatgctgtttttttttaattaaaaaaataatccgacatggtaatgagtactttgctccagctatactttattgtcttaaagtacgcggtaacattgttaaacaaaataaattatcttttggatgctgccgcgaaattcacggtggatgctggaaaatcttgtgctttatgccgcggtgatgctatcttaggatattgattttttttaacttgctttctcaattctgtgccttgaatcactggaaagtgttcatgtactcctgcgtactaagttatgctgttttattgtctttccattgcttagtaccactgccaccctgtcatctctgataggactatattcataagcatctttgccaaaatcctcaattctgccatacacaacctgcatcgtttgtaactgtcatctctgataggactacattcataagcatctttgccaaaatcctcaattctgccatacaacctgcatcttttgtaagctttgctgtgctagtggttgataaaccaacgtcctgggtgttgtaaccgttgttgttgaaaatctttgtggtttttatatatatttcactggggtttctatggctgtggaaggatatcgacatagattgcctttttttacttttagctctattcaggttttggctccagttgacgatctgatttctcactttcttctgatttcatttgcagcatggttcaaaggcagtttttagtatgtcaaggctgaagtgcgcacttcgggggtttgatttaagagcacttttgatcctcttgattggtctgccaattctgatctttgttatataccttcatggccagaaagtcacttacttcctcagaccaatctgggaaaagcccccaaagcccttcaaagtacttcctcactactacaacgaaaatgtctcaatggccaacttatgcaagttacatggatggaaagtcagggaaacgccgcggcgtgtttttgatgctgtgcttttcagcaacgagcttgatattcttgatatccgttggcatgagcttagcccttatgtgtcagagtttgtgttgcttgagtccaactcaaccttcactggccttaaaaaggatctccacttcaaggaaaaccgtcaacgttttgaatttgctgaatcacggttgacctatggtatgataggtggtcggtttgtgaagggggagaacccatttgtcgaggagtcatatcagagggttgctcttgaccagcttattaaaattgccgggatcacagatgatgacctgttgatcatgtctgatgttgatgagattccaagtgggcatacgatcaacctcttgagatggtgtgatgacatacctgaagtactccatctccagctcaggaactatctgtactcatttgaatttttccttgatgacaaaagttggagggcttcaattcacagataccgggctggaaagacgaggtatgcacatttccggcaaacagatgaccttctggctgattcaggatggcactgcagcttttgttttcgctacattagtgattttgtcttcaaaatgcaagcttatagccatgttgatcggattagatttaagtacttcctgaaccccaaaagaattcagcatgtgatatgccgaggagccgatcttttcgacatgcttcctgaagaatacacattccaagaaatcattgccaagctgggtccaatcccaagcacattttctgccgttcatcttcctgcttatttgctagagaaagtagatcagtacagttatcttcttccagggcgatgcatgagagagagtggctaggcacttgcagcttgcataacctgatgcgcatggggatcgtggatgatgcccctttggagaacaacatgcgagatattggttgtacctgatacaatttggctgacttagttgagcgatcgcttggcgatttgggtgagttcatgattttgtactggtgtagccaaacattggaagaaggcctgacagcatagcgcatgcttgggcgctgcgttcttgtttttttagaggagctcagcagtgtgtgtgcttttacctcctgagttttacccattacttccatggttgatatatgaactcagaaactcttgtagattgtgaactggatgacatccagaatttttttttatcttgttctgtacagtatcatttacttaccagacgagttaccctgcattgattctccgggcaataatcatcctcctgtcatttgatatatttgctgtacactacagaaagcacatgtataatgcagttggtgtttggtctcagctaactgtttgcaaacaaccagagcaaacaaccagagtcgttgcaggttggc

SEQ ID NO: 14566 - DNA, 1931 bp, Oryza sativa
  ref <308>: DATABASE ACCESSION NUMBER: AK065137
  ref <309>: DATABASE ENTRY DATE: 2001-12-06
ggctctccatgccctccccgtctcactgacggtggtccccaccgccccacgctccccccccgtgggccccgttcgtcggcgaccgaccgctagctccggcgaccccctccccgccgacgagatccggccgtctccggttttcttggagccgctcgtcgtggctggggtggcgccggggggaatggaggcggccggcgctcgcgcgggcggtggcggccgggatctcgccggcggcgcgcctcggtgagatgtgatctgtgatctgtccaacctttgtgtactcgggctcattccacagttaacaaaaaagatggaagatttacaagattgtgactgcaaaagccttgttgctgttcctggttctgtggttctgcacctctttaggctgtttaatcagcaggataattcctggcagaagtacacattagcctactttcttttggtcaggaatgagtacttctctagggattcaaggaagcattcagatgggaagaaccaacttcttgactgctgtgatgattcagaattagatttggatgtgctgtatgctgatttggatagtaaagaactggagcttaagttgcagaaacctgttgtcaagactcaatcaaaaggtgactcaagtgccagtggatcaaatgattgcttctttcctggccttcacgacgacctggctcaggactgccttgcttgggcgagcagatcagactacccatcgctttcttgtttgaataagaagttcaatttgttaatcaacagcgggtatctgtacagactgagaagaaaatatggcattgttgaacactgggtgtatctagcgtgtagcttgatgccctgggaagcatttgatccttcacgcaagcgatggatgaggctcccaagaatgccatgcgacgagtgcttctcttgtgcagacaaggaatcgcttgccgtcgggacacaactgcttgtgtttggccgtgaatatacaggtcttgctatttggatgtacaatttactggcccgtggttggtcccgatgcactccaatgaacctgcctcgctgcctctttgcctcaggaagctttggtgagattgctattgttgctggtgggtgtgataagaatggacaggtgctgaaatctgccgagctgtacaattcagagactggtcattgggagactttgccagacatgaacttgccgaggaggctctcatctggtttcttcatggatggaaagttttatgtcattgggggtgtgtcaagtcagagggattctttgacttgtggagaggaatacaatcttgaaacaaggacatggagaagaatacatgatatgtaccctggagggactagtgcctctcaatctcctcccctagttgctgttgtgaataatcagctttatgcagctgatcaggcaacaaatgtggtaaagaagtacgacaaaggaaataacacctggaacatagtgaagccattgccagtcagagctgactcttccaatggttggggcctagctttcaaggcatgtggtgatagattgcttgttattggtggccatagagtaccccgtggtgaagtaatattgctgcattcttggtgccctgaagatgggaatggtggtgctgactgggaagtgctctcggtgaaggagcgtgctggtgtattcgtttataactgcgcaataatggggtgctgaattacatttctttcggtataatccgtatatgcctcttgtttagcaacccacccatttcttgctgctgcttagctaccccctataatgacctgtaattcagaaaaatgacaccccccttttcgtggagctctcaatgaaatgtttgggagagagcatagagcattcagttcagtttacctggaacttcttttaactcgttcaaaatttgttcttcttgtccagtatgaaatttatgcagtattctttattcatc

SEQ ID NO: 14567 - DNA, 1899 bp, Oryza sativa
  ref <308>: DATABASE ACCESSION NUMBER: AK065138
  ref <309>: DATABASE ENTRY DATE: 2001-12-06
gagaggtgcacgagagcgcgcgcgccgcgccgcgcctcgcctcgctgatccggcaagcaaaccgcggcgccgcgacgcgacgcgaaccccgccgcgccgcgagtgtgggggagcacgaatggtagccggccgcggttaggtaggtgggcgccgcggggtgtcgatagctccggagggtgggggtggggggagcagatccagatccagcgagggcgcgagcaatggcggcgggggcggtgtcggcgctgttcctgctcgacatcaagggccgcgtcctcgtctggcgcgactaccgcggcgacgtctccgcgctccaggccgagcgcttcttcaccaagctcctcgacaaggagagcgacgcggaggtgctctcccccgtcgtccacgatgacgccggcgtctcctacatgttcatccagcacaacaatgtgttcctcctcaccgcgtcccgtcagaactgcaacgccgccagcatactcctcttcctccaccgcgtcgtcgatgtgttcaagcattacttcgaggagctggaggaggaatcattgagggacaacttcgtcgttgtgtatgagttgcttgatgagatgatggatttcgggtacccacaatacacggaagcaatgatcctgagcgagttcattaaaacggacgcgtacaggatggaggtcactcagaggccgcccatggcagtgacaaatgctgtgtcatggaggagcgaggggattcggtacaagaagaatgaagtgttcttggatgtggtggagagtgtcaatatcctcgttaacagcaatgggcagatagtgaggtctgatgtcatcggtgagctgaaaatgcgaacctttctaagtggaatgcccgagtgcaaactggggttgaatgatagggttctcttggaggctcaaggccgaacaactaaaggaaaagcaatagatttggacgatatcaaattccatcagtgtgttcggttggccagatttgagaatgacaggactatatccttcattcctccagatggatcatttgatctgatgacttacagacttagcacccaggtgaaacctcttatctgggtagaagcacaagtggagaaacattcaagaagtcggatacagatcacagtgaagacaagaagtcagttcaaagaaaggagcacagcaacaaatgtagaaattgaagtaccagtgcctgaggattcgacaaacccaaatataagaacttcaatgggctctgcggcatatgcacctgagagagatgcgatggtctggaaaataaaatcatttcctggtggcaaggaatatatgtgtagagcagaatttagccttccaagcataacatcagaagatggaatgcctgaaaagaaggctccgatacgtgtgaaatttgagataccgtattttaccgtgtcgggtattcaggttcgctatctgaaaatcatcgaaaagagtggatatcaggcccttccttgggttcgatacatcacaatggctggtgaatatgagttgagactcatctgattttcacacctctggttgctggaagaaatgattgatttcctggagtccaagcctcccagggggcgtttacagaggcaactcagacgaacattcactcgctggatgggctcccgaggcttcatggttccatctcgcgcaagcgaggaaagctgctgacagccatgttattgattttacccatgttttgctgcaagtttgtcatcagtataggtccccagaatcttcatttcttttctgcgttttgttcccagccgatatctcttgtatcattgtaaaatttatttaatcaactgatgtcacaagcttggatttttttttgtatctcctgtacctaattaacaagcttggatcatgtataccactatgtatatctctcctttccatc

SEQ ID NO: 14568 - DNA, 1013 bp, Oryza sativa
  ref <308>: DATABASE ACCESSION NUMBER: AK065139
  ref <309>: DATABASE ENTRY DATE: 2001-12-06
gacacatcatccctccgcgcaaaagcctatcaacagctaagccaaacagggtcaggagccggagccgtccgggagagggaacactcgagcgatccgtccgtccgcccgcccgtcgtcgtcgcgcgccatggctgaggaggaggccaagaaggtggaggtggaggtcaccgaggcgccacccgccgctgccgctgccgcggagacggagccggctgccaaggacgtcgccgaggagaaggccgtcatccccgcccccgcgccgccggccgaggaggagaagcctcccgtcgacgactccaaggcgctggccatcgtcgagaaggttgcagatgaacctcctgccgagaaacctgctcaagggggctctaatgacagagatgttgctcttgcaagggtggaaactgagaagaggaactcattgatcaaagcatgggaggaaaatgagaagacaaaagctgagaacaaggcttcgaagaagctatctgctattctttcctgggagaacacaaagaaagcaaacatagaagctcaactgaagaagattgaggagcaactggaaaagaagaaggctgaatatgcagagaagatgaagaacaaagtcgcgatcgtccacaaggaagctgaggagaagagagcaatggtcgaggcaaagcgcggcgaggaagtcctaaaggccgaggagatggcagccaagtaccgtgccaccggccatgctcccaagaaactcatcgggtgctttggggcctaaagaaattttcgattcacaacgagcaaacgtgaaagtgttcatcagtggttgctttgcttctttcaccctcccaagtgcgtagtgtgtttgttggtgcaagaaaggtcgtgcctggtgtgtaaagtctggtgttgctgtatataacatattactcccaagacagatatgtttggtgctgtacatgtttgatgcttgacaggcaacattcttatgtgtagttaagaagccacattgttattgttattgacagtaagctgtttgttct

SEQ ID NO: 14569 - DNA, 2793 bp, Oryza sativa
  ref <308>: DATABASE ACCESSION NUMBER: AK065140
  ref <309>: DATABASE ENTRY DATE: 2001-12-06
gatcttttttcccctctcgcctcctggcgattgggttcggcgttctcctcatctcttgttgattcttgcgttgttttttggggccaaatttgttggtctgatttgttcttgaagaagtcggcatgcctccgttccacgattacagagatggtggtgttcttgtgatggagccggcggcgtcggcggctctgttcggcggcgtcaggtcgcggaagcgggcgcgggtcaccgccgtgccgccctgcggcttcgtctccgccgccgcggaggcggtggaggtggtggaggaggaggggttgacggcggccaagaggcagaagcagcagcagcagcagcgggaggcgccgtcgctcgacgctctccccgacgagtgcctcttcgagatcctccgccgcgtgaagggcgcccgcgcccggtgcgcctccgcggccgtctcccgccgctggctcgctctcctcggcggcatccgctcgtcggagatcaagcgagagccggcggcggcggcggtgccggacctcaaccaggtgttcgtcgacgaggacgaggaggaggaggacgagttcgaggtcccccttggcggcggctgctcctccgagaggtgcctcgaggggcgcgaggccacggacgtcggcctcatggcggtggccgtcgccgacgcgctccggggaagcctcgagagcctcgtcatccgtgggagccacccgacgcgcggcgtcaccgacgccggcatctcggccgccgcgcgcggctgcccgtcgctcctctcgctcgccctgtggcatgtccctcagggttgcccggacttgaaggtggtgaccgtcgaggcatgccccggtgttgctgacgagggcctcaaggcgattggccggtgctgcgcgaagctgcagtcggtgaacatcaagaattgcgcgcatgtcggtgaccagggtgtctccggccttgtctgctccgcggccgcatcgcttgccaaggttcgcctccagggattgagcatcaccgatgcttctctttcggtgattgggtactacgggaaggcgatcaccgatctcaccctcgctcgccttcccgcggttggcgagaggggtttttgggtgatggccaacgcccttggcctgcagaagctcaggttcatgagtgtcagctcctgcccgggagtcactgatcttgcgctcgcatcgattgccaagttctgcccgagcttgaagcagctcaacctcaagaaatgcggtcaggtctcggatggccgtctcaaggatttcgcggaatcggcaaaggtcttggagagtttgcagattgaggaatgcaacaaggttactctcatgggcattctggccttcctcctcaactgcagcccgaagtttaaggccctctcactggtcaagtgcaacgggatcaaggacatctgctctgctcccgcgcagcttcccctgtgcaagtctctccgatccctcaccatcaaggattgcccaggtttcaccgatgccagcttggccgtggtcggcatgatctgccctcagttggagaatgtcgacttgagtggtctcggtgcagttacagacaacgggctccttccattgatcaagagttccgaaagtgggctggtccatgtcgacttgaacggctgcgagaatctcacagatgctactgtttctgccttggtgaaggcacatggtagttcgcttgcacgcctcagtctcgaaggttgcagcaggatcactgatgcaagcctgtttgccatttctgagggctgtaccgatctcgccgaacttgatctctcaaactgcatggtcagcgactacggtgttgcagtgttggcgtcagcgaggcagctcaaacttcgtgtcctctcactttctggttgtttgaaggttacccagaagagtgttcctttcttaggcagcatgtcggcatcgttggagggcctcaatctccagttcaacttcattggcaaccacaacattgcatcgctggagaagcagctctggtggtgcgacatccttgcttagaggaacaacaactagttgctggaggtgctgggtcatccatctccagatgcaaatatacgaccgtagcggtagtactcctacttcagtcaagcttcgcagcagcagagttggtttcttgggtcctgtctttgagtcatggtggacttccttcgtcttagagccggttgttttccggggggcatttttagccgagtgctcgttttttgcaggtatcctcttgggatagtgcctgttccttgagccttcggctgccattagcgtggcacccctgcccctctatcccaaccttggtccttgttgattacagtcattacatcatgctgttttttttccattgcgtcgtgttcggagctcaaatattgtcaaagcgtgttcttcttttccggtaattcttgttagtcgcggacatcaacaccgttcgtagaaacttggctgctccagttcttcagtgtccaggtgttcgcgatctcttcgggtgcgtatgtttgttccagttcaggtcttgtgcggcttgcggtatcgtgggtagtgtgtgtgtgtgtgtgtgtgtgtgtgtgtgtgtgtgtgtttgtgtttgcaatgggggttgcttcttatggtgtttgtaggggtctcctgatattatccttggggatccggcctttgcaaggtgcattctgaagggccttgccattgacaaccctgtgtggttgtttttctactccggatccctggttttgctggcagattgttgaatgctgtaatctttgtaaccttcccagattaaataaaatgtggtgtttcagtt

SEQ ID NO: 14570 - DNA, 671 bp, Oryza sativa
  ref <308>: DATABASE ACCESSION NUMBER: AK065141
  ref <309>: DATABASE ENTRY DATE: 2001-12-06
gcctttctcttctccctagcgcctcctttccagaagcttccaaaccctaggcgagcgagagaggcgagacgccatggacgcggacgcggtggcgaaggcgttcgtggagcactactaccggacgttcgacacgaaccggccggcgctggtgtcgctgtaccaggacgggtccatgctcaccttcgagggccagcagtttctcggcgccgccgccatcgccggcaagctcggctccctccccttcgcgcagtgccaccacgacatcaacaccgtcgactgccagccgtcggggccgcagggcggcatgctcgtcttcgtctccggatccctccgcaccggccccgacgagcaccccctcaagttctcccagatgttccagctgcttcccgctggaggcaacttctatgtgcagaacgacatgttccgtctgaactatggttaaggaaagctggatagtcatccatcaacgtactgggccagtgttttatgttgaaactatgagatgctgttgctcttttgattgtttatcgactggtgcaaattattgcaagaaatggtgttaaaagactatgcaccttctggatttgttcttctatgtttctcccatgaactgtggtatggaggcaccatttatgtggaatgtgaatgaagacagcctaaaagattttatc

SEQ ID NO: 14571 - DNA, 740 bp, Oryza sativa
  ref <308>: DATABASE ACCESSION NUMBER: AK065142
  ref <309>: DATABASE ENTRY DATE: 2001-12-06
ctctaggatacaggatgttcagtactaaaattgagatcgtcctgagcaaacaaggacaattgatcactatagtgagtggtggtaggatgggtcaagggactagctgggccagagaggaaggccaggcagccagaccctttccctgcagcccagaagttgcctctcaaccccaaaccttccagcctcctgccccagcacttcgtccttcaggcactaagggattgtcccagcctcggcggatggtctctgggtcagccagagctgtgagttcttccaagagactggcagtggaaagggtaggagttggacccagggatggatggaaattttgtgaggtccaaagcttactgtagtttgggcgtggggctctttaagaaaaggactacaagactactaataccaaattaccaccaaggacctggcagctgaaggaacctgaaggaccctaaacttcattagcttcaaggtaaaaccgcctctagttgaacctgatattttggactagatggcccacccacctaccccagccagcgtggcacctcccaacatgccaggctgggtgaactgatggcagttccctccctagccctgccaggggcggagacaattgtcagccatcccgcagctacggagtgccagaccgcagagacagtgctggtttgacggcaccctcacccctgcacctgcaggatctgtgggcacccccaccaccccgctgggatcgtcgatgcggccgcact

SEQ ID NO: 14572 - DNA, 1102 bp, Oryza sativa
  ref <308>: DATABASE ACCESSION NUMBER: AK065143
  ref <309>: DATABASE ENTRY DATE: 2001-12-06
gggttcgcctccacgcccccctcatttcctcctcgctcctcccccaccattcccacatctctccctcgccttcctcctctctctctctccacatctccctctcgcttccacgcctcctccgctttggcggcttcttctctagggttcgtctcgactcgactcgtcgaagggaagctgctcccatgaccgcggccgacgctgaggcgtgcgcggtggccgcggcggcggacatcatctgctcgctccgcggggccgacctcgccgggtggacgccgccgtgggggacggctgccgcgaaggggaaggaggtggtggtggaggaggaggaggaggagctggcgtggccgacggtggcacgggggaagcggtcgcggtcgtcgcggcgccgctcgccgtcggggtcggggtcggcggcgaccaaggggaggtgggccaggggtagcccggcgtctcccctcgactacagcggcggctccggctccggctcccctctattttgcagacaaggttagagaaatcaagcaaacgaaacggaacgaaatccgaggggcagcaagcaaggccgcagcctgatgagcccgcagccaagcaggaatctcaaaacggcttcgtgctgcctgacctcaacctcccagtggaggacatggctgctgatggatcagctccttgatgcatgaacggctccagattattaccgcggcgtcgctaaccagacaaaagaattttaattgtatatagaggaagctgggctacaaggggctctgatcgctcgctcactcaagatgaagctaaaggagataattaaggaccataccttatgcttgtttgataagttgttcagatttactagagtttagcaccagtgtcatatgatcctccaatcttactaatgccattttaggagcagaaaggaggatcggtttaccttgctttgtctgatagagttatagtagtttttatttaccctggccttgtgtgtcgatgaggcagagggaagattttactttagtagtacaagctccggacagtgtagcttggttgttcatctaagcactgtaagttagggaagaactatctcaatgttcttttgtttattctgtcc

SEQ ID NO: 14573 - DNA, 2212 bp, Oryza sativa
  ref <308>: DATABASE ACCESSION NUMBER: AK065144
  ref <309>: DATABASE ENTRY DATE: 2001-12-06
gatccgctcctcctctcctctcgctccgcttcccaaaaaaaaaagacgagagagagaaaaaaagttctccacgaggaagtagtagtagcgagacgagaggagaggagggagcttgaggaggaagtaggcggcggcgaggtctcgagctgcggcctgcggcgcgggtggtagcttcgcggcggcggcggaggagggggaggatgcggatcccgcggaggaagggcgtggcggggccgctggtgggggcgccgagcaggagggcgcaggtggcggcggtgttcgcgctcgcgctgctgctcggtgtctccgtgctctacgacagcgcccacatcgccgcctcgctccgccgccacggcgtcggcggcggcgggagtagcggcggcggaggaggaggaggaggagacggcgcccgcgcctacacaaacaccaagctctccgccacgacggaggaggcggaggcggaggcggccgaggtgcgctccccaccggcgcagggggtcgaatcggcggtggaggcgacggatcggggcgaggctccaccggagcagccggtggccgcggactccggagcgtcgtcagccgagaccccgccgtctctgctggagcaggtgacggagacgccgccgccgtcgccgtcgtcgtcgtcggcggcggcggcggcggcggaggcgcaggtgggaggggatcacggtggcgagagctgcgacgtgtacaaggggaggtgggtgtacgacgaggcgaacgcgccgctgtacaaggagtccgcctgcgagttcctcaccgagcaggtcacctgcatgcgcaacggccgccgcgacgacgactaccagaaatggcggtggcagcccgacggctgcgacctccccagatttgacgctaagttgctcctggagaaactgaggaacaaacgactgatgtttgtgggggattcgctgaatcggaaccaatgggagtccatggtgtgccttgtccaatctgaggctccctgggagaagaaatcacttgtcaagaatgactctctaaatgtcttccgccttgaggagtacaatgctactatcgagttctattggtcaccttttctagttgagtcaaactcagatgatccaaacatgcatagcatcgttgaccgcataatcaagccaacatcaattgcaaaacatgcagcgaattgggaaggggtggactacttgattttcaacacttatatttggtggatgaatacaccagagatgaaaattttacatggtgggtccttttcaaagaaaccagtgaaatacgatgaaatggaacgtgtagctgcataccggaaggtcctcaagacatggtctagatgggtagaaaagcatgtagatccgaaaagaagtacagtcttcttcatgagtgtctcacctgtgcatatgcagagcgagggctggggaaaaccagatgccataaaatgcttctctgagacgcagccagctatcaattacacaaagaaattggaggtgggcacggactgggatctgttctcgacagctcatcacgtaacgaaggctatgaagagggtgccagtgcacttcatcaacataacggcgttgtcagagatccgcaaggacgcgcacacatcggtgaacaccctgcggcaggggaagctcctgacgaaggagcagaaggcgaacccccgcaagttcgcggactgcatccactggtgcctacctgggttgccagacacatggaacgagttcatttacggtcacatcgtctcgagccctcaaaggaggccggttgagccgattgagaatcaacctcagagataacagtgaagaatttgtctatttggaatccattagatcgtttagcgaggaagaagtggcggccgaggccataaattattttctaggtttaggaatctatgctgttgattcacctagggtttaaacagaatggtggccatggggtagagaaatgtagctgtaagcaaccaagatagccctagacgagagctctgatgctgtctgagagtttgaatgcggttgtttctgaggagaatgctttctctgcttcccgtccaaaaaaggtgagtgtatttccatggatgcatgtatataatcttactaaattcttttggggaattgttttcggtttgtcccgtggacaattttcttgaactgtcgcaaacgttccagtaaagctgcaacagtcaatatacaaattggctgttgccttgtgattc

SEQ ID NO: 14574 - DNA, 2934 bp, Oryza sativa
  ref <308>: DATABASE ACCESSION NUMBER: AK065145
  ref <309>: DATABASE ENTRY DATE: 2001-12-06
gggagtaccaaaattccccagtagcagccgccgccgccgccgccgccgattcaccaacccttctcctccatcggcatgtcgcgggggggaggccggctgcccccgcgcttctctctacccagctgtacctgtacctgaatgcttctatcatgcgagtgaactgatataggacgaagggtcaggaggcgttgggatttgtactgctccatcaagcatctgcatcaccttatgcattgttggccgcatcgatggctcctcctggaggcaccacagtgccacagcaacgaagcgctccaccttttttatgttgaagattgcctcgtcatcgctcgccaccacacacaagctcaagcaggatcactccaaagctataaacgtcgaccttagaagtaatccctatgttcttgaaccactcaggtgcaacatatcctcgagtaccccgaatgccggtgtttgtttgtgtctgattcaccggaagaagctttgctagaccaaaatctgaaatctttgctacaaaaattatcatcgagaaggatattctgtggtttcatatcgcagtggatgatttgtttattacactcctcatgtaggtagaacagtcctcgtgaaaccccaagtgctacttgaacacggaggctccaatgcggatgactatcgttgaagaggaatgtattgagtgagccattgctcatgaactcatacactagcagcttttcagttccctcattgcaaaaaccaagcagtctaactaagttcctgtgaaacgtctgcccaatggtttggacttccaccaagaactccttttgtgcttcctgctgaagcttttcgattttcttgactgcgatgttagttccacactcatcttgcagctgtcctttgtagacaatacctgaggctcctgtaccaagtacctcatggaaaccaccggttgccttttccagctctctgtaagtgaaaatctttgaaggtaatccagaattactgggtagttgcgataactgggttttcttcctcgaggtgatactacaataagtaccaaaaagcagaacaaagattaggagaaagttcaccaatacagagcttccaaaaaacaatgagctcccaagaatccaatactttttgtccttcttccatttgctggagccgctgctgatcatggatggtgaattggtgctcctaggcaccttaagaagaactgtcgcctgtaaactggaatccatattcccatttgataaagggagcttctttttataacaagtgtttgagggtttattgaacacggcaacggagcagaagcaatcaatgacgcacagccttcggcattcggtctcatctatcgggctgtactgctcgtagtcagatagaggccaattaatgcgatcaattggtgtcatctcatactgcaccattgctgctgtctcatctagatcacagctttgtggctcaaaatctggcctgcaacctttgtatgtcctctcattgtcgaagaacttgtacctctgtgggcatagacaatttgttgtgttcttggtgccatcaaaggtacagtaactgttgaagccgcatgcaccactgcctacctttgtttgaattgtctggcagatgttctccggaagtgcatccaccgctctccattgctcttgccataagctcctggcctgtttgctctttgggtaaatatattgccggaacacaccatctgtatcaagggttgcacggtggaagaaatcacccatagagtccactcctgcagaagtgatgtttatctgtgaaccattagtcagcgtgaagtatatccttccagtttcattgaacaccagctgtgagccattccccactgtgttactggcccagtatggatcatggtagtatgcagaaggtacagcaactagatacagcacaagattaccgtcatcttgaacatttagttgaaaccggccattggaatagtctgtggcgaggagacggctgtggagtgctgtccctagtgggagcacttgtgtgggtaggatggtatcagaagggtcaccaaaggactcccactttgttgcgccatcagtgcctaaaagcctgaaattaccggtgtcgagcattctagcatagcccacatcagtgactcgtggattccatacctcgttgccagatggatcgcgaagagagagtgctccatcagcgagcttgaggatagagccagcttggacttgtatcggtattgtatcatcttgcctattggagctagtcttggcataccagatgacggtcttgtcagcgatcttgttgaaccagacagcgagcaggtatgaggaggagtttccatctaccgccagaaaaccgaatgcaaaatcagcagtgggcgagatccatgagttgtttatcccctggggtgtcaaagaggagcctatgctgatgtttagctgggcttgggcagatttggtgcagtatagtagcaagagttgcaggatgggcaagaacaggagaggtgccattgctattgatcaaccttttgctcgtactagatgacaacaaaacttatagcccttggagagcggcatttgttagtcttgatcacttccatacttgactaaccaaaagtttctctgcgaggcaaccggttgaacctgtcaaatgcaattacaaagctgtcaatatgatagacataagagggagattggttcacatttccttatcaaaactatagaaaatatcggctttgaatgcattgaccacctgtatggagagagaaagaaagacgtgttcagaagtctttagagaaagaaatacgtgttcagaagtctttctatgtgtttctttcctcctgaggttggtctttccaaccgcgtttcagaagaacagttttggccagcttgtatggttatggtcaagccaggtgtaatcttttcatggtaatataggagtacactgtaacattaattg

SEQ ID NO: 14575 - DNA, 1726 bp, Oryza sativa
  ref <308>: DATABASE ACCESSION NUMBER: AK065146
  ref <309>: DATABASE ENTRY DATE: 2001-12-06
ggtagcccggaggcgagggtgggcttagtgcatggctattccctctctgccttagctagatcaagctagctccttttcattcttggagaaggatcgattaggaagataagttcttcgcaaatatagatagcttcttttcttaattttctccttctcagttctcgtttttttcttcttgatcgaaaccgatcgatcatatatatagttagctagcatccttgttgtttttaatcccaaggatctagttaattaattacttcttgcaaatttcatgcaaaaactgatacacagacacaagttcgatataatttaatttcgagctttgatcatatcgtccccttgatcttttccttctctctttggaaatcccatcaaggctccatatttccttttgtggaaaaacgccttagatcgacgatctgagcgagaaattcgaattacttttcgtctcctcctagagatcatcatggacaacgttcttctggatcgccggtcttccgggagcttcgagttcccgaggagaggcggcggattccggccggggcacctcggcggcggcgcgacgccggcgatggcgccacgccagcaatacaaaggtggcgcgtggagccatgcatcactacccgcgctcccgtacgcgaggcctccgctgtactcgtcgccgtctctgcctctcctgccgtccaaccagccacctctcctgccgctcccacccgccgccaccaagtacgccactttcccgtacccgcctccgccgcagcagccgccgcgcagcggcagagctagtactccgtcgacgcgccagagggacaggaggaggaagccgtcgaggccgccgccgtcgacggagacgacgaagggaggaacacagaagaagaagccgctggagcgggcaacgccgctgccgccggcgccggcggtggcggaggccctggacgacctggagcaggaggtggcccgcaacttcgtccaggacctgctgcacgtgctcgcgccgccgccgagcagcctgccgctgcccaggttcgtgatcacgtcgtcgtcgtcgtcccccgccgccggcaacaaggtggtgccgcctccgccgcccgccccgtcatgcaacgccgaggcggccgccgccgacagcctccgccgcgtcctccgcctctaggatcgatcgatctatcacacggtgtgtccttggatcctagctgtgcatgacctgtctaattaatgtgtctattattatttcccaccaaaattattttctttggttgggaaaaagacgtaccgaaagtaggagaaaaaaaatattggaagatagagaagaaaagttgtgatgctcgagccatggtcggtcgagttgtccggtagcttgaccgcgatgttgcgttttggatggatgctagctctgcactcgtcaatggtgagtcaggtcgatgaagacgacgatgttgcctaagcttaatttgtgtgtgtgatatatgttatgctagctacgtagatatctagggttttacgtcgcgtacatgcgtatgcagtacgcacgtagtgtaattggggtattcttgatgatatggggtgatgagtttttggattattacccttgtatcaagaaatttactatgtacacatgtggtctactctgtctccacatggtgatgtacacaagtggcattattgatgtatggtacggtctagttattaatcatatgaatgtgtgggtgtgtttgacaaaatattg

SEQ ID NO: 14576 - DNA, 2084 bp, Oryza sativa
  ref <308>: DATABASE ACCESSION NUMBER: AK065147
  ref <309>: DATABASE ENTRY DATE: 2001-12-06
gaacgccgtgtggtcgccatcgccatcgccttcctcctcctcctcctccgccgccgcgcgcttcctcgccaccgcgcgcccagggccatcggcggcggacgccctcgcccacgcgcgcgagagaggggggcgagagattatcggacgagtcgctttgcggagctttctagaatggtggactgggcttcagatagcgacaatgataagttcgagtgggacacagacggtgaggctgagacctcatctgccccggccctaaggaacatagatgctcctggtccgtccacgaggctgccgcaggatgcaaatgggaaggccaacgggtcaggtgctttggttgctgaatttatgggaatgggattcccaaaagaaatgatcttgaaagcgattaaggagattggggatacagatacagagcaattgcttgagttacttctgacttatcaggcaataggcggtgacgcttcagtgggtaactgctctgcttcggcctgtgccccccagactcttgaagtcgacgaggaggaggatgatactaattgggatgaatatgatactgctggcaattgtgacaggactcctcactctgatggttctggtgacgaggatttctttcaagaaatgtcagagaaggatgaaaaaatgaagtccttagtcaacatgggttttcctgaagatgaagcaaagatggctatcgatagatgtctcgatgcgcctgtagcagtgttggttgattcaatctatgcatcacaggaagcaggaaatggttactctgcaaacttatctgactatgaggatacagagttcagttcctttggaggaagaaagaaaacaagatttgtggatggaagcaagaagagaaagcggtatggaagtgggccatctgggaatcaagtgccgtttgatggcagccacgaagagcccatgcctcttccaaatccaatggtgggattcagcttgcccaatgagaggttaaggtcagtccacagaaatcttcctgaccaagctcttgggccaccattcttttactatgaaaacgtggccctagctccaaaaggtgtatggacaaccatctcaaggtttttatatgacattcagcctgagtttgtggactccaagtacttttgtgctgctgccaggaagaggggttatattcataacctgccgattgagaacaggtcacctgttctcccaatgcctcccaaaacaatatctgaagcctttcctaataccaagaggtggtggccttcctgggatccaaggaggcagttcaactgcttgcaaacttgtatggcaagcgcaaagcttacagagcgaattcgttgtgctttgggtagattcagtgatgtaccaactccacaagttcagaagtatgtcttggacgaatgtaggaaatggaacctagtttgggtcggaaagaataaggtcgctcctctagagcctgatgagatggagttcctgttagggtaccctagaaaccacactaggggagttagcaggacggagaggtacagggctctcgggaattcattccaagttgatacagtagcataccatctctctgtgctgagggacctgtttcccaatggaatgaatgtcttatccctgttttctggtattggaggagcagaggtagctctccacagactggggatacatatgaaaacagtgatctctgttgagaaatcagaagtgaacagaacgattctgaagagctggtgggatcagacacaaactggaacgctgattgaaatcgccgacgtgcggcatcttactactgaaagaattgaaacattcatcagaaggtttggcggttttgacctggtgattggtggcagcccgtgcaacaaccttgctggcagcaaccgccatcaccgagatggtctggagggcgagcactccgcgctcttctacgattacatttgaatattagaacatgtaaaggctaccatgtcagcagtctagtttaagctatcacattaactaactctgtgatttattgttgttaacgaagttagaacctgttgattgatattgctgaacctgatgtgatgttattgcactcaaacaggagtgttttttcc

SEQ ID NO: 14577 - DNA, 2848 bp, Oryza sativa
  ref <308>: DATABASE ACCESSION NUMBER: AK098897
  ref <309>: DATABASE ENTRY DATE: 2002-08-28
tgtctcgtctctctgctctgctcgtcgactgccaccaccagtccaccaccaccttcggctgatacaagaagcgagggggaggtaggagagaagcccaccacagggtgaccccatcggccatcgcgacatcttcttcttcttgctcgcttgcaatttgacgccgcgagggcgggtggtttcgtggccatggcggtctccggtgcggcgcattgagcccagcgtgcgagggggcatggatctggaggccgcgcatggcgcggctgcggcgccagggaagaggaggaggagggcgagggagtcatggggagcgtcgctgctgctcgcgtaccagagcctcggggtggtgtacggcgacgtggccacgtcgccgctgtacgtgtacaagagcgccttcgccggcgacgacatccagcactcggcggggaacgaggagatctacggcgtgctgtccttcgtgttctggacgctgaccctcatctcgctcgtcaagtacgtgctcatcgtgctccgcgccgacgacggcggcgagggcggcacgttcgcgctctactccctcatctgccgccacgtccgcgcgggcctgcttcccggcggcgccggcgacgagctcgccgtgggagggcgtcgtgacgcccgggccatgtcgaggctgagggcgatgctggggaggtacagggtgctgcagaggctgctgctcctgttcgcgctgctcgggacgtgtatggtcatcggggacggcgtgctcacccctgcggtctctgtgtactctgcggtctctgggcttgagttgtcaatggagcatgagcatcacaaatacgtacaacttcctgtgacgtgtgccatacttataggcttgtttgcgctgcaacactatggtacacacagagttggatttatctttgccccaattgtctgcgtctggcttctctgcataagtgctataggggtttacaacattgttcactggaaccaccatgtgtaccgagccctctcaccatactacatgtatcagtttctcaagaagacccaaacaggtggttggatgtcactgggtggaattcttctatgtgtaacaggttcggaagctatgtatgcagatcttggacatttctcacaatcgtcaattaagattgcgttcatgtctgtggtttatccagctctagttcttgcttacatggggcaggctgcttatatctcacaacaccacagctttgagaatgcttatcatattggattctatgtgtcagtaccagaaaaacttagatggcctgttctggtgattgctatactagcagctgtggttgggagccaagcagtcattactggcaccttttcaattatcaagcagtgctcttcattaagttgcttccctggcgtgaaaattgtgcacacatcatctacagtacacggtcagatatacatacctgaaatcaattggatcctgatgatactctgcctggctgttactcttggcttcagaaacacgaaacatttggcaaatgcacaaggtctggcagttataactgttatgcttgttaccacttgtttaatgtcactggtcattgtgctttgctggaacaaaagtatcttccttgcgctcggtttcctgattttctttggcacaatcgaagtactctacttctcagcttcccttgtcaagtttcatgaaggcgcatgggtcccaattaccctctcctttatatttatgatagtcatgtgcgtgtggcattatggcactataaagaagtatgagttcgatttccaaaacaaggtttcagtaaactggctcttgaaccttggtccttcattggggattgtccgtgttcgaggcattggactgatacatacagaactggtatctggaattccagccatcttctcccacttcgtcactaatctgcctgcatttcaccaggtactggtttttctgtgtgttaaatcagttccagtgccacatgttcaacctgaagaacggtttctagtgggtcgcattggtccaaaagagtacaggctatacagggtcatcgtgaggtatgggtaccgtgatgtgcagaaggatgacatagagtttgaaaaggacctagtcagcagcattgcagagttcatccgcagtggggattctcaccacaacggtgttttggaggacacagacaagtcgtgtgagaaactgtcttccatcagtaatggtattccattgtggatggaggatggagaggtcgatgcttcagcatcccctcataaggagacagatacacagatcatatcaccaaaccgaaagaaagcaaggttcgtgctgccaaagaatgcccaggtggacagcgaagtgcgccgtgagctgcaggagctcatggatgcaagggaggctggaatgtccttcatcttaggacactcctacatgaaggcgaagagcgggtctagtttcataaagcgaatcgtgataaacttcttctacgagttcttgaggagaaacagccgcggaccatcttatgctgctaccatacctcatgcctccacactggaggtgggaatggtctaccaagtctgatagtagcagcagctgtataaagctagagatgagatctccatctgtacatatcacttcatgccgacaccgctaacctgaaggtggcagttgatgttggagcacctcatggccagccagccagttgcaaatcttgggagagccaacagggagtgtgcatttttgtctgtaaagccttctgttgagctgctccgtgttgttttttcccttgtgaagaaacctttcgctgttgtggataccactgcgaaactggggaagtgtaagtctgtaagagtgaccagcaaatgatagcatttttgttgcttt

SEQ ID NO: 14578 - DNA, 1754 bp, Oryza sativa
  ref <308>: DATABASE ACCESSION NUMBER: AK065148
  ref <309>: DATABASE ENTRY DATE: 2001-12-06
gaatccccactctctcctcctctccgcttctccattcgccggcgccgcccgaaccaatcgccccgaggaggaggagacctagggtttcctcgtcctcgtcgtcgtcgtcttcccccgcgccgccgcccgctcctcccttcgtctatccccggaggtttgagaagagttgcttgtcctaaaatgaggccagttttctgtggaaaccttgactatgatgctcgccaatctgagattgagcgcctcttcagcaaatatggacgtgtggagcgtgttgacatgaagtcgggatatcatggagcatctctgctcttcctggatgatggactgggctctacctttcctgcctgagccccgctcatctcttgtccatctccaggagctcagagtccatcctggcatctgttcacttggaaacaaccacctcgtgaatgatgccttacttttacgatcagcattgcaccctcctctgcgttgcactctcctcccccgtccgattacaatttcccacgccaatccaaccatgccaaccacacggccggctggagacgagtggaggttgccaccaccacctctttgatgtaccacgaatgtttggattaatgtacattgacgtcatttagttcgacatatgcaaggtctgttcctgtttattctggcgtattagtttgtagcctagtgaggtgatcttaaaatcttttcagtgcagggattttatcaatcatgatccatcctagagtttgtgccactatgatatctttttaactaactagctactttatcatgttcaacatggcagggtttgcctttgtctacatggaagatgaacgtgatgctgatgaagctatccataggcttgacagaattgaatttggcagaaaagggaggagacttagggttgaatggacaaaggaggatcgcagtggtggtagaagagggaactcaaagagatctccaaacaatacaaggccaaccaaaactttgtttgtgatcaattttgatccaatcaacacaaggacaagagatctggagaggcacttcgatcaatatggcaagatctagaatgtcagaatcagaaggaactttgcctttgtccagtatgagttacaggaagatgctactaaagcactggagggtacaaatggaagcactcttatggacagggttatctctgtggaatatgcacttcgtgatgatgatgagaaaaggaatggatacagcccaggaagaagaggccgtgatcgatctccagacaggagggactatcgcgggcggtctgcaagtccttatggcagagggcgtgagaggggcagccctgactatggaagaggcagggagaggggcagcccggactatggcaggggtggtgacagaggtagccctgattatcaccgtggtgcaagtccgcaagggggcaacaaaggtgatgagaggggcagcccccctaacaactacgaccgtgaacgccgtgaagccagccctggctatgataggccccgcagtcgctcacctgcgaggtacgagagagaatgaagttgctccacatgatgcctgcgctgcaccttcctgcttcagatcaatggacgcactattattatgtactgaactgctgatgttgtctctctgaaagttgtattagtaattggtagcagacgattcgtgtactagctagctctagaacaatgttttgtggatctcaactcgtgttgttagcttacacctcttttcccgctttgatatgagatgcttaaacttcc

SEQ ID NO: 14579 - DNA, 3259 bp, Oryza sativa
  ref <308>: DATABASE ACCESSION NUMBER: AK098898
  ref <309>: DATABASE ENTRY DATE: 2002-08-28
gattcttccttcccttcccttggcttcgcctccactcctccgctcactcctctccccctccacgatctcgccgggatctccacggcggcggcggcggcatggcgggcaacgacaactggataaacagttacctcgacgccatcctcgacgccggcaaggcggcaatcggcggcgaccgcccctcgctcctcctccgggagcgcggccacttctccccggcgcgctacttcgtcgaggaggtcatcaccgggtacgacgagaccgacctctacaagacatggctccgcgcgaacgcgatgcggagcccgcaggagaggaacacgcggctggagaacatgacgtggaggatctggaacctcgcgaggaagaagaaggagttcgagaaagaagaagcctgtcgtctgttgaaacgccaaccagaagctgagaaattacgaactgatactaatgcagatatgtctgaagatctatttgaaggagaaaagggagaagatgctggtgatccctcagttgcgtatggtgacagcaccacagggagctcacctaagacgagttcaattgacaagctatacatagtactgataagcctacatggtctggtccgtggtgagaacatggagctaggacgagattcagatactggtggccaggtcaaatatgtggttgaacttgctaaagcgttgagttcatctcctggagtttacagggttgatttgctgacaagacaaatcttggcaccaaatttcgatcgtagttatggtgaacctacagaaatgttggtttcaacaagctttaaaaattctaaacaggaaaagggtgagaacagtggtgcatacatcattcggataccatttggaccaaaagacaaatacctagctaaagaacatctatggcctttcattcaagaatttgttgatggtgcacttggccatatcgtgcggatgtcaaaaaccattggtgaagaaattggctgtgggcatccagtatggcctgctgtgattcatggacactatgccagtgcaggaatagctgctgctctgttgtctgggtctcttaatattcctatggcatttacaggccattttcttggtaaggacaaattggaagggcttctcaagcaagggcgacattcaagggaacaaataaatatgacatacaaaataatgtgccgaattgaggcagaggaattatctcttgatgcatctgaaattgttattgctagcactagacaggagatagaagagcagtggaacttgtatgatggttttgaggttatacttgcaaggaagcttcgggcaagagttaagcgtggtgctaactgctatggccgttatatgcctcgtatggttataatacctcctggtgttgaatttggtcatatcattcacgattttgaaatggatggtgaagaagaaaatccatgtccagcctctgaggacccacccatttggtctcagataatgcgcttctttacaaatcctaggaagcctatgattctggctgttgctcgtccatatcctgaaaagaatattacatcacttgtaaaggcatttggtgaatgtcgccctctaagggagctagcaaatctgacactgataatgggtaaccgtgaggccatttctaagatgaacaacatgagtgctgctgtcttgacctcagtgcttacattgattgatgaatatgacttgtatggtcaagtggcttatcccaagcatcataagcactctgaagttccagacatttatcgtttagctgccaggacaaagggtgcttttgtgaatgtggcttattttgaacaatttggtgttaccctaatagaggctgctatgaatggtttgcctattattgcaacaaaaaatggagctcctgtagaaattaatcaggtgctgaacaatggtctccttgttgatccacatgatcagaatgccattgcagatgcactgtataagcttctttctgacaaacaactttggtcgagatgtagagagaatgggctaaagaatattcaccagttctcatggcctgaacattgcaagaattacttgtcaaggatattgacacttggtccgagatcacctgctattggtggcaaacaggaacagaaggcacccatatcaggaaggaagcatatcattgttatatctgtagactctgttaacaaggaagatctagtccggataatcagaaacactattgaagtcacacgcacagaaaaaatgtctggttcaactggttttgtgctgtcaacttcacttacaatatcagagatacgctcgctgctagtgtctgcaggcatgttgcctactgtttttgatgctttcatctgcaatagtggaagtaatatctattatcctttgtattcgggagatacgccaagcagttcccaggttactcctgcaatagatcaaaatcaccaagcacatattgagtatcgatggggaggagaaggcctaagaaagtatctagtgaaatgggctacttcagtggtagaaagaaagggaagaatcgaaagacaaattatttttgaagaccctgaacactcttcaacctattgtcttgcatttagagtggtcaatccaaatcatctaccccctttaaaggagttgaggaaattgatgagaatccaatcactccgttgcaatgccttgtataaccacagtgccaccagactctctgtagttcccattcacgcatcacgttcccaggcactaaggtacttgtgtatacgctggggaatagagctgccaaatgttgcagtccttgttggtgaaagtggcgattcggattatgaagaactgctaggtggtctccacaggaccgtcatcctgaagggcgagttcaacatccccgcgaacagaatccatactgtcaggagatatccgttacaagatgtcgtcgccctggacagctcaaatatcattggcattgagggttacagtacagatgacatgaagtcagctctgcagcagattggtgtgctgacacaataacaccttctagcttgcataccacacaaagaaaacgaaaagggaaagtaaagaaccaaaccaagaaccactatttccacacttgatggaaatgccgattttgttttgtaggatgcagagtttgtgtgtgtgttccattcctgagctgtgaataactctccctccttttgtttgtgctaagttcttttttgaagtgaaccatgtggatacatcaaaaaccagacacaaagatggtttaaacatccatgattacgggaaaaaaaaccatacat

SEQ ID NO: 14580 - DNA, 2083 bp, Oryza sativa
  ref <308>: DATABASE ACCESSION NUMBER: AK098899
  ref <309>: DATABASE ENTRY DATE: 2002-08-28
gattttggacgcccactcgcatcgccgacgaatttctcgctagggtttcgcggatcaaggcggcggcggcggctagggtttcgaggcgggccacatggcctcgccggcggcggagggggacgcggtgagcgcggggttcgcggagctggagcggcagcagcagctgctggcgagctgcacgaggctgtacaagcagctggaggagcacttcgcgtcgctggagcgcgggctggcggcgaggtcggactcgctccgccacaagcgccgcgcggcggaggcgcgggcctcggccgccatggactcgctccgccgccgcgaggcctccatcgatggctccgtctcccgcgcgctcgaccacctcgacgacctcgcctccgcctcgtcggtgccgtccgacgccgccgcggcggcggagggggtggccgagagcctgagggcgatgtgcgccaggatggactccgcggggttcttcgggttcgtggtcgcgcggcggaaggaggtggacgcgctgcgcgccgagatgccgcccgcgctcaagtgctgcgtggatccagccaaattcgtcatggacgcggtcgccgacgtgttcccggtggaccgccgcgaggcgaagaaccacaccgacctggcctgggcgtgcgtgctcatcctggaggcggcggtgccggcgctggccgatcctgacccggagattggggcggcaaggctactggtgccgcgtgcggcgcgcgagcgcgcgcgggggatggcgagggagtggaaggaggcggcggagcgcaagggcggggtggagtggaccaagccgcccgacgcgcacgccttcctgcagcacgtggcgacgttcgccgtggcggagagggaggaccgggggatttaccgcaggattgtggtcagcttctcgtggcgccgacaaatgccccgcctcgcgctcaccctcggccttgaagaagacatggctgatattatcgaggaactaattgctaaggggcagcagcttgatgctgtgaattttgcgtacgaggctggtcttcaggagaagttccccccagttcctctcttgaagtcctacctggcggactcgaagaagacttcatgcaccgtttcagataattcaagcaccagcagtggtcaatctgggagcaatgcaaacaagaaagagcaatccgtgctgagggctgttataaagtgcattgaggatcgcaaactggaagctgagtttccactggaggaccttcagaggcagcttgaagaactggagaaggccaagactgagaagaaaaaggcaacttcaagtgcgtccagcggcggtagcagtggccctgccactaagcgcatccgggcaagcaatggaggcccgatgcctcctgcgaaggcaggtcgtctcactaacaatgcttgtgtgtcttctaccccagctgccaccacctttgtccgctccccctcgcacacatcgtacgccatggcctccccctacccttacgataggccggttggtcatggcctctactgcaaccaaagcccaccggcgatcagggagccatatgtctacccagccaaggaggtaactaattttgcgccaggtttgccgtactcttcccctcccataagctatccccacgcctatggcgggtacaacaatggaatgggagcttacaacaatggaatggcacctgccttccaccaggcttactaccggtaggatcagtcaggaaagtcgctgatgaatgacatgacaaataactgatgatgtcgacgacaactcaatctgcacaatggctcatattttgtagtgactgactacaaacggtaggttgggtatctcatcttatctgtgcttactaagttaccactactactagatgcactctactctgcattgtgttaggttatctcatgcctagatcactactttgtactaccactaagaaacctggatgtaaattatgtacgctaccattgagactgtactgcattatgtaattctgttcagaaacaatgaaaaaaacacccaaaaaaataaactatcatgtaatccttcggcaccttgatggaccacttaatcaaagacaattcttagtttagc

SEQ ID NO: 14581 - DNA, 1643 bp, Oryza sativa
  ref <308>: DATABASE ACCESSION NUMBER: AK065149
  ref <309>: DATABASE ENTRY DATE: 2001-12-06
gaatccagtgtcatttgactcatttcctcttcctgccctcggggagtacgtgaggacctaaaagtacctcgcccccaaaccctagaaccccacaccacacccaattcgcccacccaaaccctagtcctcccgatgctgtgatccgccgcgcgtgccccatggctctagacggccccgcggagcgacgggacgaggcccaggccgcgatgggtaatggcaacggcgtggccccgccgccgttgcggccggccggccggccctccggggcgccggcgtgcgcagatcggcggctgcggttgaaccccaacatggagcacaagccgcaggactacagcgacgtccgcggcgagtacgcaccagctgtatacagtgcacttgagaggcacctcccacccagtgtccttgatgccaaccgggaaatcaagctgcagctcatgcgagaggtcctcgggcactattggccccatggtgagcgcaacaaggttcaaaggcacagagaatacagacagagaatactcaaccattataagccacttcataaagagctatacaaaatgcgcccttcatcgttctttttaccaacattccttgaagctattaggaccaatacagaagaaagctttagaagcattatgactgagccagttcctggtgtttattcatttgctatgttacagcctaatttttgtgagatgctattacaggaggtagagaacttcgaaaaatgggtccacacaatgaaatttaagataatgaggccaaatacaatgaacaagtatggtgctgtccttgatgattttggcctggaagttatgctgaaccaattcatggaacagttcatagctccaatgtctacagtattatatcctgaggttggtggaggaacattagatacacaccatgcttttgttgttgagtatgggaaagacagggatgttgaactcggtttgcacgttgacgattctgaggttacattgaatgtttgccttggcaagcaattctctggtggtgagttatactttcgtggcatccgttgtgagaatcatgtgaattcagagacacagcatgaggaaatgttcgattactctcatgttcctggacgagctgtgctccatcgtggtcgtcataggcatggtgcccgaccgacatcatctgggctcagaatcaatcttcttttgtggtgcagaagctctgtgttcagggagatgaagaaatatcagaaggacttttcgggctggtgtggtgaatgtaaacgtgagaagaaggagaggcagattcatgctgttaaagcaactaagctggcgtttcttaggggtgctggaggggcaacgatttaaattatatttgctttatgtatttatacaatcttgtattatattatactttactgtcatttgggaagcagctagtgtgatcttcagtttttctggtcacaatcattagtggtcacaggtgtatgtaaattgaacttgtgatcaaatcaagctgaaacttagtggaggatcgcatgttagtgtgaaaggagtgctagcagaatagcaactccccccttcaatatcgtctaagcctgatattgtacagataagtgcatctgcatagaatgttctaatctgtcatcaaatttgggtgatgcaaccttttat

SEQ ID NO: 14582 - DNA, 1099 bp, Oryza sativa
  ref <308>: DATABASE ACCESSION NUMBER: AK065150
  ref <309>: DATABASE ENTRY DATE: 2001-12-06
gagcggctgtatagctgctgccactcaactgtgcaggactcatagctccctgctacatataccggccggtcggaccccctcatcttgccggcctcatcatcgtcaccgatcgatcccggccattccacggtcgatcgatcatctccggccggccggtcgccggtgggaattgaagcagctagctgacatacatacatggcgggcgtgtgggtgttcaaggacggcatcgtgcggcgcgtggagaaccccggcagcgaggaatcgtcgtcggcgggggacggcggcggaggcgggcggcggaaggtgctggtgcacgtgccgagcggggaggtggtggcgtcatacgaggtgctggagcggcggctgcgggagctcgggtgggagaggtacctcaccgacccgtgcctcctgcagttccaccagcgctccaccgtgcacctcatctctgtcccccgcgacttctccaagttcaagctcgtccacatgtacgacatcgtcgtcaagacccgcaacgtcttcgaggtccgcgacgccgctgcccccgccgtctcaccggcgacctagctgctgatccgagatccatccatccatcgatcagacgacagcttatagctacagcagtccacatgagcttgcctgcctgctattataagagtgtaagtatgtatatatatactggtatgcgtgtgatcgatcaaggatcgatgtacacacaaatgatcagcatgcacagatcactagatcgagatctatagctcgatcgatttggggtttctcctgccggcgttgcagcttttggattagatgttgcgccggtgaggacattgctataggttaattggcttttgggtatatttctgcataaataatgcatcaatagagagcacaacatgtgtatgcatacttatatttatatgtacacatgcatacatatataagtacatacataggggccgggggcaacatgcaggttgcagagattctgccagagatcaagcagaaaggggatcgccgatgccctactctcaaccgtacctttttactgtttaatttggaataatttggattgtctcaatacaaattatgtaccagttttttc

SEQ ID NO: 14583 - DNA, 1114 bp, Oryza sativa
  ref <308>: DATABASE ACCESSION NUMBER: AK065151
  ref <309>: DATABASE ENTRY DATE: 2001-12-06
gatttatctcttcgtttcttcttcttcctccttcgacgagagcaagcaagaagccatggcggactacaaccgctacggctacggcggctacggctccaccccgtcagcgccacccgcctcctcctacggctacaccaccacgccctccgccccaccggcctcctcctcctcgtcctacggctacggacatggcggcggcggttacccgtcctccacctactcaccgccgccgccgtcgtcgtcgcaggcgtatcccatggggatggggggcttcctggtgttcccgccggggacgcacccggacgtggagcgcgccttcagggccgtggaccgcgacggcagcggctccatcgacgagcgggagctgcaggacgcgctctcctccgcctaccaccgcttcagcatccgcaccgtccgcctcctcctcttcctcttcaacaaacctgcctcccattccccctctcgcatgggtccagcagagttcgtgtcactgtggaattgccttgggcaatggcggggcattttcgacagatacgatagggacgggagtggaaaaattgagaaagatgagttgagagaagctctacgcagtcttggatatgcggttccaccttctgtccttgagcttcttatcgcgaactacaacaatggagtctccagccgtggcgcgttggactttgacaactttgtggagtgtggaatgattgttaagggtttaactgaaaaattcaaagagaaggatacacgctacagcggctcggcaactctttcatatgacgggttcttgtcaatggtcattcccttcattgtcccttgacttcttcgggtgtctcaagacccaaagagctttgaatttgtacagcttttcagctatgtttctgcttcctagttggatttgtttgtgcaaataggccttggtgattttattgactctgtgccgtactgtgtacttagtaccattttgttttccctatagcctatatcgactgttacctgtgattgcgtctcggttctgacatgctttgatcttagttatcctcaaatgtaattgccttttgatgctaacagataatatgggagagtaaactcagcatctatgttcagtcaagttcct

SEQ ID NO: 14584 - DNA, 4179 bp, Oryza sativa
  ref <308>: DATABASE ACCESSION NUMBER: AK065152
  ref <309>: DATABASE ENTRY DATE: 2001-12-06
cccacccccccccatttttctacctcccttctccatagctcacgctccttcacgcacacgcctcgctcgcgcgcgcacacaggggggaggaggaggcaggtcggcggcatggcggtggcgagctggagcattccggcgatcccgcgggcgggtccgacagcgaggggtgtgctgctcggcggcgccttcgtgacggccgcgcggccgcccgtggcgtggcggtgccgggccacgctccctaggagagtgaggctcggtggcgtggtggcccgtgccggtgcggcggagacgccggtggccggctccggggaagccgggttgctgttctccgagaagttccccttgcgccgatcccgaacggtggaagggaaggcgtgggtgagggtcgatgcggagccggatggggagggcaagtgcaaggttgtgatcgggtgtgatgtagaggggaagtgggtgctgcattggggtgtctcctacgatggtgagcagggaaggtactcgctgattctctctccgagctgtgtctctgtttgcatgatttatgaactatgagtgcatccttgttttgatcatccgtggggagttgatttgtgcattgttgagagcgtcgtttgaatcaacgatggttgtcagactggcaggtatgtcctcatggtaggctgctttccatatctatgtagcctcaccggtccagtctaagcacttgtatatgtatatagtgaaattactgtcaagtgtcaatgcaaccccttaatctttatttggcttcgattagaggaaattataaacaggttcattatgaaaaattcttacaaggtgggtgccattgatttatggctatacttggaaaatgcgcgcgaaaagagaattttgattaggtgacggggtagtgccgtaaccatgtaggttggctcttatcctgtttttcttttttatttggaatttcgatatagcgttgaagcgcgaggtgattagaaataggcatatctgcaagataggaatgataagttcttaaatttcaattgcaggttgcccggtgttatgtctccttatctcctttggagttgtcttgatattccaatattctatacgttacttaaatggcacgatagttttgcaaggaatatttagaattaatatttgtcatatcttttgtttttgtatgtattcaagcttcaacatacatacatttctccccgcaaaaaaaaaaagaacatttctgtaaaaggcaaaaaattgaattttgtcgtctttcagatttagttgttgctgtaatgtccttccttgaatgcaaaaataaatgatctagctcctgaaatatatggcattctttatccttatttagtgacccaatttattgttatcacttgtttctataattttttgcagagaatgggaccaacctccttcagacatgagacctcccggttcagtgcctattaaggttgttctaatcctatgaaaaacatgttaaagaactcactactgacattcacatcccagggatctctaagtttgtttgatgtctgagtcgaaagctcgttgcatcctgtagccatattttttctcatttgatcttcctattgctgaacaatatttcaaactttcaggactatgcaattgaaacatctttggacactccacacaattcagaaggcaagacgattcatgaagtgcaaatcaaaattgataagggcacatcaattgctgctatcaattttgttctaaaggaagaggaaacaggtgcttggtttcagcacaagggtcaggatttcagaatacctttaagtggatcctttggtggagatctactaggaacagaacaagatattgatgtcaggccaggggctttaggtcacctatctaacgtgttacagaaacctgagggacctattgctgagcctcataaaactgtacccgatgataaaggttcaagaaccaaacacatttcaggtttctatgaggaatacccaatcttaaaaacggtgtatgttcagaattttataactgttaatgtgagggaaaacaatggaacaactaaacatgctgtggaattcgacactgatattcctggagaagttatcattcattggggagtttgcaaagacaataccatgacatgggagatccccccagaaccacatccacctgcaacgaagatattccgacagaaagctcttcagaccatgctacaacaaaaagctgatggaacaggcaactctctatcattcttactggatggagagtattctggtctgatttttgtggtaaaacttgatgagtatacttggttgagaaatgtggagaatggatttgatttctacattcctcttacaagagcagacgccgaggctgacaaacagaaagccgatgataagtcttcacaagatgatggcttaatcagtgatataaggaatctggtggttgggctgtcgtctagaagaggtcagcgagcgaagaataaagttctgcaagaggatatcctacaagaaattgagaggttagcggcagaagcttatagcatttttaggagccccacaattgatactgtagaggaatctgtttacattgatgactcatccattgtgaagcctgcttgttctggtactggatctggatttgaaatattgtgtcaaggatttaactgggaatctcataagtcaggaaaatggtatgtggaacttggctcaaaggccaaggagttgtcatcgatgggtttcaccattgtctggtcaccaccacctactgattctgtgtcgcctgaaggatacatgccaagggatttgtataatctaaattccagatatgggaccatggaagagttgaaggaggctgtgaaacgttttcatgaagccggtatgaaggttcttggtgatgccgtcctgaatcacaggtgtgctcaatttcagaaccaaaatggcgtctggaatatttttggtggacgccttaactgggatgatcgagcagttgttgcagatgatccacatttccagggaagaggaaacaagagcagtggagataacttccatgcagccccaaacattgatcactcgcaagagtttgtgaggagtgatcttaaagaatggctttgttggatgagaaaggaagttggatacgatggatggcgacttgattttgttcgcggattttggggtggatatgtccacgattacttggaagcaagcgaaccatattttgcagtaggagagtactgggattctctcagttacacctatggtgaaatggattataatcaagatgcccacaggcagagaatagttgattggataaatgctacaaatggaactgctggtgcatttgatgttaccacgaaaggaatacttcactctgcactggaaagatctgagtactggcgtctgtctgatgaaaaaggaaaaccccctggagtgttaggttggtggccttcgcgtgctgtcacatttatagaaaatcatgacactggttctactcagggtcattggagattcccctttggtatggagttgcaaggctatgtctacatcttaactcacccaggcactcctgcaatcttctatgatcatatattttcgcatttacagccagagattgctaaattaatttctattagaaatcgccaaaagatccattgccgtagcaagatcaagatactgaaagcagagggaaatttatatgcggcagagattgatgagagggtaacaatgaagattggcgcaggacattttgagccaagcggccccacaaactgggtagttgctgccgagggacaggattacaaggtctgggaagtgtcatcgtagacttgccgcgctggtacttgcagaacttctattgtagacagtatacaaccattcggtatagctcacaaaaggaaaactgaatagcacaaagctagagttcggcatcctgctgatggtaccaagaaaagaagtggacagcaagggcaatggaaccacttgtcctaccgaaaagatttcaccaatgcagtgaaattacattgtaaattcgaacatttgatcatgcagaatcaccggttatcctgtgaataatttgtctgcaggcaattcgcctgttgatgtatgcatgttctttatacatttttgcagagatacctccaccatgttggagctatgtaatactatgtgatacactttggcgataaataaatgaagtgcatgc

SEQ ID NO: 14585 - DNA, 1268 bp, Oryza sativa
  ref <308>: DATABASE ACCESSION NUMBER: AK098900
  ref <309>: DATABASE ENTRY DATE: 2002-08-28
ggcaaaccgcgaaacaaaccacccccgcatctctctctctctctctcttcgtcgagctcctcctcctccgctgctgctgccgcccatggcttcgtcgtcgaagaggagaggcggggctggaggtggaggagcggagaagaaggacctcttccatgtcgtccacaaggtgcccgcaggggacagcccgtacgtcagagccaagcacctgcagcttgtcgataaggatccggagacagccatcgtgtggttctggaaggcgatcaactccagggacaaggtggatagtgccctgaaggacatggctgtggtgatgaagcagcaggatcgcgccaaggaggcgatagaagccatcagatcattcaggcacctctgctcaaggcaggctcaggagtcccttgacaaccttctgatcgacctctacaagaaatgtggcaaagtcgatgaacagatcgatctactgaaacagaagctgaagatgatataccttggagaggccttcaacgggaaggcgaccaagacagcacgttcccatgggaaaaagttccaggtctctatccagcaggagacttctcgcattctgggcaatcttggctgggcttacatgcagcagagcaactattcagccgctgaattggtgtatcgcaaggcgcaaagcattgagcctgatgccaatagggcatgcaaccttgggctgtgcctaattaagcagagcaggcatgatgaagcaagacaagtacttcatgatgttgtgctacgcagaatctccggatcggaagatgacaaggtggtagcccgagctaagcagcttctccatgaacttgagccggtgacgcatgttacgtcgccaaataatgctgggctgagtgtcagtgaagagatcatggagagactagaccttgtgttgaacgaatggacgccgttcaggtcaaggaggctgccggtatttgaggagatagctaccttaagggaccaaattgcttgttgatccctttattcgcaaggtttttgttcttttgcttaatgtgcatacgggtgcgttgccttagaaattcatgtgcatatgtagaggctgttgtgggcttgtggcagtgcgagtaatggagtaaaggttgtgatgttcagatagatatcatatagctagagatcatgcaaagcatccaaggaatagtgtattttgtcttcatgttctatgatgcttataatgtgttgtaaacattctacagactacaagaaatccaagtgtacacttcacttggcttgttggaatc

SEQ ID NO: 14586 - DNA, 1293 bp, Oryza sativa
  ref <308>: DATABASE ACCESSION NUMBER: AK065153
  ref <309>: DATABASE ENTRY DATE: 2001-12-06
ggataagccaccaccgccaccggaggaggagctctatttatgccctcgcggcggcgcctcctctccccgcacccccccgcctcgccgctcgccaccgcgccccagaggctgggaacttcgaggaggagcaggatccatggagggtggaggcgcaagaaatggctcgacgaccggggcggcgcggacaggggggagtgggggtgatgctgctgctggtggtggtggtggctccgccgggaacggggagccgctgcccccttgctgcgtcaaggccagggcggcggcgcctgaatccgaggccaagtgccacgccaccgtggtgtccggatggttcaccgagccccgctcgcgcggcggtaaaacgagcaagtgcagtattacaataacccgatgtggccaggagaggcccattcactgaaagttgagaagatcttgtatcaggggaagtcaccataccaagaagttttagtttttgagtcctcgtgttcggcttcatgttggtgatgctgtggagttcttaaggaatgctcctgaagggacatatgatgctattattgtcgattcatcagacccgattgggcctgcccaggaacttgtggagaagccattttttgacacaatcgcaagagctttgaggcctggtggtgttctttgtaatcaggctgagagcatgtggttgcatacgcatcttatccaggacatgctttcgatctgccgtgagacattcaagggttctgtccactatgcctggacgagtgtcccgacatatcccagtggtgtgattgggtttctgctatgtgccaaagaaggtccaccagtcaacttcctgactcctgcaaatccaattgaaaaactagaaggagctatggaagcaggaagggatattagattttataattcagagatgcatagagccgcatttgttctcccaacctttgcaaggagagagctagaggcgtattgtactaccgttgaaagggaacaacaagaagaaacaacggccgagcctctgaagatgaacattatgcagaacagtgaaattcttactgcttcctagatcagggtttttgcctgctcacatcattggataatcaagaaaccattccttcaccttacagcgttggacttgacctagtattgtattattattaaatacagtagcatgtagcgattgcattaagcagtggactgcattacgaccaacgcatcaccgaggcttacggcttgtaatccatattgtagactgttgaaatgagtgaggcttaataataaaaaaggagagatgaggatctg

SEQ ID NO: 14587 - DNA, 1996 bp, Oryza sativa
  ref <308>: DATABASE ACCESSION NUMBER: AK065154
  ref <309>: DATABASE ENTRY DATE: 2001-12-06
gacaagttggccaagatcaccaataaggatttgcctatccttctctggcgctcctgaatcctcttagatggttataccttggtgttcgtccatgatgcggcttttgtggttcttgttcgcgcttcttcttgccagatcggtggcagatgctgcaactgcgaactacactttcactgtggaaagcatgcgagtcagtcggctatgcaacagcactgacattattgcggtgaacggcctactgccaggcccaatgatagaagtgaatgaaggtgacgcagttgctgtcgaggtcatcaacggatcaccatataacttaaccatacactggcatggcatactccagctactgacgccatgggcggacggcccgagcatggtcacgcagtgccctatccagccgaacagctcgtacacgtacaggttcaacgtcaccggacaagaaggcacgctgtggtggcacgcccactcctccttcctgcgcgccaccgtgtacggcgctctcatcatccggccaagaaacggctccgcctatcccttccccgcgccggaccaagaggtccccatcgtgcttggggaatggtggagccggaatgtcgtcgacatcgagagcgacgccgtctcatctggccagcttcccagagaatccgacgcgttcaccgttaatggtgttaccggcgagctctaccaatgcgcaaatgacacgttcacggtggacgtgcagcccaacacgacggtgctactccgggtcatcaacgctggactcaacacgcacctcttcttcaaggtggccggccacgcgttcaccgtcgtggccgtcgacgcgtgctacaccgccaactacaccacggacacgctcgtgctcgcgccggggcacaccgtggacgcgctcatggtcaccaacgcgtcggccggcagctactacatggcggtgcaggcgtacgacagcctgtctccgaccaccatggccgtaaccgacgacaccaccgccacggccatcgtgcactacaacaccacgtcgaccaagaaaaacgcgacgcccgtcatgcccaccatgccccagagctccgactccgcgacggccaacgccttctacttcgggctgaggggcccgccgtctcccagcgcgccggccgtgccgaccaaggtggacgtgaacatgaccatcgagctgggcctcggccagctgccgtgcgactccacacagagcagctgctcggggaaatccgtcgcggcggcgatgaacggcgtgtcgttccgcctcccgtcgcagatgtccctcctggaggcgcagttcaaccgcacgccgggggtgtacaccgccgacttcccggacgccccgcagccgagcggcacgccgatggtcgaggggaccaaggtgcggaggctcaagtacaactcgacggtggagatcgtgctgcagaacccgaccgccttcccgtcggagaaccacccgatccacctccacggcttcaacttcttcgtgctggcccagggcctcggcaacttcacgccgggcaacgtgagcggctacaacctcgtcgacccggtttcgcgcaacaccctcgccgtgccgaccggcggctgggccgtcatccgtttcgttgccaacaatccaggcatgtggttcttccattgccaccttgacgcgcacgttccgatggggctcggcatggtgttcgcggtggataacgggacgacgcctgactccttcctccctccgccgcctgccgatctgccgatctgccgaagtgctagaacctgcaagattctggcgttggtgtcaaattgtaatgcactttcgtagccaaattttacttcatatttgttcttgtgtttgtgtaaatggagtacaggaggcacgaaacgaggtagtgccgttcgtttatttgttctgtgtatgtgtatcatgtgtaaactgtaaagaggtctgtttttttttttcctctccgggggaacgtgtaaactgtaaagcaacaaatgtcaaacttcagattcc

SEQ ID NO: 14588 - DNA, 2814 bp, Oryza sativa
  ref <308>: DATABASE ACCESSION NUMBER: AK065155
  ref <309>: DATABASE ENTRY DATE: 2001-12-06
ggtggtgggttttcttctccaacgaaactctatcccctctcttcttctctctgcactgctcctcccctcaggcctaagccaggcaccaatctgaaggtaaggcaccatggtgatttgctggccagccgctccgcgtgtccacacctctcccaatctgtgttggctgccatcctctgcacctacgcctccccgccgaccaacaaccctgagtaggcgagctcccccacggccgctgagggccacgcggcgacgcctcatgcccggtggctgtgcgctgcaccgctagtgcggttttgcctccccagcgcctacgtctacacggcgcgcgcagcccacggccctgccgccatgctcctgcatctccgcctcccttcctagttcctacacgtttcactgctcagctgtgttgccaaatcacactcgggcctaattccatttcagcactatactacattactaatttgatatatatgttctctgtatgcaggttttggatcagatgcagtgatcaatcctaggtgacagagcctattaggctagaacagaccaataagcaatccaatgtgtgatctttttatattcctctgtcctggatgttgcaatctagccgaataaaccacttttgcttttgatcgttcactgtccatctatgcattttatctccttgcgtcaaattaaattttgttctttctatcaattacttgtttcaaattgttggccaattaaaatggacaaaggaattagtgactggcaaataaatccaaattggaattagtaaatttattgttcaatttttaatgtgttgacacctctatttgaaaattgttcattagctaacagaggtatctaataacctgtaggctagcacctttctcatcaatacaaaccatagtggtacttttttggacaacagtagagtaaaatgcctaaagttttagccaattctgaaattattcttctagagcagtagagaaaagtggtactcagactgcaatacataggtttatgctatttttgttttggtgcagcagatatggcaaggagtagaaggcggtgcattgttcaaagccatgaggaatatttgtcagaggaacacattgcagaagaaaatgcccctaaacagcttgccacaccatctgaagagaaacaatatgcagtgatgttcaagagggtaatgaagatactgatgacgatgttggagaagtcaatgaagatactgatgacgatgctagtatgaatgctggagaaggcaatgaagaatctgatgatgatgttaaaattaatgttcgaggtaaatactaaatcttgatggtaagaaataatgaaattattcttcttatcctggactgttgagcatcacttttatctttgcaatttaacattgaacagatgaaaatggaacaattgaaacacgtgggaagacaaaactgaaagatatttggaaccttccgaaaggtcttaggattgtggttcagtgcaatgatctcaatcaggcagtaggagatgaagctggaattttgtctaaatttcttggaatggtagctaggaatggtactttgtgtagcttaagctacacagactggagatttctaataggaaagagagagagaaaaaaaatgaattaaaagttaaaaaggacattcttaaacaaatatccatgttcaggacaaggttttgcaactaccaaccaagcaatctactgtagataaggtcattctcttcctatttgttatgtcgaactcactacatagcattatatgatctcaatattgtttgcaactgtcaacgtttattgtagctgttcattacaatcttatgtcttatcttattacacagcaatcaaacttatggccaaaatcaccttgagaaacagaggaagattatttgtgtgaaggctagtcttcacttttttattgattggaactgacagtgtttgattataaaaataactagattattgtagtttgtgccaatattttgatattccgtgcagaataaaggaaacatgaaccagaatgatcacatgcaacaagggaagaataattctaatgcttataaggtaaattttcacttctggagccacctaatataaagataagctatagaattctatttggtataatatgtttgtactttatagttaaattattgaatcttgatccaaataactttgtacagaaacaacagtgcaacatagtggacattatggatgccaattcattggagattggaactaatgtattcttgaaaagctggaaaaatcgaaataagaatgtggttgttgcttcaattgtaagctgtgatccaacacgcaaagttgcaggtattgagctaggaactgaatacttgatggtgcatgttcattttccattggcaaaatatgaagaattgatcaggccatacaaaggctacaaaattattggcaatgtcgtacgacttgatattgcgtggccagcaatttttgtacggtgctatttctcaaattctttagatgtgatcttctttcttccaatactgtatcaatggttgtttttttttctgttacaggttgacaagataaatggatcatgatctggggcaatatggttactacaaggtggacaactgtcatctaaagatcccttgtgaatatgatgatgactgtaatgtggaagatggtggcaatgatagtggcaacttcagatgcatgtttttttttctatagtttagattacatttgtgcatgatgttctgaacaaaatttaatgtcatgacttatgaggatgattttccatgtaatacaaaaaattctctttaattactattagttttatg

SEQ ID NO: 14589 - DNA, 1279 bp, Oryza sativa
  ref <308>: DATABASE ACCESSION NUMBER: AK065156
  ref <309>: DATABASE ENTRY DATE: 2001-12-06
ggcgccacgcttctcctcctcttcctatcccaatccactcggcgacccccctcgccgtcgccgcgctgcgccggcgagcgccacgggagcagcagccctcgccgctccgcggctagctagctcgtctcctcgtccgcctcgcgcctgctggagatccgccccccgacccccgtggaaggaaggaagaagggagggttgtaacagcctaacaggttgtgggagtcttggaggtgctggttttgtggtgtggtgttcgcagtttggttggagcttggagatttagaaggaaggtttgacgatgagcagccgcagcccgccaccaaaggaccgcaggattcgtactgagcgtacctcataccgtgatgcgccatacaggagagacagccgccgtggtcctagcagatttcctaatgatttgtgcaacaattgtaagcgtccaggacattttgctagagattgtccaaatgtggctctttgccatgcatgtgggcttccagggcacattgcagcagagtgttcttccaaagatctctgctggaactgcaaagaacctggccacatggctaacagctgcccaaatgaagggatatgccgcaactgtggcaagtcgggtcacattgcaagagaatgcagtgctccaccaatgctgccaggtgaaatgaggctttgcagcaactgctacaaaccagggcaccttgctgcggaatgcaccaatgagaaggcctgcaacaactgtaggaagagtggccatcttgctcgtaactgccctaacgagcccgtctgcaacctatgcaacgtgtcaggacatttggcccgagagtgccccaaatctgatgctatcaatgagaggggtgggcctcctcccttccgtggtggatacagtgatgtggtctgccgtgcttgcaatcaggttggtcatatgagtcgtgattgcatggccggtgcgttcatgatctgccacaactgcggtggtcgtggtcacatggcttatgagtgcccatctgggaggcttatggatcggtttccccctcgccgtttttgagtgattttccaagtgctcaatcagatgactcttcgttgggaccggcattatgaataatcatatctcgtgctttatgccttaagaatgttagtgtatttcagatacttcagttttcatagtttgtcagcttacttgtatttgtcggttctgctgtttaactgcgatactcgttgatcggtgaggatgaattccagatgggatacttgttttaattcctacaaacttgaagttagtctt

SEQ ID NO: 14590 - DNA, 3789 bp, Oryza sativa
  ref <308>: DATABASE ACCESSION NUMBER: AK065157
  ref <309>: DATABASE ENTRY DATE: 2001-12-06
ggcaccctctccctctgcccgctccctctccctctcttccgccgccgccttggccacccctcgcgccgccgtccccgcctccgcctcacaccgcggcccctcgccaccgtccctgcgtcgcgctcccacctccgtctccgcccctcgccgccgccccgcctcttcctcgcgccgccaccgccgccgcctccgcctcgcacagccgccatccccgcctccgcctcctgccgccggcgtaagaatccgaccacatggaaggggcggcctcgggtggagctggtgtcgttgccgcgacctcattggctaaaggccggttgtccgtcgatctagaggagggagaggtgacagcagcagtaaagagtgggaaggggctgtcaacggcagtatgggggagaagcgttggagcccgcttcccctactctcacaggggccgccgctgtcgaacctgtgttacctgggggcggagttcaggttccagcgggtggagctcggggcggagatgatgaccgacggtgaggcagttcgatgagcgccatatctgctcttctacaagggccccaaggtctgttcgtcccaggtcgatgctaaggaatctgaccacctatgttgctttcttgccgctgccatcaagacaccaagtcgagcttcaagaagggcacgtactggatggatgcagatgtggtaacagccttcgagctaagccgggccatcgacgatggagtgctgcagcctttgccctttggttcgctgacatgctgttccttctatgtgaggttgccagtaccacggactcgccgtcagcactgtgcaacgtcatccttctgcgctagactgactccaccctctgctgagtgagatcgcgtgctttttccactcgctacaagtccgagcagccaagcacttatcgcaagaatggaaaaccagctgccattcaatatggcactggttcagttgatgggtttttcaacgaggatagtgttacagtaggtgatctggttgtgaaagatcaggtgaatatttggctttgattggtgaaaaattaatggagcggatataatcgaacttggacttgctacgcattgtcccatcagtggtgctttggttcgcataataaactgagaaaatattatgggagtcttctcttcattgctgccctaggcaacaagagtgaagatctcttgatggtccatttgtgttggtttggatcaacaacatgccatgtgctgctgatagtatcatggcggttcttggggccaaggaggcgcgccattggtttgtccttaagatgacatattgttaatatcatatgaggtcattatagcatttggaagaatgggaaccatgtttcggtgtgatatgtatgacatcaaaccaaattttgtctcaataggcaatgtgagttcaggcttcagtagtaccagagtgattattgataactaccgagatgtccacgtcagagtggtacgagctccagattaagaagaacaagctttgtgacatgtttgatgagggacctaagcaagaataacttcatgagctcaccagcaccgggtgatgggtttccaatagtaacatccctaaccaccttatttatgaatagagatcaacttactggaacaaaccatattgagttctccgcaaatggaccatttaaatatcaagttgcttatcaaaatctaggcctccttggtgatgatcgtgagtggtattttgcaattgctgatgttgcatcgtgtgcacttccttaccaactttgtcttccagttaagatctgagaatgcatctctgcaaaagtgcctggctgagatgactcagaaatataagcagtctacgatagaaaatggcaatctttgagatgacgtgaacactatgagaagaaaggtattttttgttattgttgttatgagcatttgactacatccagcacttatttattcccattgaagggctatgaatttgttgattatagtcctgaagctatccacttaaatagtattctttcaataattaaaatgcttaaatagttttgtttttctggttcttctatatgtggaacagaagagattagtcgtgtatttttgtattttcttgttttagttttgttgttaagaataacactgttctcggcgtctatggtttgctgcctatggagaacttttatctcttgagaagaacaaaaaccttcagatgaggagtccaaacagggcacaaccgcacattcatacaaaccgtatgtgagtatatggacaactctatttgatctgcatggtaaggtgttctttttttcaaagcattcagtacaatgatgactgttgctgcaaagtaggcctattggtagtctagaattttcaatcctgtttccaacaacagtacacagggagatattgaaaggaacaacctgaacctattgttctatccctttgtatataagcttattctgtctccaaaacataacttgccttctgaataatgtttattgaaatatatctctattggaggtacaattcagacactgatttatattattgttcttttcaagaagtatttatattattgtaagttgtggttgttgttaaatctcatgatttcatattgtttacgttgtcatggagcacttttgtgttcaggtgaatatagcagattaaggcgtgaggacagtaactggaataggacttcaattgttcacagaaatgcctgcaagcagcacgcccttttcctcgggtgtatctgacgcagcttctgttgctctcatcgaagacgactaggcaaactgcagcctcccagatgaagcaattcctgtgcccagtgcggctatggcctcaaggtcgccgtcgatgtgaggcgccaccagcttggagagcctgcagaagagagtccatggtggagatgtgacacattccgaggcagcatcagccttgtcaatgcctgaagctactgctctggaaccagctttgtagtgctgccaatatatggcttactaaggtttttggtaatggtctaatggagtttgtggcatcaggatgcatagtttaccttcagttctgtcatgcccttttttgtattatctaatcactaatatgacatggcactaataatcaacaagttatatacaggaggcgcgccattggcgcgccccatcatctagtttgatgagaagatggagacaaggagagcaattgagaatgcaaacatccctcacacatatgtttctgcaaattgctttgcagctaaattcagtcctaacctctgtcagatgaaaactcacctccctcccaaagagagttggtgtgtacggggatggtaacgtcaaagtgttttttgtgtatgaagatgatgtgggaacatatacaatcaaatcaatcgatgatccccgcaccttgaacaagacaatatacataagaccacaagataactgcctcacttagaacgagttgatcgcgatgtgggaaaaactctctggaaaaagtcttaccaaattccatatacagggtgatgaatttttggcttcaatgaaaggttgcttaacaaacttcgacattggtgactatggagccgaagcaactctgctctacccagatgttcagtacacccgcattaatgaattcctaaaacgctatctgtaacggagtatacaaaaattttataaatatttatgttggtttacggtttggcagcttgcttcgctaagtcaaattctctctaggtatgagaattcaataacaccatgcttgtttgaatatatggtatttgtactgttcacaacccagctggaatatactctgttttacc

SEQ ID NO: 14591 - DNA, 2229 bp, Oryza sativa
  ref <308>: DATABASE ACCESSION NUMBER: AK098901
  ref <309>: DATABASE ENTRY DATE: 2002-08-28
gcttatccaatccttccgccacgcctccgcctccgccgccgcctcgccgtccgcctccgcggccgccgccgccgcctcgcggcaaaaccctaaccctcgaactcccccccaccccactcgcccccgcgcggagcaggcgagcggctaccccaacccgaccccatggcgtcctcgacggcggccaacctgtgggttctgctcggcctcggcatcgccggggtcctcctggcggcgaagcggctgcggcggcccgcgcggcccgacaacggcgcgttcatcgcccgcctcgagctcctccccccgccgcagccgccgccccccccaggcgcgacacccactcacggggctctgcttcgccatcgccgacgcattccacgtaactggttatataacaagttttggcagcttagaatgggcaaagacacatgatgcagcaacacaaacatctctagtcgtttcatctcttgtagatggtggtgctatgtgtgttggaaaaactgttattgatgaaatggcatttagtatccatggtgagaataaacattttggcacaccaacaaatcctgctgctccagatcgagtacctggaggatgttcaagtgggtcagctgttgctgttgctgctggcattgtagatttttccttaggtattgataccattggaggagtaagggtaccaggtagttattgtggcgtcttggcattccggccttcacatgctgttgtccccaacaatggtgttattcctgtcgctcctagcctggatgccataggttggtttgcgagggatccaagtgtactgcgtcgtgttggccatctccttctgaggctaccctacgctgatattcgacaacccagacatttctacatagcagatgattgctttgaaatgtcaaaggtgcatgcaagaagattgactcaggtggtgacgaaatctgtggaaaagctatttgggagacaagtcctgggtcatgttaatcttgaaaattatttggcttcaagaatacccagcctgaggaacaattcaaatggtcatggtgactcaaagttttcttcattgctagcactttctagggctatgcagtttcttcacaaacatgaattcaaagatcaacatatggagtggataaactctgttaagcctgctgttgatgcatgcatagttggtaatttgtctgatgatggtgagtcaactatcaataacagtcaagatgcaaggaaagaagtccgtgcagctctcggtgctcttcttaaggttgatggaattctggtcattccaactgttctgggatgccccccaaaactaaatgccagggaactttcatctcaggactacaatgttcagacatcatgtcttacatctttagctagcatgtcagggtgttgccaggtgacggttcctctgggtacacatgataagtgtccagtttcagtttctttgattgcaaggcatggtggtgatcgatttttattggacaccattcaaacaatttatgctaccatccaagagcaagttgacgctctagcaaagtctaatgtctcgagtaaacaggcgatgagtgaagaagctgctgaagctgctaaagagaaaggtaacattgcatttaaggagaaacaatggcaaaaggcaataaatttctatactgaagcaatcaaattaaataataaagtggctacatactacagcaacagagctgctgcttttctagagctagctagttaccgccaagctgaggcagattgcacaagtgccatcgatattgatccaaagattgtaaaagcttatttgaggagaggcactgcaagggagatgctgggttactacaaggaggctgttgatgatttcagccacgcccttgttctagaacccatgaacaagacagctggtgtggccatcaataggttaaagaagctatttccgtaaatactgggctgttggattttttttctgcataaagatactcaagttctgcatgcctggggggtgaaaaagaaggtacctgagtgccaccgattgatgctgctatccaagttcataaggtactaactaccgttgctactggcgatagaactgtctatcatctgtgttttcaattagttgttaccccccaagttttggaaaagtggaatcgaaaacagaattttgggagttgatcatagtaaacaatgcctttaaatatgctctagtggtgttcttggcccacttccatgtataatatcggttttggc

SEQ ID NO: 14592 - DNA, 4859 bp, Oryza sativa
  ref <308>: DATABASE ACCESSION NUMBER: AK065158
  ref <309>: DATABASE ENTRY DATE: 2001-12-06
gggcttctcctccccaaccgaccgaagtaccgaactgacccaatcacccaaacatggcggaggcggggcccagccggccggccgccgccgccgccgtcgccgccggcgacttcccggagctcctcgccttctgcgcccgcgcggaggccctcatcgccgagctcctcctcctctccgaccgcgccccgtcgcagttcgccgaccgccgcttccaccccgtcctcttcgacttccgatacttcgactccccgggcgaattcgaggcgaggatcgaggggaacatggagctggaggccctggaagacgagctccgcgagtcctgcggctcctacatgcggaggttcttcgccttgctggatgccgccgtcgcttaccacgacgagctgtgcagctacctcaacgacctgcaggaagggctgtatgtgcattgcacattggatggtgtactggagagtaactgggcttgccaattgcttacagaatcgatgactttgtttgggtgtatggctttgctaatggagcacaggattagcggattgctgcgtgagagacttctggtggcgtatctgcggcacgagcgttgcttcagcttccctaatgtggagcgcatatgcaagctctgtcgtcggcacgtgactacacctccttcgcctggtgcctccggttcatcgttgcatactgtggaaatcatctctgtacagaagcctgaggatctgcttaggaggtttcagtttcctgagctcattgtggatgctgtcataacttgcttgagaaatggtgatgtttacaacaatgtccggttctaccctgatccgcagcaccggacaaccgctctctcattgcaaggtggacacatgtatgtgttgttattttattctcgtgaccttctacacaacggtttggctatgcgggagattgttgatcgcttctttaaggacaactgggtggttcccatcttcttgcatttctcggtagatttacttgtctcatgggatgcattcaaagaagcgaaatcatcattagtttcttgcctttctcccaccttcgtacgtgatcgcagtctataccactatacaaaggtatcttctcttctagctgacctggatagtcatatgcatgcggtaaacaaggaatatgttctggataattctctgaatcttctttctatcatcagagagtgcaattgcacactgcgttggcttttgcttcaccgcatgacaaatgataagaaggcaagggacctagtgatctgtttagggtcatcacaacatgctgacgaagggaagctgttacagctcctgatgaagactgctaaacttgagtttgaggtgaaggaactgcatgctgaactattgaaaaccagaaaaagtatgtggtatgagaagaggcatgatgctttggaatgtatgaaggacctgtctcagaactatcttgggacttgggctgcgtcatgcaaattaaaaaacaagagcatcaaagactggttggagcacctgtcatcagaggttagctccctggattatgccacaattggaaactccggcaggataattcatcgtgtgctatctacgctaaaagatattgagctacttcaccaaatcaaagagaatatacagataaagcatggcttctccaaaatacagaagaatcttcatgatatgataaaagttctaaacctaaaccaagagtccataagtgttttctcagtgattactgatggtaagtatgcatggggttatcttacttattttgaggaacttcttaagaagaagatcagtcaagatccatcagagtctttatttttgcatacgatgtttcttaaatttcaatcatggttggatgcaccgctgcagaggatcaagcagtatgaaagtccagatcttcagtatgtctcaacctactatgcttcaaagtatgcagctaaaatatttgcagttctagatattatcccggctatattgcttaaaatttctattgatgtggattacatcaatgctgaacagtccactcatctaataaatcgcatcaacaaggaaacattggaagatctcatgcagttggatcaacaactatgccaagcacagcaggctgccaaactatgcattgtttcagagggccttttgaacatgtcaaagaactttgatggccttatagatctgaatttaggtggatggcttaagcaaatgataaaaaaggagttagtaagccaactacaaggcaagctgaaagccttatcattgctcatttatggtgatatagaaggcaatctcatgtcattgtcaaattatatgctttcacagatgcagagaatggaattcctacagcacatactgcacattgacgggtgttcaatctgggaagaaacattgactgctgtgctagaagaatgtgctaaaagggaggtcttagagtttatgggatgcatgcaaccatccactaatatggtgaaaccatcgaatcatatgtccaatccgggcactttttttggtaatattttagattaatacaccttagagcagcgagctcctagtaattgcagcgtgcaaaataagttgtgcatgtcaatttactgatttatcctctattcccttcgttttcacatatctcccctgcattgataagcagcttaacaacatatcactctggtatctccaaggtgtattcagcagagggaaataatagaaatacccttagacttgaattgtccacccatggatctggaaagtggttacggactagctctttgattaacttatgactattttttggacccagggaatctaccccccccccaccaaaataataataataataataataataataataataataataataataataataataataataataataataaaataaaataaaataattgctcaagcaaagaaatctcttcatggctcaacatttgcgcaaggatattcaggtttcactgaacaacatagatttgtcatttgtcataaatgtattggactgtcagtaatcaatagtcttatgttttagggtaaacttttgattttctggcctattctttgtcaaatgcctagccacttagccaaatgtctgcaatgcatacaaatttctggctggactcagtccaaaatttaatcagctaaaaacgaaccactggttttaacaaagcacaacaaatctttcagaattcattttttctgtcatatcacaggtcacctgctgcaatatatagttcatttaacggatccatcgcgctccatgtttatagaggctatgatgggttggtttgatgcaggaggaaatgaattgcttggtatgcgcttctttcatttgctggaatcatggtaacttctgatcctatcagctgagtgaaacatggaagtatggaactataagtaaacttctgcttaggaactcatacaaagcagaattctgttttcacattgcattgtgcgcttctttattctggatatcagcaacggtcttcatttgttcaaaaattttttctactcacatgttttggcatactagattcttttgttatggctcctgatatgcaaatgtacttttcttcagtgtgggacaagttggattagcttgcttggattccttaatacatgtactagtaaagcagagtgtggagcatgcaatgaaagatttacatacattggttgatgttaaatgtcgagaggaattgaataagctggatgatctactggggcctcccatgtccattcctctgatgggttggtcatcatataaggaaatggtgaagatgttgcattcatcatggggaccactggttgagaaattagcaacaatcggacagctgcaattggttcgaaatctcgtgtcctttaaattgagatcagcatgcaaggtcagagcaaacactataagctcggctgtggacattttgtcatcttcagtttgtttgcagaatgggaggtttgagacaggggccgaggatcacaatgtcagactcttccttaacaatataaaggatcagcagaacttttgcggcttactttcacctcttcaggctatctatatttctgaagagcctccaatgttcttgaccagattgctgtgcatcttttccatatcgcagttaccaaaatatgttcttgacattcacttgggcaatttgaccaatccactaaagaaatctgtagctgatttctctgctctggtcatagggcttggtacacttctgcagcagtttggtccttcccatataacccagtatattgagtttatgattcaatatatacggatggcagaagcagcatttaatcccacacctgttacaaacaagggatctgctcattcctctgaggcaccaaaggcgttatattgggtgatgtccttctgcaagtacatggatatctccatggatttagtcgagtcatgcttaccatcttcctctctggctatcctgcaatcctgacccttctgttgtagttatacataggtttacaaaatcggttaagccttagaactgttagcttttgagcttttcttctccattccatgatccagggtttataacttacgaggtcgcaatggtgctagttgacacttgacagtgccctgaccctgaaatgctgcaagtgcagtagctctagtgggattctcagtacagctacgcttttggtggtaaaatgaaatggagtagagcgcgtactgttgaacattcatgtgagtttttcatcagggacttgcggttattttcatgcgagattttcttaaccctatcttgtattttggtgtgttgagccagtcagagactacatagtgggaagctggcccataaaagttaaaataatagatttgacagtattatccatcagttttatgggagactaaatttt

SEQ ID NO: 14593 - DNA, 1411 bp, Oryza sativa
  ref <308>: DATABASE ACCESSION NUMBER: AK065159
  ref <309>: DATABASE ENTRY DATE: 2001-12-06
gggctcggctcaggtcctccaacaacaaaacaaactactctgggctgggcttctcccgatcgatatcccccgttcgtccgtccgctctcctccttcccaaccggcaatccgccgatccgtccgacctctagcttgtacgctgccgctgccgccatgagctggtggtgggcgggcgccataggcgcagtgaagaagcggcaggaagagaacgcggcggccaccgagccgtccttccagagcgtcgccctcgtcgtcggctccacgggcatcgtcggcacctccctcctcgacatcctcccgctccaggacaccccgggcgggccctggaaggtctacgccgtctcccgccgcccgctccctccctggtccccgccggcctcccccgccgtcacccacctccacctcgacctcgccgactccgccgccgttgccgaggtcctcacgcccctcaccgacatcacccacgtcttctacgtcgcctggtccgcccaccccacggaggcccagaaccgcgaggtgaactccgccatgctccgcaacatcctctccgtcgtcgtccccaactgccccgctctcgtccacgtctgcctccagaccggccgcaagcactacatcggaccattcgaggtcatcggcaagatcgccgccccggacccgcccttcaccgaggacatgctccgcctcgattgccccaacttctactacgacctggaggacgtcctcttcaacgaggtctcccgccgcgacggcgccgtcagctggtccgtgcaccgccccaccgtcgtcttcggattctctccccgaagcgccatgaatgtcgtcggcagcctgtgcgtttatgccgccatctgccgcaaggagggcgctgtgctgcgatggcctggatccagggtcgcctgggagggattcagtgacgcgtccgatgcggatctcatcgctgaacacgagatctgggccgccgttgagccattcgccaagaatgaggcatttaattgcagcaacggggatctctacaagtggaaacttctctggccgatgctggcagaccaattcggcgtcgaatggtctggctacgagggagaagagagcagcttcaagcttgcagatgccatgtcggggaaggaggcagtgtgggcagagattgtcaaagagaatgatctcatggacaccgagcttgaagagatcaccaattggtggtttgttgatgccgagttcggcgtccgcagcgagcatttggatagcatgaacaagagcaaggaacatggattccttggcttccggaacacggtgaattccttcaacacatggatagaaaagatgaaggttttcaagattgtcccatgatgcgttcaattgttttttatattattgcacatcttgttttctatgccattcatccaaattgctcccg

SEQ ID NO: 14594 - DNA, 557 bp, Oryza sativa
  ref <308>: DATABASE ACCESSION NUMBER: AK065160
  ref <309>: DATABASE ENTRY DATE: 2001-12-06
ggtccgttcttatccacctccacgcccatcacgcttgcggccgtttccatccttccgcttcatcggagtagttcgccgccgggttgggttttcttcttctcttgatgcgacgtggaggcggcgagttgttcgtcgggtgcacgaaccggtgatttttttttgttttggcgatgccttcgctctcctgccacaacctcctcgacctcgttgccgcggcggacgacgcggcgccatcgcagcggccaaggcaagtgcagctgcgggtctcgttcgaaggctcactgtgacggagacagggattattctgcacagtataaaaaccaaggaggaaattccaataacaaatggaaaagatgatgatgattcagttcgtgtggtttaggggttagctgcagaagttacaggataaacaggtttttttttgtttttttttcttctttttctttcaacattttcagccttcttccatgcttgtatatgccccgtatgataaaaatatgcgagaaggtttcagccaccttgtatatgtagttgacgatgacgatgaaatcagaacc

SEQ ID NO: 14595 - DNA, 2311 bp, Oryza sativa
  ref <308>: DATABASE ACCESSION NUMBER: AK065161
  ref <309>: DATABASE ENTRY DATE: 2001-12-06
gggctggctatcttacctcccttttctgcgccgcgtcctcctctctctcctttcccctagggctctagctccaccgcctctcggccaccgccgctccccgccgccgccgccgacgacgcgcgagggagtgtggtgaggactgatgaacttctaaacattgggtatggatggatgtgactgcatcgagccactatggccaactgatgagctcctcatcaagtatcagtacatctcggacttcttcatagccctcgcatatttctcgatcccgttggaactaatttatttcgtgaagaagtcatccttcttcccatacagatgggttttgatccagtttggtgcatttatagtcctatgtggagcgactcatctcataaacctgtggactttcaccacacacacaaagactgttgctatggtcatgacagtcgcaaaggtttcaacggctgttgtgtcctgtgcgacagctttgatgcttgtacatattatccctgacttgctgagcgtgaaaacaagggaattgtttctgaagaataaagctgaacagcttgatagggagatgggcttgattaggacacaggaagagactgggaggcatgttaggatgcttacccatgaaatcagaagcactcttgatagacatacgattttgaagactacacttgttgagctaggagggaccttgggcctggaagaatgtgccctatggatgccgtcaagaagcggttcaagtcttcagctttctcatactctccgccaccagattactgttgggtcaactgtatcaattaatcttcctgttgtcaatcaagtgttcagtagcaacagagcaattataataccccacacatctcctttggcacggatccgacctcttgcagggagatatgttccaccagaagtggctgcagtgcgagttcctcttctacatctttcaaactttcaaataaatgattggccagagctttcagcaaagagctatgcaatcatggttctgatgcttccatctgatagcgcaagaaaatggcatgtgcatgagttggagcttgttgaggtcgtggctgatcaggttgcagttgcactttctcatgcagctattcttgaagagtccatgcgtgcgcgtgatctgctaatggagcaaaatgttgctctggatttagctcgacgtgaggctgaaatggctatccgtgctcgtaatgatttcctggctgttatgaatcatgaaatgagaacaccaatgaatgcaataatagccctttcgtccttacttttggaaaccgaacttactcctgagcagcgcttgatggtggaaacagtcttgaaaagcagcaatcttttagcaacactcatcaatgatgtgttagatctttccaaacttgaggatggtagccttgaattggagattaaagcattcaatcttcatgctgttttcaaggaggtaatgagtttcatcaagccaatcgcagccatcaagagactgtctgtgtcagttatgttggcaccagacttgccattatgtgccatcggtgatgaaaagaggctaatgcaaactattttgaatatctctggcaatgctgttaagtttacaaaggagggccacatcacacttgtagcttctgttgtgaaggctgactctttaagagaattcagaaccccagattttcacccaactgcaagcgatgacaatttttatttgaaagttcagattaaagatacgggctgtggcattagccctcaggatctacctcaagtatttacaaagtttgctcaatctcagcctggaggaaacagaggatacagtggtagtggtcttggccttgccatttgcaagaggtttgttactttgatgggagggcacatctggttggatagcgaaggaacaggaagaggctgcacagtaacgtttgtcatccagcttggcatatgcgataatacgaatgcatatcagcagaagctgattcctctagtctggccaagcagtggggatgctgattttgttggtccggtgccaaatgctcctaatgaagagaaaggtcaggcttctctgaaatctcggtatcagagaagtatatgagctactgtaaattgatcgacggcattgtatcaagtagggcctggttagtttgtctctaattttgtgcctagccttgtgatagctggaatatatttgtacaaataatgtacagcagatgggactgcataatgcagctatgcacctgggtacaactctaacttgcgtagtgtcctgtcagcgaaatgtgtattctgggctgttcgtgtgaccttctgatagctcattgcttgttctgtc

SEQ ID NO: 14596 - DNA, 1213 bp, Oryza sativa
  ref <308>: DATABASE ACCESSION NUMBER: AK065162
  ref <309>: DATABASE ENTRY DATE: 2001-12-06
gcgtacaccttcgcaccccgtttccatatccgcaaataccactttacacttgagccccgaattgagtctatatttgacagcggcagcccaatggcacaacggacataacccgatgagcgctcagcgtaaccgctccccgccttctcccccaagcccagggcgaggcccggctcggcggcggggcccgcgctgcggcggctggcggtggcggcgccggcgccgcgggcgtacttctcgtcgtcgcccatgccgtaccagccgcagccgcagcagccggcggggtactcgtcgcaccaggcgttcggcctggtgccgatggtcatcgagaccacctcgcgcggggagagggcgtacgacatcttctcgcgcctgctcaaggagcggatcgtgctcatccacgggccaatcgccaacgagaccgcctcgctcgtcgtcgcgcagctgctcttcctcgagtcggagaacccgctcaagccggtccacctctacatcaactccccgggcggggtcgtcaccgcggggctcgcgatctacgacaccatgcagtacatccgctgccccgtcaccacgctctgcatcggccaggccgcgtccatgggctccctcctgctcgccgccggcgcgcgcggggagcgccgggcgctgcccaacgcgcgggtcatgattcaccagccatccgggggcgcgcagggccaggccaccgacatcgccatccaggccaaggagattctcaagctgcgcgaccgcctcaacaagatctaccagaagcacaccggccaggagatcgacaagatcgagcagtgcatggagcgcgacctcttcatggaccccgaggaggcgcgcgattgggggctcatcgacgaggtaattgagaaccgccccgcgtccctgatacccgagggcgccactggcgttgacctgccgcaccacagcgccgctggcgtcggcggaaggggcagagatgtcgaggagccctccgcggtgtgagctgtggccgcaaaggtgaaaccttttcgtgtcccatggccatgttgttgttgttattagatccaaggttcagttcttatactacataaacttaacttgttattattcaggttgccacttgttattcaggttgccgatgtgttcggctccttacatgttgtcttgattgcctgaattgagctactgctgatatttattgcaaatctaaggaaattttattccttcc

SEQ ID NO: 14597 - DNA, 1312 bp, Oryza sativa
  ref <308>: DATABASE ACCESSION NUMBER: AK065163
  ref <309>: DATABASE ENTRY DATE: 2001-12-06
gcttctcatctcatctccctctcctctcctctcgccgtcgccgtcgccgtcgccgccgctcgccgccggcggggatagagttcgccgggatcgcctcgccgggagagttccctcaccatcccgcacctccgctcgcctggcctcttcctcccggaagtgtggtgtgctgcaagctcctgtctctcctacaaggtttcaaaaccaaaatatgcctgaagcacacggaaagctggggtgattaacgtctgtttcttttgactacaatcatcctgattctgcttctgtctgcaaaaacaaccaagccatgacgtctgtagttcatgatgtttcaggcaaccatggagctgatgagcggcaaaaacagcaaaggcaaggtgaacctgaggaccagcaagaagcctcagttactagtacagatagccatacaatggtagcaacaccttcaacagattatgcgacaccctatgcccatcacgatatggcccatgcaatgggccaaattgcttacgcaaatattgatccatattacggaagcctttatgcagcttatggtggacagcctatgatgcatccaccattggtcgggatgcatccagctggactaccactgcctaccgatgcaattgaagagcctgtctatgttaatgcaaaacagtacaatgccatattaaggcgtcgacaatctcgagccaaagctgagtctgaaaagaagcttgtcaagggccgtaagccatatctccatgagtcacggcatcaacatgccctgaaaagggctaggggagctggaggccgatttcttaattcaaaatcggatgacaaggaagagcattctgattccagttccagagataaacaggatggagttgcaccccgtgatagtggccaaccgtctacctctccgtcttcaaagggtgcatcatcagctaaacaaaataagaagtcaaaaaccagtaactaaacgggatttaaacacctggtgtgaaacatggaaacagttttgtacagtacatgctagcgatcgacaaagaatggtgtcattgggtgttgtaggataatgctccatagagaatatatagacagggcaacagattttgcagcctttggttcggtctgctcagtttctttaccttcttgtacaatgagtagttttcgtcagttgtgctttgtcatggggatagctgaatttcttcaggaagtcttgtagttttaaagagttcattagcttgccaattgtttgctttggattggattggtctcttactgcctttgcatcatcatctgcagtgcacagaataaaacattggctatgtgt

SEQ ID NO: 14598 - DNA, 2365 bp, Oryza sativa
  ref <308>: DATABASE ACCESSION NUMBER: AK065164
  ref <309>: DATABASE ENTRY DATE: 2001-12-06
gtgagggggaggtgtttgcgtcatggatgtgtctgtcccaccaaccaattatccgaaatctttatcctcgattatcaaatgccatcgtcgtcgtgcggcaataaacaattgccattcagtcgtctcgcatccgccgctctcgcactcgaaccaccaccaccgctcgctgcgtgtgagatccagcgccgccgtcgcgccgccgctgccgccgccgctggtggtgccgatgacgacgccgaagccgagcccgacgatccggaggctggacgtggcgtcgccggtgccggcggacatcgacatcgccaacgccgtctcgccgcttcccatcgccgacatcgccgcggagctcggcctgcgccccgagcacttcgatctctacggcaagtacaaggccaaggtgttgctgtctgttcttgatgagttgaaagggcagcaggatgggtactacgtggtggtcggcggcatcacgccgacgccgctcggggagggcaagtcgaccaccaccgttgggctgtgccaggcgctgggtgcgtttcttgataaaaaggttgtcacttgcctccgtcaaccatcacaagggcctacttttggaatcaaggggggtgctgctggaggtggctacagccaagtcatacccatggatgagttcaatcttcatcttacaggagatatccatgcaattacagctgcaaacaatcttcttgctgctgctatcgatacaaggattttccatgaggcttcacaatcagacaaagcgctgttcaatagactatgtccgccaaacaaagaaggaaagaggcgctttgctgatgtaatgctcagacgcctgataaagcttggaatctcaaagacagatcctaatgagcttactccagatgaagttagacgctttgcaagacttgacatagaccctgaatccattacttggagacgggtcatggatgtaaatgaccggttcctgagaaaaatcactattggacaaggccctgatgaaaagggtatggtgagagaaacaggctttgacatagctgtagctagtgagataatggccgtattagctcttacaacttcccttgctgacatgagggaaaggcttggaagaatggtgatagggaacagcaaggcaggtgagcctattactgctgatgatcttggtgttgggggtgccttgactgtcctaatgaaagatgccatccatccaacgctcatgcaaactcttgaaggcactcctgtgttagtgcacgctggaccttttgctaatattgctcatggaaactcttcgatagttgctgataaaattgcactgaagttggttgggaagggtggatatgtagttacagaggcaggttttggttctgatattggaactgagaaattcatggatataaagtgtagatatagtggattaatgcctcagtgtgctattattgtggccacaattagagctcttaaaatgcatggtaggggccctgatgttgtggctgggaagcctttggatcatgcatatgtgagtgaaaatgtggctcttgttgaagctggatgcgtcaatcttgctaaacatatcgcaaacacaaagagttatggagttaatgttgtagttgcaatcaacaagtttgcatcagatactgaagcagaaatggacgtggtgcgaaatgcgtctttggctgctggtgcttttgatgctgttgtctgcactcaccatgcgcatggtggtaaaggagcggttgatcttggactcgcggttcaacgggcatgtgagagccaggcagaccctctgaaatttttgtatcctttagaatctggcataaaggagaagattgagtcaatagctaagttctatggtgctagcggcgttgaatactctgaacaggcggagaagcagattgaaatgtataccaagcaaggcttctcaaacctcccaatatgcatggcgaaaactcagtactcgttttcgcatgttccatccatgaagggcgcgccgtctggcttcgtgcttcctatcagggatgtgagggccagcattggagccggtttcatctacccactggttggcaccatgagcacaatgcctggtcttcctacaaggccctgcttctacgaaatcgacgtcgacacagccactggcaaagtcatgggtctgtcataagcgtttctggaatggattgcaatttggggcacaattgtgtagttgcaaattttgggacattcccttagctgaataatagcctcagtggcttcctgcaagtgcagcaatacatttttctttttgagtttcttggtgactgtaaatcagtaaatgtggtcgaaccatactgttcagactctgttccaatgccccatgtttcagcttaacatgctttctccg

SEQ ID NO: 14599 - DNA, 1781 bp, Oryza sativa
  ref <308>: DATABASE ACCESSION NUMBER: AK098902
  ref <309>: DATABASE ENTRY DATE: 2002-08-28
gaatcagttccccaaatcccccaccctatccaaactcttcctcccccgatccaattcgactccactccatctccctcctccggatccctaatgcacaaggtgtagaattaaattccggggaaatcgacggagtcggaggtaggcgtagcagcatggctggaggagatgactggtcgaagaggacgatcatggaggaatccctgcagccgccggcccacggcgctgcggcgactacaccttgggtcctcctcgacatccgtgctttcatggccaaccaccgcaacgccaccaccgccatgtccgagaccaggagcggccaccccatcgaggtatcctcgtggacggcgcctccgccgcgcgtctcctacatatgcgtccactgccctggattggactccaagaagttcgccaccgagcccaccatcatcgccgcggaggccgacctcctcctcatccgcgtcgccatggggcgccggaacatccgcttcaggagcagcttccatgactacttcgtctaccaggccaccaccccaaccccgaaactcaccttgctcccgccccctcccatcgacaggttcatcgaccacgagcttggcctcctgcgctgttgcgcctctcctgattacattgttgctgcactctgtaacaccttcgaatcaggatactttgagtatgacctccacatctactgctccggcgctgatgcttggacctgccatccaatctccctccatggcctggtcgacacatcatttacccatatcaataccaaggcaatcaccattggagggaaggcgggcaccatgggctgggtcgacctctaccgtggtattctcttctgtgaccttctccgcgacaccactgagctccgctacttccccctgccgccgccgctcagtcccaacaactcgttaacaggctctccaaggcctcatcgtgacattgcccttgtccaaggtcggatcaagttcatcgagacgcggcttcatgtcaagccaggttccatcatcaacggcaccttcatctctcaaggttggactgctgccacctggactgcaccggacaccaatccctggaaccaaggttggcgccaggactgcaaactcactgcttccgatatctctgttgatgacagcaagatgaattttgagttgctgcctaagcttttcgatgaccaaggcacacctcagccaaccttggagagacttcatgtgggtcatccaacgctcagcttgcactctgatgacattgtttgcttcatggccaaggccgaccaatgggacgacgatgcttgggtgcttgctgttgatatgaagaacaagaggctaaaagttgtggctgagtttggtgcagaaagaacccttggcattggctatgcctacatgagcagtaacatatcagggtatcttcgtacagctccaggtatagagggtagcctaaagcgacaaggggtttgttgaccgcaccctcacacaagaagcagacccatatgatgcatatgtctcctccctcttggaaaggtggagatcaacagaattctgtgggaggtgaagttgattacatggattttgggtgaggaggggcatggctaaggggagagcattttcatgtagtattgctgttgtgttagacttcttattgcttgattatctactgttttgtcagttctatttacgagggggtattgctggtactttgtaccgaggatgactatctaagcacaaaatcttaagagtgtagtttatgcctctgtttatttcttatcaatgtagcgaggttgt

SEQ ID NO: 14600 - DNA, 2692 bp, Oryza sativa
  ref <308>: DATABASE ACCESSION NUMBER: AK065165
  ref <309>: DATABASE ENTRY DATE: 2001-12-06
ggacgcgcccactcctccgcgtcgcgtcacccatggcctcccgcctcctcctcctcccccgccgccgcagccgccatggcggcgccagcctcctcctcgcgcggctcctctcctcatcctcctccgaggctggcggtggtggggcggtggagaaggtgcttgtggcgaacaggggggagatcgcgtgcagggtgatgaggacggcgcggaggctcgggatccccaccgtcgcggtctacagcgacgccgaccggggggccctccacgtgcgcgccgccgacgaggccgtccgcctcggcccgccgcccgccagggagagctacctcaacgcctccgccatcgtcgacgccgcgctccgcaccggcgccaaggctatccacccaggatatggttttctttcggagagcgcagatttcgcgcagctctgtaaagccgaggggcttacattcattggaccaccaccatctgctatccgagacatgggcgacaagagtgcttctaagaggatcatgggtgctgctggtgtaccgctcgtcccaggttaccatggggctgaacaagacattgagctgttaaaacttgaagccaataagattgggtatccagttttgatcaagcccacacatggtggagggggcaaggggatgagaatagttcaaaggcctgaggactttgtggattctgtattgagtgctcaacgagaagccgcagcatcatttggcataaacacgctgctggttgagaagtatattacccaacccagacatatagaagtccagatatttggagatcaacatggaaatgtgattcacctttatgagagagattgtagtctacaaagaaggcaccaaaagattatcgaggaagctccagctgtaaggctccattacctatgcccttgggtttgttttgaataaaataaaacctcaagctttccatttatgtacgctctgcagccaaatgtgacagctcagtttcggtctcatattggtgaagctgctgtatcagctgcaaagttggttactacagtgctggaacagtggagtttatcgtggatactctttccggagaattctatttcatggaaatgaatactcggctccaggttgaacacccagtgaccgagatgatcgttggccaagatcttgttgagtggcaaatacgaattgcaaatggagagtgcctaccattatctcaggagcaggttccgttaaatggacatgcgtttgaagcccgaatatacgcagaaaatgtgccaaggggatttcttcctgctacaggaaccttacaccactacaggccagttccctctaccgcaacagtaagagttgaaactggagttgaagcaggagatactgtcagcatgcattatgatcccatgatagccaaacttgtggtttggggtgaaagtcgcaatgctgcgctagtcaagctaaagaacagcctgtcaaactttcagattgcaggtttgccgaccaatgttggtttcctccaagaactcgcaggtcatagtgcctttgaaaaaggcctagtcgatacacatttcattgaacgctatcaaaatgatcttctgagtacttctactcaagccttgagtggatcacatgaagcagaagagcttggtgcaattttggctgctgcctgcatttgcaagaaggatcatgtttcctctgaagtgtcacttcgtatgttatgtggctgtcctttaattttgtcatgcaacattttgctcgtatggactgataatgacataattttgttggcagatgataagaaactttctatgtggtacgcccatccacctttcaggatgcatcattttgccaagcgtctaatagaatttgagttggatagagaacttggtggatcaagtgatgatcttcttaaactgtcggtaacatatagatctgacggaacctacttcgttgagactgaagatggttcttctcctggattggatgtcaaagtagatagcagaggtgaccatgatttccgggttgatgttggtgggctgcaaacagacgtaactctagcattttattcaaaggacaattgcaaccatatacacatctggcatgggaagcatcatcatcattacaggcagacgttgagagctgagcagtcacctgatgacagttctcaacctagcgcttcctctgaggcgaggtcacatccaaaggggagtgttttggcaccaatggctggtctggttgtaaaggttttgcttaaagacggggcacgggtggaggaaggtcagcctgtcatggttatggaagcaatgaagatggagcatgttgtgaaggcgccttgtgccggatatgtggaagggctgaaggctactgccggacaacaagtttttgactctagtgtccttttcaccgtgaaggagaacaagccaaattgagaaacccaggcagagattcacgacctgtacagctcaattcacagacgcttcataagttggctgatgatgctgccggccgtccaaaagcaagcaaataataagcgacaacatcgagttcacaacacaaaagcaagcaaaaataagcaacgggttcatctgtgtgaataaattagttgacgagctcccaacccaccccctgttgttgttgtcgcaaacctgaaactgtacagtgtacattactgctgtcacatacagtgacaaaaacaattaaacctcatttgttcttcc

SEQ ID NO: 14601 - DNA, 2644 bp, Oryza sativa
  ref <308>: DATABASE ACCESSION NUMBER: AK065166
  ref <309>: DATABASE ENTRY DATE: 2001-12-06
ggcggccgtcgacgagacacgagaaaggcgacgaccactgcctcctccactcctccagatcgccgccgccgccgccatggggggcggctccacggcgcccctcctcgcggccttcgcctgcgtcttcctcgccgtcttccctcccgtcgcctccggagatgctgcaacgttggagtcagttccggatcttgtgaaggcaatgtacataaacgttgaaagcttcccttgtgtgaggctgttgaatcactctggtcaagtcggttgttctaatcctgggcatgacaaggttattgcaccgattgtaagatttggaaacagaaatgatcagttggttcagccgtcggcggttcttcttcccttaaatcagatgacagatttctttctgagggtatccaatgatccagaactttatcgtaagatagctggcgtactagttgaggcaaatggcgttgataacatgctagagttttcaccggatagaaaatttccacaacaggcttttgcaccatactcaaatctcagccatcattggaatcccacgggatcaggtattatgtggaacaaatatgactttcctgtgtttcttctctcagaggagagcacacagactctgcaaaaccttgcggacaagaatgagaagagtgccaatggatatctagcaaatgttgcagaatttgacctcgttatgcagacaacaaaagctgggacgcatgattcagagtcctgcctcagagagcagtcatgcttgcctttaggaggacagagtgtatggacttcgttaccaccaatcagcaattcatctacaaagcatcagaaaccaataataatggtcactgcatcccaagactctgcatcattctttcgggaccgtagtcttggtgctgattctcccatctctggattgattgccttgctcactgctgttgatgctctctctcaccttcatgatataagtaatcttaagaaacagcttgtttttgctgttttcaatggtgaagcctggggttatcttggtagccggaaattcttacaggaattagatcaaggggctgactctgttaatggcattagcagcttattgattgaccaggtcttggagattggttccgttggcaaggccataagtcagggatatccactattttatgcgcatgctgcagggaattcgtcaatttcgatgaaaatggtagatgcactccaaagtgccagtgaatcacttggttctgataatgttaaagtaaaaccagcagcttcatcaaatcctggtgttccaccatcttcattaatgtcgttcctaggaaagaattcatcaactcctggacttgtcttggaggattttgattcccaattttctaatagattttaccacagcactttggatggccctgcaaacgtcaattcttcgtcaatagcagctgctgctgctttgattgccagatcattatacattcttgctagcgcagacttgcccattgatctcatcacactgaacactattaaagtgaatgtttcactggtagaagaattgattggatgtctactgaaatgtgatcctggtctttcttgcggaattgtgaagagcttcatttctccaagcaactcatgtccaagtcactatgttggtgtttttcaggatttgcctgctggcacacagtttccttcatatgcagatgatatctctcggtttatatggaactttttggcagacagaacttctagtttggcaggtaacagtagctcttgtactggacagtgccatgatgaaggcgaaatatgtgtaggggcagaagtggaaggtggaggcagatgtgttgtatctacaactagatatgtccctgcctattcaacgcggctgaagtttgaggacaatgtatggcatgttcttccagtaaactcttcagacccttttagtgctgcagatcctgtgtggaccgaaagcttctggaatacaattggcctcagggtgtatgcagtgcaagctacatcttatgattggcttgttcttctgatcgggatcattattacggtggcatcatactttgcagtgatcgttggcagatcatacatttcaaagatcataaagcgggactaaaacatcatccattccctccattatttctgagaccttggtccatcagatcctaccaccaaagccatctctgtaaggtgctctgggaattttgagagttggaacagaactaatagtctaacacatgaattaagtcggcaaatcttagatgcaatgtggcacatggcgatagggagaggatttgtaaaactacaaaagccatgtggagccttccagctagaaggagatgtgatcctactacatgatacatgacaccgacctacaggctgttgtgatttgtactgatgtttctggatctgcttggctgattggctctgcattggtaggtataggtagatggatgatgcccctctgggaggatgtatgctgtggattagtgctggttatgcacgtatcatctttgagttttggctgtgtacgtctctccagtcctattttcctactgtgttgggaccagttgagtattgtgctggtttacggaaccttatcgatatcatgtcaagaactgtccctatacaattttaaataactgaaaagctcagattcgccatgtcc

SEQ ID NO: 14602 - DNA, 2387 bp, Oryza sativa
  ref <308>: DATABASE ACCESSION NUMBER: AK065167
  ref <309>: DATABASE ENTRY DATE: 2001-12-06
gattccattctccttccgccgccgcccgctctctgttgcgccgcagttgggagcgaaacccttgtcttcctcccaacccatcttacccaaaccctaaaaaaccaaaaaaaaaatccgcaaaattacccccgaaaatcccaaaaaatatcgccggaaccctatccttcgatcggatccacctatccccctccccggtgatggcggcgcaggttcaggcggtgccggcggcggagggtggtggcgcgccgccgcaggccaacggggtcgtggctgcgggctctgctgccgccgctgcggcgaccttccaggcgacgtcgctgtacgtgggggacctcgacgtgagcgtgcaggacgcgcagctgttcgacgtcttcagccaggtcggatcggtggtatcggtgcgcgtttgccgggacgtcaataccaggctgtcgctgggttacgcctatgtcaacttcagcagtcccgccgatgctgcaagggcattggaaatgctgaacttcactcctattaacgggaagcctatcaggataatgtattctaaccgtgaccccagctcacgtaaaagtggagcagcaaacatatttattaagaatcttgacaagtcaatagataacaaagctctctatgacacattttctgtatttgggaatattctttcgtgtaaagtcgcgacggaaatgtctggagagtcgaagggatatggttttgttcagtttgagctggaagaagctgcccagaatgctatcagtaagctcaatgggatgcttttgaatgacaaaaaggtgtatgtagggccttttgttcgtaaacaggagagggaaaatgtatcaggcaatcccaaatttaacaatgtgtatgtaaagaacctatcggaatcaacaactgaagataatttaaaggaaatttttggtaaatttggacccataactagtgtcgttgtaatgcgtgaaggtgatgggaaatctagatgctttggatttgttaactttgaaaatccagatgatgctgctcgagctgttgaagatttgaatggcaagaagtttgatgacaaggaatggtatgtttgtagagcacagaagaagtcagagagggagatggaattgaaagaaaaatttgagaagaacatcaaagaggcagcagataagaaccagggaactaacttgtatttgaaaaacttggatgatagcatcgatgacgatgagaaattaaaagaaatttttgctgattttggtactattacctcttgtaaggtcatgagagatttgaatggtgttagtaaaggatctggctttgttgcatttaagtctgctgaagatgcttcacgagctcttgtggctatgaatggtaagatgattggcagtaaacctctctatgtagcacttgcacaacgcaaggaagaaagaagggcaaggcttcaggcacagttctcacaaatgcgtcctatggtgatgcctccttcagttgctcctcgtatgcccatgtatccccctggtgtccctggtgtaggccaacagctgttttatggccagccacctccagcttttgttaaccctcagcctggatttggcttccagcaacatctcattcctggtatgaggcctagtgttggaccaattccaaattttgtcatgcctatggtccagcaaggtcaacaaccacaacgtccagctggaaggcgtgcaggcactggtggaattcagcaaccaatgccaatgggccaccagcaaatgcttccaaggggtagtcgtggtggttaccgttatgcttctggtcgtggcatgccagacaatgcattccgtggtgttggaggtttagtgccatccccatatgagatgggaagaatgcctctcagtgatgctggtgcaccaccgcaggttccaattggagcattggcctctgcactggccaattcacccccagatcagcaaagactgatgcttggtgaaagtttatacccgcttgttgatcagctggagcatgatcaggcagcgaaggtcactggcatgcttttggagatggaccagactgaagttctccatctcattgagtcacctgatgctcttaaggccaaggtcgctgaggctatggaagttctccgtaatgctcagcagcagcaggcaaataccccaactgatcagctagctgctctcaccctgagcgacggcgtcgtttcttaacttggttggcatcttatatctgagactgcaagtgatgtagtatgtacttggtgtgttttggaacttgaacctgtggggaagtctgtctttatctttgttaaacggcagttcagttacttcagcattgtgtggatctggatttcagttcctatttgtgttttcttaaaatattgggattgcaatatgatttactcttggattgatgcc

SEQ ID NO: 14603 - DNA, 2933 bp, Oryza sativa
  ref <308>: DATABASE ACCESSION NUMBER: AK065168
  ref <309>: DATABASE ENTRY DATE: 2001-12-06
gtggagagagatagagttggtgagaaggaaggaccgaaggagccgcagctcgcaccagcacaagtcaacagttgagctcctccatccacttgactactcctacttgagagagagagagagatagtgccattgccactgcatccaccattcaatctcacacctccgggctccggcaagggagacagagatgctgcgccgccgcgggctcctcctcgtcttcgtcgtcgtctgcttcggcggcggcggctggctccttcccgcctcccgtgccatgccgctatgcacggactccaggcctcccgtggcgctcaacaagacgctcgccttctgcgcctacgcccgggggagcagcagctgctgcgacgccgccgcagacgctactttgcagaaacagttcgatgccttcaacgtctccgacgcctcctgcgccgccctcctcaagcccatcctctgcgcggtaccctcctcctttccctgctttttactttcctcacctcacgctcacagagggccacgcgacacacctgttcgccgctttgcctcactggaatggataacctgctccagatttggcttgccttgtcttttccttttcagttactatactagtactgtattattcattcatgtcaaaaaaaaaacagagatactgataatccaccactagttcaacttcacttacaatttaactgagcttcttttctttcatgttatcaagttgattcactgccatatcaaattgcctcaccactaatatctcatctttctaacatgttactacaaagataccaccttccgtaatgtatcatataagagtgcagcaattctttcaatttatttgaatttatgtatcaaataaattgaagagagtatctgtaattgaagataccaccttcatgtaattacagatactttctttaatttatgtatcaaatttccctctcttccattttcagaaatgcaatccgtattctgctgagctgttcaacgccggcccaaacattcggactatccctttcctgtgcaactctacctcatcctcttctgctcaatcaaaggactccacacaagactactgcaaattagtctgggaaacttgcaaagatgtgaccatatccaactccccctttcagccaccgcttcaaggcggcgcgccacttcccacttcatcatccaagcttactgatgattggcagtctgaagctgacttctacaaatcatttggcggtgcgcctaacgaccaatctgtttgcttcagcgggaactctgtctcatttaacaccactccaccttcgccctctctgaaagggatatgcctagagaggataggcaacggatcataccttaacatggctcctcaccctgatggctccaatagaatcttcttaggcagccaacctgggaggatatggttggcaacagttcctgaccagggatctggaggcatcctgcagtttgatgggacaagcccatttgctgatctaaccgatcaggtgcatttcgattcgcaatttgggctcatgggcatggcatttcatcccaattttgcaaccaatggccgcttctttgcctcttacaactgtgataggacaaagtcacccagctgttctggtaggtgctcttgtaactctgatgtcggctgtgatccctcaaaggttggcacggataatggcgctcaaccatgccaatatcaagttgttgtatcagaatattccgctaaaggttcttcagcaaatatttctgaggttacgtctgctgatccatccgaagtcacaaggatatttaccatggggctgccttatacgtctcagcatggaggtcagatcctctttgggcctactgacggatatctctacctcatgatgggggatggtggaggaaagggggacccttttaatttctctcagaacaaaaagtcgcttctgggaaaaattatgaggcttgatgttgataatccaccaagacagagtgaaattgctaaccagagcttgtggggtaactactccattccaaaagacaacccatacactgatgacagtgacttagaaccagaagtttgggcattgggtcttagaaacccatggagatgcagctttgattccgcgaggccttcctacttctactgtgccgatgttggtcaggatcaatacgaagaagtagatttgatctccaagggtggaaactatggatggcgtgcatatgaggggccacttgttttcaatccaccttcggcacctggagggaacacttccctcaattccataaacgccattccccctatcatgggctacagccattctgatgtcaacaagaagattggatctgcgtcaataataggtggtaatgtttatcgaggatctaccgacccctgcttggtcggaaggtacctatacgccgatctgtatgcatcagcgatgtggaccggcacagaggctccagagagcagcgggaactacagctcgagtctgatctccttcagctgctccaagagttctcctatagcgtgtgacactgctgctggaagccccctcccatcacttgggtacatatactcgtttggcgaggacaacaacaaggacacctacgtcctgtcgagcaagggcgtctaccgggttgtgcggcccagcctctgcggctacacctgtccaacagagaaacctgcgacgaacactgggacgacgacgccttcgtcagcggcatcagtgacaggcaagcagatgatgggagcgcttctgctgtcggttcttatgttctgggttttggtaagatagaaactgcaaaaataagcctcttgcactgttagctagtactcctatataagtcatgatttgagtcctgatgcacccctcctcactcttttttcctttttcctttgtctgaacaatctcactgtcttgataaccgtatgtaaataatcagtatttcagttatgc

SEQ ID NO: 14604 - DNA, 1176 bp, Oryza sativa
  ref <308>: DATABASE ACCESSION NUMBER: AK065169
  ref <309>: DATABASE ENTRY DATE: 2001-12-06
gtgagggaaaaagagaagcaaccagacactgcacacatcatcatcttctcccccgagaccgggtgatcttgggttagcttagctagctaaattaagctgcgtgcagcatggggctcctcgaccagctctgggacgacacggtggccgggccgcggccggactccggcctcggcaagctccgcaagtacgcctccttctccccttcctcctcctcctcgacgatggcggcgtcgccgtcgcccatctcggcggcggcggcggcggccgacgcgccggccgtgacgcgcagcatcaccatcctccgcccgccggcgctgtccgtgacgtcgccgcgcggcagcgagtcgggcccctccacgccgtcgtcgccggccagcgtcccggactcccccttcggctcagcaccgacgccgaagggatcggagggctggaagaagctgcgccgtggggcggcgaggatggccgacggcgtggacgccagcgccggcggccagccgagaagccccaccgtatacgactgggtggtgatcagctcactcgacaggtgaaggcgtgatctatctaatcgagcagctaagctctgcatccggcgagaaactgcacctgcacaatatgaagcagctagaaactgaaggcgagcaaagaagaaaaaaaacactaaattctgctctttttcagttaagtttcagctcgtcgatccagagcatgaaatgttcagtgttcagctatctgcactactacagactgccgattttgtagccaaggatgtataaacgtatgcatgcttgtactaccaccgtataatatacgtacgtgtacgtagtagatcgatgcagacaaaaagtcttagcagaagaggggatccttgtacgtacacaacctgtagtgtacgtacacgatgcgatcgatgatgaactgatagtatatgtatatggcgcagctggtgtattatattacatgcgctagctggagggagagtgtgctaatgttgtactagtactacgactgatctgtttgcttctcctctgctttctttgtctccagaaaagagggagaggagagaagtttttcccctgtttttgtggaatatgtaaaagatggctgcagtgcatgcagcagtgtaaaagtgtgaaaagaagtgggcaataatgcatggccaaataatgttatgaacct

SEQ ID NO: 14605 - DNA, 1842 bp, Oryza sativa
  ref <308>: DATABASE ACCESSION NUMBER: AK065170
  ref <309>: DATABASE ENTRY DATE: 2001-12-06
gtgtagtagtagaagaagcgtagagcggtcaaggctgcgtcgtcgtcgtcgtcgtcgtcaccggcagcggaggaggaggaggaggagagaaggttcagaggaggaggaggtagcgaggcacgaagtagcagcatctcatctcatctctccctggctggctggggggaaattcgatggagagggacttcctgggcgcgatcgggaaggacgaggagcagcggaggcatgcggaggagaggaaggaatcagattactttggagcaggaggaggagcggcagcggcggcgatggattggtcgttcgcgagcagggccgcgttgatgtcgttcaggtcgtcgtcgtcggcggcggcggcggcggcgagggaggagacgagggagctcgcgttcccacacttctcggcgttagacggcgccaagatgcagcaggcctcgcacgtcctcgcaagacagaaatcgtttggtgccgagagccacggcatcccgcagtacgccgccgccgccgccgtgcacggcgctcaccgtggccagccaccgcatgttctgaatggggctagagtgattccggcctcgtcgccgttcaacccgaacaatccgatgttcagggttcagagctcgcccaacctcccgaatgccgtcggcgccggtggtggcgcgttcaagcagccgcctttcgccatgggcaatgcggttgccggatctacggtcggtgtgtacggaacaagggacatgccgaaggcgaaggcggcgcaattgaccatcttttatgctggttctgtaaatgtattcaacaacgtctcgccggagaaggctcaggaactcatgttcttagctagcagaggatctcttccaagtgcgccgactaccgttgctcgtatgccagaggcacatgtctttcccccagcaaaagtcactgtacctgaggtttcgcctacaaaaccgatgatgcttcagaaaccgcagcttgtttcgtctcccgtgccagccatttccaaacctatctccgttgtgtcacaagctacaagtcttccacggagtgcctcaagctctaatgtcgactccaacgtgacaaaatcttctggtccattggttgttcctcccacaagtttgcctcctccggcccagcctgagacactagccactaccactgctgcagctattatgccgagagctgtccctcaagcgcggaaggcatcccttgcccgattcttggagaagcgaaaggaaagagtgacgaccgtggcgccatacccattggccaagagcccgctagagagcagcgacacaatggggagtgccaatgacaacaagtcatcttgcacggacattgccctctcaagcaaccgcgacgaatcattgtcattaggccagccaaggaccatcagcttctgcgaggagtcccccagtacaaagctacaaatctgatctgggtgattgcccagtgtccatagattcggccattctgattgatgcaaaagacataaagaatcttgtgcattcaagcggggaggagggcttgggaagaggcataatatatagtatgttattgatggtgttcttgttcttgtttatgatgtgttttcacatggttaattcgcttaatgctggtctagctggtgcaaaccccccaactaacaagagagctgccacttgcagactcttgagtattttttgttggccttgcgccattgtattgcagaaagaaatatgccaaaatttagcagtaccaaaattataggcttacaaaaactgtactattcttgtttcttgtatgaatttacaagctgcagaatgcaagaaaaaaaaaaaaaaaaaaaaaaaaaaaaaaaaaaaaaaaaaaagg

SEQ ID NO: 14606 - DNA, 1244 bp, Oryza sativa
  ref <308>: DATABASE ACCESSION NUMBER: AK065171
  ref <309>: DATABASE ENTRY DATE: 2001-12-06
gcttcacagttcacacctgcgaccacgaggcggtggcggaggagacgaggcgcgccggggagatccgaggcactcgttgaccctgcgctccggcggccgattcgctgccggggacgccgtcttctccgtcaactccggcgaacggctgccgcgctccgatctgcacgtcgccgacgtcgctgagcttttgatctcgccttctcgagacacatctgatatcgctgttctttttatgagttcacaagacactcaacatgaagtttttagaatacacccccttcgacagtataaatctgttccttgataatcttgaccttggtgattgtacgataagaggaaaccttgaagccttctcatgcaagcacactggtaatgaccgtcgactttcaataagtctagaacatgagattcttgattgcctcagtaagtcttctgatagtgatcattcatcaccagtggagcatttgtcatgtcggtcaagtcggaaaacattgatctatctagttctcacccttagccacatgtatccagattatgatttcagtgctgttcgggcacacctgttcttcaaagaagaggagtgggaaagctttaaggagatgacagacacctacttatctgaggcttcaaagcaatgggcagcaacaaatgagggcacttctcttctagacagtatgactaatgtcattgatgaggttatcaaaatcggagagtctgacatctacagctataatccagaccaagatggagatccatttcttgaaaagggggtcatatggtcgatcaactttttcttctacaatcggaagctaaagcgagttgtgagctttcgttgcagttgtataagcaaaatatcaggagatgacttccttaccagtgcaccatccgatggtgaagaggaagatgcactgatagacatggacatataattgacacctttctggcaggaaaatgaccaaccagtgtggcatccagttgtgtagtaccagtatatatcatgtatggcagtttggcagttgccagtaggaactacaaccagaattttcttagcagacttcacctgtaccgaggcctgcataatattatgatttgacagcaggaaattctgcgtttctagcctgagacttgaattggcattttacttggtgacctaagctagtgtttgttgagatcgaaattctcgttctatgcagttgaataatgtatatttaacaatgttatgttatgcttgtaacttgatttgc

SEQ ID NO: 14607 - DNA, 1845 bp, Oryza sativa
  ref <308>: DATABASE ACCESSION NUMBER: AK065172
  ref <309>: DATABASE ENTRY DATE: 2001-12-06
gggttggaagaggaaaaggatctgtgtgtgatcgtcacgacagatcggcatcggcgggcagggtagagtgagatggccgccgccaccgccgcggtttttgcgctgttgatggcgtcggcgctcgctggggctgcggccggcggcgacatcgttcaccacgacgacgaggcccccaagattccaggatgctccaacgacttcatcctggtcaaagtgcaaagttgggtcaacggcaaagaggatgatgagtatgttggtgttggtgctcggtttggcccgcaaatagtgtccaaggagaaacatgcaaatcgaactagacttatgttggcagatcctattgattgttgcacttctccaaaagaaaaggtttctggagatattcttctagtccaaagagggaaatgcaagttcacgaaaaaagcaaagtttgcagaagctgctggtgcttctggtataataatcataaaccatgtccatgagctgtacaagatggtctgtgaaaagaatgaaacagatcttgatataaatatacctgcagttcttcttccaagagatgctggcttcgctttacatacggttcttaccagtggtaactcagtttctgtgcagcaatactctccagatcgtcctgtagttgatactgcagaggtattcctttggcttatggctgttggtactgtcctttgtgcatcatactggtccgcatggagtgctagagaagcactttgtgaacaagagaagctcctcaaggacggacgtgaagttttactaaatgttgagaatggaagttctagtggcatgatagatatcaatgtggcatcagccataatgtttgtagtggtcgcgtcatgcttcttaataatgctttacaagatgatgtcttcctggtttgtggagctactggtggtaattttttgcgtcggtggtgttgagggcctgcaaacatgcctagtggctctattatcaaggtggtttagagctgcttcagaatccttttttaaagtgccattctttggagctgtttcataccttactcttgcagtttccccattttgcattgtatttgctgttctttgggctgttcaccgtcatttcacctatgcctggattggacaagatatccttggtattgcactgataattactgttatccaaattgttagagtacctaacctcaaggtgggttcagttctcctcagctgtgccttcttttatgacatcttctgggtgtttgtctccaagagatggtttcatgagagcgtgatgatcgtggtagctcgtggtgacaagactgatgaagacggcgtccccatgttactaaaaattccacgaatgtttgatccatggggaggatacagcatcattggattcggtgacatccttctacctgggctgttagttgcatttgcattaagatatgattgggctgccaagaaaagcttgcaaactggttactttttgtggtcaatggtggcctatggttctggactccttattacatatgtcgccttgaaccttatggacggacatggccaacctgcacttctctacatagtgcccttcacacttggtgcgctgatatcacttgggtggaaaagaggagaactgtggaacctatggtccaaaggggagccagagagagtatgccctcatcacatgcatatgcagcctcagccgaagacgcccccactagtccagtagatccgtcatcttgttaattagtactgtagctatccgtcaccagctgcatccgtttgcctaagcgagcttaatggtgtaaaaaatcgtctcctgcatgttcttaattagtaagtattaatctcaatgagttggtcgtttgctgct

SEQ ID NO: 14608 - DNA, 1016 bp, Oryza sativa
  ref <308>: DATABASE ACCESSION NUMBER: AK098903
  ref <309>: DATABASE ENTRY DATE: 2002-08-28
gggagctcacccttatcccccccagctccagaaccttctcctctctcctctctcgctcgctcgcttctcgcggttgtcgtcggcggtagcgagctcatggcgtcggtgcagctgtccgccggcccgcgggtgtcagtgtcaccggcggcggcgctggtggcgatgccttcggtcgccgccgccgcatcgagggggcgccgcgggtaccgggggctcgtcgtgagggccgccacggtcgtgtcgcccaagtatacttctatcaaacccttgggagatagggtgcttgtgaagatcaagacctctgatgataaaactgttggaggaatattacttccaacatcagttcagtcaaaaccgcaaggaggacaagttgtagcagttggagaggggagaagcatgggcagcgacagcatagagatcagtgttccagttggtgcacaagttgtctactctaaatatgctggcacagagttggaattcgatgggtctgaccatctcattttgaaagaagatgacatcattggtattctcgacacagatgatgtgaaagatctgaagccactgaatgaccgtgttctcattaaggttgcagaggctgaagagaaaactgcaggtggtttgctattgacacaagcgaccaaagaaaagccttctattggaacagtgacagccgtaggcccaggaccattggttgaggatggcagcaggaaacccttgtcaatcactcctgggaataccgtgatgtactccaagtacgcgggaagcgagtttaagggtgaagatggcgaatatattgttctcagggtatccgacgtaatggctgttctttcctaagcagacaacgctcttgcgaaataggattttctttaagaaaacatgtgaaataggaattttgatatttagtcaaaactttgttgcactgctcttgcttggaaatggtgtatcgctgctattcctacttgatgtcactgcaaaatgcagagttcaatacaggacgtgctctttagactttggac

SEQ ID NO: 14609 - DNA, 1682 bp, Oryza sativa
  ref <308>: DATABASE ACCESSION NUMBER: AK065173
  ref <309>: DATABASE ENTRY DATE: 2001-12-06
gcttcgccttccattccatggccaccacagacaccgccccccgcctcgcgctcctcctccgccccgccatggcctgacctgacctcccccacaacctgcggcctacgaatcgatcgggagagggggttctccttcctttcctcgacctgctgctggtgggttggtggtttctgcggggggaggcggcgatgaggggaggaggaggaggagggaaggaggtggaggagagggggaaggtgatgggcccgctgttcccgcggctccacgtcaacgacgccgccaagggcggcggcccgcgggcgccgcccaggaacaagatggcgctctacgagcagttcaccgtgccgtcccaccgcttcagcggcggaggcggcgcgctcgcctcggctcggggcagcctggcgcgctcgacgtcggcggcgagccagagccaggtatatggatgtgacatgcctctttttgagccgttcaatgtgccttccaatggacctggccagtctgttgaaaagatgaattcaaattctgtcaacagacagattaatggttcaagaaaagattcggggatgttatccactcagcctaagggcattgataaatatggttcaggatcaagggctgagtgtgccccacagcaaagggtggaaaagggcataaagagttcttcgggaaggaaattggctgatgatgatgaattcattgtaccttctgttttcagtgccagatttcctcaatattctactaaagagcgtgcgggggttcaagaggaatcaacaccccttgttgctctcagtccgcacaaaagccctccagcagtgtccaaatcaccgacaaagtgttataacactgttagtaagaacttggagagaatcaatgtttctgatgtgaaatcaaggggttctcagaaagacaaggagacaggaccagcacaaacattgaaaaatgtggaagttgaacatttttcatcatttgaggcatccaaagatatgtttggaagcaaacatgctaaagtatgtcctaagacaggcactataaatgatttggatgagccacatttggaaaacagcgggcatcaagcgacaagtagaagcgggagttccgtgaaatttcagaaccctccagtgagaagaaatacaatatccgctaaaccatctcctggtattgaaaataccaatgggcattgtaatttacctcaaggaggcttaaaggaagctggtacaaagagaaaaaggttggaagcacaggataatgcagagaaaattgatgatttgtctgattcctcagtggagtgtataactgcttgggagatttctccagatgaaattgttggtgccattggtgcaaagcatttttggaaagcaaggcgggctatcataaagtaagtgtactacactagaataatttgattgtattaagtatatcattgatgaaagcaaaatataatgatatactgattcttctatagtaagtatagggctgcaagaatagctgtaggctactaggctcatgagctgctcaatcaacttgctttttacctcaactcaagatcaactaaaatacaaatgagatgagtttgggtgtattttgtagtttgactgtaaaagatgagtgtgagtcgaggtcatatctttctagccttgtttctgcaaacatgtagatttcagataactaacttaaactatcgc

SEQ ID NO: 14610 - DNA, 2791 bp, Oryza sativa
  ref <308>: DATABASE ACCESSION NUMBER: AK065174
  ref <309>: DATABASE ENTRY DATE: 2001-12-06
ggtggatgcagagtagctgggggcaaagaaaaaaaaacatttaattcttgcaatcctagctagtaatatatattcgagtcgaattgtttgtttgtttgtttgttgctaggtttgtctgggggtttggttagttataaaaagagagctagcaattctccacatttctctcccggttcctccgctgcaaccgttctcttgcttcaattctcgattcgccatgcatgcaagagtctgctgaacgccgattgattaattgtcttgtagtatctaggaaagtaatccgctgctgtatcctcctcctatctggattctggagtgatccctgcccgctggctccatcccgccgctgccgacacacataattaaacagctactagttgatcgatattatttcttctcttctcttggggtcatccctctcaaatcaagctctactactctacatactctctatcgggtgccggcactgcagtcccccaggtgagtgagtgagtgagtggagtgcggtggcagagagctagctaggcatgaagtacagcaaggaagcaaagcccgagagggcggcgggagggcggtcgagagccgtgccggtggcgctcctgttggtcgtgctctgcgccttctccttctacctcggcgggatctacagcaccggccgcagcttgctcgatgtcaatggcatcgtcgtcaagggggcctcttcttcctcctctgcctctgccgttgccattcaaaaggacaccaacaccaaagccgtcgtcgtcttcccagagtgccccgccgactaccaggactacactccctgcaccgatcccaagcgttggcgcaagtatggcaactaccggctgagcttcatggagcgtcactgcccaccggcggtggagcgcaaggagtgcctggtgccgccgccgcaggggtacaaggcgcccatccggtggcccaagagcaaggaccagtgctggtacaggaacgtcccctacgactggatcaacagccagaagtccaaccagcactggctccgcaaggaaggcgacaagttcatcttccccggcggcggcaccatgttccccaacggcgtcggagcctacgcagacctcatggcggagctcatcccgggcatgacggacggcacggtgcgcacggcgctggacacgggatgcggcgtagccagctggggaggcgacctgctggggcgcgggcggggcatcctgacgctgtcgctggcgcccagggacaaccacgaggcgcaggtgcagttcgcgctggagcggggcatcccggccatcctggggatcatctccacgcagcgcctgcccttcccgtccgcggcattcgacatggcgcactgctccaggtgcctcatcccgtggacagagttcggcggcctctacctgctggaggtgcaccgcgtgctccgccccgggggcttctgggcgctctccggcccgcccgtcaactacgagaaccgctggcacggctggaacaccaccgccgccgcgcagaaggccgacctcgaccgcctcaagaagacgctcgcctccatgtgcttcaagccctacagcaagaagggggacatcgccgtgtggcagaagtccaccgaccctgcctgctacgacaagctcacgccggtctcctcccctcccaagtgcgacgacagcgtcgacccggacgccgcctggtacgtgcccatgcgctcctgcctcacctcgccttcttccacttcctcgcgctacaagaagctggcgctcgacgccacccccaagtggccgcagcgcctcgccgtcgccccagagcgcatcgccaccgtccccgggagcagtgccgccgccttcaagcacgacgatggcaagtggaagctccggaccaagcactacaaggctctgctcccggcgctggggagcgacaagatcaggaacgtgatggacatgaacaccgtctacggaggcttcgccaccagcctcatcaaggaccccgtctgggtcatgaacgtcgtctcctcctacggacccaactccctcggcgtcgtcttcgacagaggcctcatcggcaccaaccacgactggtgtgaggcattctctacataccccaggacgtacgatctattgcatcttgatggcttgtttactgcagagtctcataggtgcgagatgaagtttgtacttcttgagatggaccgtatccttcgtcccactggttatgccataatccgcgagaacgcctactttctggattctgtagccaccattgccaaaggaatgagatggaactgtgacaagcatgacaccgaacacaaggcagacaaggagaaggtcctcatctgccagaaaaagctttggtcaggaaagaacacccagcattgaaaaaaaaaatcaataacttgatagcctcaccttgatcgaacctggagggatcacaatgtaaatctgctcaacgatttcaagacagtgctcaacctaaggcacttcaccctcccactagacttcacactctgatacaagaacgttcgtataatgattaaattaaataaaatgagcaatactccaatataggatccaatacttcctactctctgccagttatcacacaattattttttacagttactaggggaccaattaattaataccaccaagaggcagctgtaagttattacttttttttagaatggacaactgtaagttacttttatactactatatagaatgttcatttgtattagccatagcttgtttctacgattgtaacaataggaacggctatatatttattttaattgaatgtttacaggagc

SEQ ID NO: 14611 - DNA, 2410 bp, Oryza sativa
  ref <308>: DATABASE ACCESSION NUMBER: AK065175
  ref <309>: DATABASE ENTRY DATE: 2001-12-06
gggcgtaagtttcctatgaaattctacctgagatacattatctggcttgcataccttagcagcgatgccctagcgatatatgctctcgcaacactcttcaatcgacataagaagcaggattatggccatgcacacaacacgagcatcctagaggtgctgtgggcacctatcttcctgatacaccttgctggacaggacagcataaccgcgtataacatcgaagataacgagctgtggacaaggcacgccctcacatcgctgtcccaaatcaccatagccatctatgtgttctgtaaatcatggccaggtggtgacaggaggttgcttcaggcagcaatcctgctcttcgtccctggtgttctcaagtgcttggaaaagccctgggctctcagtagtgcaagcattaatagtctagtgagctctcccaagaatgttcggaggacgacaaacagagaagtaaagaaagatccgattcaagattttatagacaaggtaaatgaatctcgtttggaggatggtcgctgggaagaatcaagctctcctgccgactttaagcccagtgagctatttgttgaccttgcatctccttcttccgatgatcggcttagtaaacttttgtcattcttacaacgtgaaggagatgaatcgtatattttgttgcagaaaagtctgtatgaaaccttcgatcttctttacaccaaagaaaagatgtttccaattattcttagtgctctaaagagacaacagaattatgtgaataccaatgttgacaccgatgagggaaagaaagagcaagaaactttaaaagggttttgcggttcgatgctgcgaggattacttccgtacttgtcctttgtagccatcggcctgttccaccaaagtcacagaaaagcttataatcacactgatgtcaaggttacatataccttgctttgttgtactgctgtcctagagttatacggacctaccttacagaaaatcttgacctcagggcaagcaagggttcaaaaaacgagttttaatatgaacagccctaagtcggtcgggaaagtaaatcatgctaaacatgatgtccaagcgaagtcaaaggccaaaggaaagctaccagtatatgatatcatggatgacatggtctcccaatatagcctattaggatactttgtccgcaacagaaaacattccgtgataatgggtgttgcggaattcctcagttgcaaggattatctcgaccaacgttggagaatgaagtcctgttcctcctcgcgcaacattactaacttagttcttggacatgtgaaacgttggtggaacgatgaaataactaatgtttcctgttacaggaagttcaatgataacaggggccagtggactcttgaatctgaggtgttccttcagcaactaggctggagcttagagggtgcattcgatgagagtgtccttctctggcatctcgccaccgatttctgctactaccacatctgtggatctcatgactgtgaacatgctacaaaaacgtgctttcaaggcacctctgatctcaaaagtgaaagtccaactttctgcgaagaatctattcaccaaggaagagctgttcattgccgagaaatgtccaactacatgatgtacctacttgttgtgaatcctgagatgctaatggcgggcagcaggcgaaacttattcacagatgcctacaaccaactgaagggcatgttcaacaagaagagtacaccactgaatgaaggagaacttgcagggacaataatcagtgaggtgcaggtgcatgtgcaacagccaatcaaggagaaaaccatcgaagacaagacaccagcaccatccaataaaacagggctcatagacgacgcttggtctatagctgaagtgctcctgaatttacatgacgaggagaagatgtggagagtgatcgaaggcgtgtgggtggagatgctctgcttttctgctgccagatgccgggggtacttgcacgctaagagccttggcaccggagtcgagttcctgagctatgtctggctgcttatgcattacatggggatggagaccttggcagagaagctggccagggcagagctcccaaacggagcatgctcaggtgattcacgcactacccatgctgaacactcctctggtaaagagcaggttgctggagcatcctccaacgatggcattacagttgttgtggacaaaaatgggtgatttatatattgcttaaaagaccaacccgttccagtatgctgcttttatttgcttgttgaatgcttatatgtatcagttttcttacgattcaatatcttatttgtgtcatatgtgctcattagtgtgctctgtgctgccacttataaataaatattttaccatgtgaacagtatgacagtataatagtatgtttaatgcc

SEQ ID NO: 14612 - DNA, 2237 bp, Oryza sativa; identical to SEQ ID NO: 14456
  ref <308>: DATABASE ACCESSION NUMBER: AK098904
  ref <309>: DATABASE ENTRY DATE: 2002-08-28

SEQ ID NO: 14613 - DNA, 2401 bp, Oryza sativa
  ref <308>: DATABASE ACCESSION NUMBER: AK098905
  ref <309>: DATABASE ENTRY DATE: 2002-08-28
atcttccccactcgtgcctggctctctctctctccctttctcctctcctccaaggtcatggcaaaggagaaataacagctagcgggcttggggaagggaaaacagcaagtgggagatcggcagggagaggtgaattactacttgagtagaagtggtacaagaagagtcgtcgtctacctgtgagcgaattatttcgaggttgtgcgttgcgatgatgggaggtggtctggtgatggaccagggcatgatgttccccggcgtgcacaacttcgtggatctcctgcagcagaacggcggcgacaagaacctcggcttcggcgcgctcgtgccgcagacgtcgtcgggggagcagtgcgtgatgggggagggcgacctcgtggacccgccgccggagagcttcccggacgccggtgaggacgacagcgacgacgacgtggaggacatcgaggagctggagcgccgcatgtggcgcgaccgcatgaagctgaagcggctcaaggagctgcagctgagccggggcaaggaccccgcgggcggcgtcgtgggcgacccgtccaagccgcggcagtcgcaggagcaggcgcggcggaagaagatgtcgcgcgcgcaggacggcatcctcaagtacatgctcaagatgatggaggtgtgccgcgcgcaggggttcgtgtacgggatcatcccggagaagggcaagccggtgagcggcgcctccgacaacctccgcggctggtggaaggagaaggtccgcttcgaccgcaacggccccgccgccatcgccaagtaccaggccgacaacgccgtcccgggcttcgagagcgagctcgccgccggcaccgggagcccgcactcgctgcaggagctgcaggacaccaccctcgggtcgctgctctcggcgctcatgcagcactgcgaccctccgcagcggcggtacccgctcgagaagggcgtccctccgccgtggtggcccaccggcgacgaggagtggtggccggagctcggcatccccaaggaccagggcccgcctccgtacaagaagccccatgacctcaagaaggcctggaaggtcagcgtgctcaccgctgtcatcaagcacatgtcgccggacatcgagaagatccgccggctggtccggcagtccaagtgcctccaggacaagatgaccgccaaggagatctccacctggctggccgtcgtcaagcaggaagaggagctgtacctgaagctgaaccccggtgcccgccctccggcacctaccggcggcatcaccggcgccatatcgttcaacgccagctcaagtgagtacgacgtcgacgtcgtcgacgactgcaagggcgacgaggccggcaaccagaaggctgttgttgtcgccgacccgaccgcgttcaacctcggcgcggctatgctgaacgacaagttcctcatgccggcgtccatgaaggaggaggccaccgatgtcgagttcatccagaagaggagcgcgtctggcgcggagcctgagctgatgctgaacaaccgtgtctacacctgccacaatgtccagtgcccgcatagcgactatggatacgggttccttgaccggaacgcgcgcaacaaccaccaatacacttgcaagtacaatgatccactccagcagagcacggagaacaagccatcgccaccggccatcttcccggcaacctacaacacgccgaaccaggctctgaacaatctggatttcggcctgcccatggatggccagaggtcaattacagagctgatgaacatgtacgacaacaacttcgtggccaacaagaaccttagcaacgacaatgccacgatcatggagaggcctaatgcagtcaacccaaggatacagattgaagaaggcttttttggacagggaagtggcatcggcggcagcaacggaggtgtgttcgaagatgtcaatggcatgatgcagcaaccgcagcagaccaccccggcacagcagcagttcttcatccgcgacgatactccattcggtaaccagatgggcgacatcaatggcgcatcggagttcaggttcggctctggtttcaacatgtcaggtgccgtcgaataccccggcgcaatgcagggccagcagaagaatgacggctcgaattggtactactgagagtactgaagaataaacttgtagcgtttaaagaaagagcaccttaagcttttaaagttcaccatggtcatccctctgcttccatggtggaagcgtctcctgtgaacccggtaattctataggtctttctcatataggttttgcattagttgcaaaatggctggaacttggaactggtttatacatgtatgtccgtccagccagtaaacctcctatggaaacttaatgttatttctagtttaatttgttagttaaatgctgttc

SEQ ID NO: 14614 - DNA, 2389 bp, Oryza sativa
  ref <308>: DATABASE ACCESSION NUMBER: AK065176
  ref <309>: DATABASE ENTRY DATE: 2001-12-06
gatttcccctccctctctctctgaatttctttctccccaaaccaaaaccaaaccgaagcttccccatctcgcgtgaacttcggagcaaggaagaacaaggcgccgcgccggatttagccccgcccccctctccgggggtttgattggagtgaggtgaatcggtgaggttgtggctcggttggcgtccggatcggagggggttcgggcccttcctgattaatccctcttctgattccgtgtgggggattcaatcactggtgggcaaaggcgagatatttcgtcacttctccccctcatctaaccatgtctggtttgatgtgcctggagatcaagatgggattgtaaccacgctggttatctcgcgatcgcagagggtttcctccatcctctaaggaaggaaaggaacccttgccctttcttctccatggcttctaattcgtagtgtgaaggatctgatttttaggttagtgtaaatagtagcagtagttgaggaagcttcggcatcctaaggacctcctgtgaagatgtcgtctgctgccattgccattagcccgatggtggaagagtttgctctcctgcccatctgcttcgacggcagccggtcgccccactgtttgtccgggtcacagctgcaggattcgattatcatctttcttgctgtgcctggtgccccaccgatgccgatgagtgtgctcggctcggagtccatcgcctcggtcaagctgcgcattcagcggttcaaggggttcgtggttaacaagcagaggcttgtgcttgatgggcacgagctggcaaggaacaactgccatgtgaaggattatgggcttgccgatggaaatgttctgcaccttgttatccgcttggctgatcttcgcttgattaacatcgagactaccagtggaaagaagtttcagttccaggtggaccagagccgcaatgtcaagtatctcaagagtaagctggcagtggagggagatgaggaccttggtgaggatcacaagcttgaatgtgatggcaaggagcttgaggaccaccagctgattgctgatattagcaagaaggatgatgctgtgatccatttgttcatccgcaagccagcaaagttacggacacagcaagttgataaagacacggtggttacagttgtcactccgcaggagaaagagaaccttcaaaatgaagctcatgctgtgaaccctgctaaaccagctggtgctaggcctgctcttgttgaaccaattatcgttaaccacaaggtgaagctatcacttgaagtgatgagaatgattagctcagccatagctggtcttgagaatggatacttgccagtgatgtcagctgaaggttcagggggtgtttacttcatgcaagatgcatcaggagagaagaatattgcagtgtttaagcccagagatgaggaacctatggctaaaaacaacccaagagggcttccagtgtcgactgatggagaaggcatgaagagggggacacttgtaggggaaggtgcatttagggaagttgctgcttatattcttgaccatccaattggtgatcatgaatctgaagaacgtatcgggttctctggtgtgcctcccacagcattggtccggagcttacacagggggaagagcttcaagattggatcactgcagatgttcattcagaacaatggaagttgtgaggatatgggtccccgagcatttccagtgaaggaggtccacaaaatagcagtgttagatcttaggttagcaaacgctgatcgtcatgcagggaacattttagtgtgcaaggatgaagaaggtggcaattacaagttggttccaattgatcatggttactgcttgccagagaagtttgaagattgtacctttgagtggctgtactggccccaggctcgtgaaccattcagtgatgaaaccattgcatacatcaaatcactagacgctgaagaggacatcaagcttctcaagttccatgggtgggagctgtctgcaagatgtgctcgtgtcctgtgcatcagcaccatgcttttaaagaaaggtgcagcacgaggcctcacaccgtatgacatcgggcgtatactgtgcagggaaactgtgaatagagactctgagattgaggacatcgtccaggaagctgagggccatgttctcccagggtcaagtgaagtaatcttcttagaaaccgtatctgaaatcatagaccgtcacctcgacaagaagttcgcttagaaacccagaataactgatctagttgttcagctgtatccagtcagtttggtgtaagtatgttgacaagccactcttcaatggactaaatgatttcatttgtttgtagcatctcaaaccttcaagtgcattacctacatacattttgtgaatatgtaagc

SEQ ID NO: 14615 - DNA, 1586 bp, Oryza sativa
  ref <308>: DATABASE ACCESSION NUMBER: AK065177
  ref <309>: DATABASE ENTRY DATE: 2001-12-06
gtttttgggagagaggcccctctcacaaaacaccacaagctttagatcatagaatggatgagaccggtgcggccgaggcgattgggatggaggcgccaccatccccgacggccatggccacctctggtagctgcgtggtggagataccgacggatataacgctcagccatgatgacggcgagcgatttcctggggagatatcgatggtgcgaccacagcggcactcgatttatcgggtgccagagtacatcaaggacatgaccaaccgggacgcgtatcggccgcaggtggtgtcgctggggcccttccactacggcgaacccccgttgaagcccatggaggcgcacaagcagcgcgcggtggcgcacatggtcagccggagtgggaagccacggcaggagttcaccgctgccgtggaggggatagccgaacaactgcggggcgcttatgagaacctaggcgaggagtggagtggagggcggttcgtggagctgatggtcaccgacggctgcttcttgctggaggtgatgaaggatgaggtggaggtacaaggttatgggtccgatgaccctgttttcagcaagcatggccgtctatacttgtactcctatatcatctctgacatgctcttggttgagaaccagttgccattgctcctcctccaaaagctcacgcttgttgcagatcctgacactgaggatgatagagggataaaccaccgggtgcttgatcttctttcctataccaccacgcctaccgcgcctaccacccctgtcgatgagtttttggggctccacccactggacgttctccagaaaagcgtccgtggtactcgtcaataccgccaaaggccaataggagacggacacatgccttccgctgcagagctccgtgaggcaggaatccatttcaaggtgagcacaggtgaaggattcgcaggcacggtcagcttcgaacgaggcgtactgcgcgtcccaaagatcttcctgtacgacgacgccgagcgcatgttcctcaacctgatggccttcgagcagctgcgcccgggcgctgggaacgaagtgaccgcgttcgtgtcattcatggacgacctcatcaacacggccaaggacgtgcggctgctgagggccaaggagatcatcgagagcggcttgggaagcgacgaggcggtggcgaatctgatcaacaacacgctgacgaaaggctcggtgatggacgaagacagcagcctcaacgacgtgatgtcggaagtggatgcctactgcaagatgcggcggaacaggtggagggccatcctcctacacacctacttcagtaacccttgggtgttcatctccctcgtcgctgctactgtcctgctcattgctactgtcatccaaactgtctacgctatcctgtccttcaacagcaagacctaattaaaaccttgcaccatggtaaactccatgaacatatatatattcatcttcaggcctcgcagcttaataatagttagtatatttgagccaagaattatccgaagtactcttgcttttataccaccatgtaatattctgtctctatatctaatcccaatcaaaccttcc

SEQ ID NO: 14616 - DNA, 895 bp, Oryza sativa
  ref <308>: DATABASE ACCESSION NUMBER: AK065178
  ref <309>: DATABASE ENTRY DATE: 2001-12-06
ggcaaaatcctcctcccgatctccaccaccactttcccattgaccgcggcgggaaagggccttcgagacttgggaggttggagcgagcaagctcggccatggcgaagctctcctgccttctcatcgtctccttcgccgtcgtcgcggcgttggcggccacggacgacgacgcggcggcggcggctgaggggatcacggtggcggaggcgtcgtcggacccggagaacaagtgcgtgtacacgatatacgtgcggacggggacgatctggaagggcgggacggactcggtgatcggcgtgacgctgctgggcgccgacggctccggggtgcggatccgcgacctggagcggtggggcggcctcatgggcgacggccacgactactacgagcgcggcaacctcgacatcttcagcggccgcggcccctgcatgcgccaggcgccgtgccggatgaacctcacctccgacggcaccggcccgcaccacggctggtactgcaactacctcgaggccaccgtcacgggtccccacctcggctgcgcgcagcagctcttcaccgtcgagcagtggctcgccaccgacgcatcgccctaccgcctctacgccgtcgtcgacaactgcaacaaggccaaggacgccgccgccgccgacgccgacgagccgagggtcaccgtgctgtaaataaatcgtagattctctttggattcccgtgtaattatgtaccttacgcgtatgtggtctactgctcgactgctcgtgctgtcgtgcattgcagtgattgatccttttttttacattgaggggaggatgctaaaataattatacgattttaagagggtaataagatgaaaccagcgttggatcggtcggacgatccggtgctcactccagttggt

SEQ ID NO: 14617 - DNA, 1843 bp, Oryza sativa
  ref <308>: DATABASE ACCESSION NUMBER: AK098906
  ref <309>: DATABASE ENTRY DATE: 2002-08-28
ggctcggcacgtcggttgttgctgttgctgctgctgctcctcccgttttccgatcgcagccatgggaacccgcagcgtggccttggtgctcctcgcggccgtgctgctccaagccctcctccccgcttcggcggcggagggtttggtgcggatcgcgctgaagaagcgcccgatcgacgagaacagccgcgtcgccgcgcgactctccggcgaggaaggggcgcgccggctgggcctccgcggcgccaactcccttggcggcggcgggggtgagggcgacatcgtggcgctgaagaactacatgaacgcgcagtacttcggggagattggcgtcggcactccgccgcagaaattcaccgtcatcttcgacactggcagctccaacctctgggtgccgtcggccaagtgctacttctcgattgcgtgcttcttccactctcgctacaagtccggacagtcgagcacttatcagaagaatggaaaaccagctgccattcagtatggcactggttcaattgctgggtttttcagcgaggatagtgttacagtaggtgatctggttgtgaaagatcaggaattcattgaagctaccaaggagccaggtcttactttcatggttgcaaaatttgatggcattcttgggcttggatttcaggaaatatccgttggagatgcagtacctgtgtggtataagatggtagagcaaggtcttgtcagtgagcctgttttctccttctggttcaaccgtcattctggtgaaggagaaggtggtgaaattgtgtttggaggaatggatcctagccactacaagggcaaccatgcatatgttccagtctctcagaagggatattggcagtttgagatgggcgatgtcctgattggaggaaagaccacaggattttgtgctagcggttgttcagctatagcagactctggaacatcattgcttgctggccccacagccataatcactgaaatcaatgagaagatcggtgctactggggtagtcagccaagaatgcaagacagttgtttctcaatatggacaacagatcctagatctgttgcttgctgagacacagccatcaaaaatctgctctcaggttggtctgtgtacttttgatgggaagcatggtgttagtgctggaattaagagcgtagtagatgatgaagctggggaatcgaatggtctccaaagtggtcccatgtgcaatgcctgtgagatggctgttgtatggatgcagaaccaacttgcacagaacaagactcaggatctcatcttgaactacattaatcagctctgtgacaagctcccaagtccaatgggagaatcatctgtggactgtggcagccttgcatccatgcctgagatttcattcaccattggaggcaaaaagtttgcactgaagccagaagagtatattctgaaggttggtgaaggagctgctgcccagtgcatcagtggattcacagccatggacatccctcctccccgtggtcctctctggatcctgggtgacgttttcatgggtgcctaccataccgtgttcgactacggcaagatgagggttggcttcgcgaagtcggcctaaacgtgttgttgtcacgttcctaatgacgaggtggacgcatacgccgagagaagaagaccgtagcttttaactagcgtatttatccggcgatgtgtgtatatatgcatgctacataacatgtttatgttttccaaggcctgagatggtgcccgtctattttagcttggcaagaatatctcggaccagtctctgttcgaattctcgtactgatatgtgaacttctgataacatgtgcactgtgttttgtgactg

SEQ ID NO: 14618 - DNA, 2476 bp, Oryza sativa
  ref <308>: DATABASE ACCESSION NUMBER: AK065179
  ref <309>: DATABASE ENTRY DATE: 2001-12-06
gctcgcggaggcacgaggctttactcgcgacgccccaaagccgcagcagcagcagcgccgcacgcggcagcaatggcggactccatcgagctcgcgcgccgcctctgcctccagcctccggcgcggaggacgggaacgggaaggtgcaggccgcggggccgcctcggagctccctccctccgcgtcccgcgccctcccctctccctctccctctccctctggtcgtcgctccggtgccgcgcgctcgactccaccaggccggtcgcggtggaggggggcctgggagacgaggaggacgaggatgaggagggggagtcgtacttcgccttgacctcgtcgaggctctcgcgggtggactacctaggggagagcaccaagggggatttgaacgtgcggagggagcatctcgacgcgtttggtgggaatggcaagtcgacattgcatggccctatagaggagatagcttggcaagaagcgagagaagctgaatcgttgctccgtgagttgggaattgcagatcctttttccgtaagacactctcctcgtggaatattttgcaccaggacactaaatcttcgatccatcagtgtcattggctatgatatggactatacattgattcactacaatgtgatggcttgggaagggcgtgcttatgattatggtatggccaatctgaagggcatgggtttccctgtagatgaccttgaatttgatcctgacctggtcatcaggggtctaattatggataaagacaaagggaatttggtcaaagctgatcgttttggttacattaaaagggccatgcatggcacccagatgctttctactagtgctgtgagtgaaatatatggaagagaattggtggatctacggaaagaaagtagatgggagttccttaatacccttttctctgtgtcagaagctgttatgttcatgcagatggtcgacaagttggatcaggggttggtgccagctgaacttgggccactggattacaaaggactgtacaatgctgtttccagggcactttttcgagcgcatgtagaaggtcaactcaagagtgagataatggctgagccggaacgatttgtagagcctgatcctgaactgcctttagctcttctggatcaaaaggaggctggaaaaaggttgcttcttattacaaactcagattaccactatacgaacaaaatgatgaatcatgcattcaatcgcttccttcctaatgatatggcatggagagatctgtttgaaatggttatagtctctgcaaggaagccagagtttttccaaatctctcatccgttatacgaggttgtaacaaatgatggattaatgcgtccctgttttaaagctaattcaggtggattgtactctggtggcagtgctcagatggttgagaagtcactagacatccatggagatgaaatattatatgtgggggatcatatttacacagatgtaagccagtctaaagttcatttacgatggaggacagcactaatctgcagagaactagaagacgagtttgatgcactaattcgaagccatgttcagaaagaacagcttatcacacttatacaacaaaaggaagtcgtgggagatctttttaaccagcttcggctggctctgcagagacgaacaaattcacgcccagcacagacgcttgctgctacttgtatggatgatcaggagcttacagaaagtatgcaaaagttgctcattgttatgcagagattagatgaaaaaattgcaccaatgctagaatcagatggagagctgttcaataaaagaaaaatcatattttaaaggccatgtttcagacctctcattcagaaagatggggttggctatcacgtacgggcctatgggataagagtcatctgacgaggcaaattgaaaaatatgctgatatatacacatcaagggtttcaaattttctacattatactccattcatgtatttccaatcacaagaacagacgcttgggcatgacgtgcattcctattcccggaggcaacaacactgacattcgttcgattcatcattcatgtggtggagttgggagaaaaatcggtagagatagaaaggcagctggatggacgtgcttgtgccagtgtgtgagccgtggcgattgatcttgatgcagcgaggcaggccatttggaacgttttcgcgttacgtagcgattatgtcgtgtatagctgtgtgtacttggggtgtaagtagagtcattagcttgtaataacacgattggaataagcccgtgcggtcgttttcttctttctgctcgccgactcaaaagaaatttggtttggttaggcagaacgaccgtggaaagttgggcatgtaatttgtaaacttttaagttttgtaagattttcatctgatcatctcagcatctgtctaaactctggactgtcacttgaaacagttaaattccagaaaaataagaagaagtcccattgttgt

SEQ ID NO: 14619 - DNA, 1375 bp, Oryza sativa
  ref <308>: DATABASE ACCESSION NUMBER: AK065180
  ref <309>: DATABASE ENTRY DATE: 2001-12-06
tttccccatccgtctaattgcgccccttatgcattagagcccccggagtcccctctgtttcgcagataagtcctttggttcccatctttttattacattcaggtcctcctagtttcttttcctttcgagtctactccttgcattcttgcgaggaagcccctcgggttggtcgaattttagtttccactccctctcctcggggagtcgttgctgttcttgttcttggtcgaggttgaggttggtggcgtagatccgatctgaggaatgtttacctatcctttcctctaacgttcgccgtactccgatgaagttgaacgtgctccgccgccgccgttcccactccttctccgtcgccttcctctactggttctacgtcttctcatgaactcatcgccttcctcccaagaacaccatctccagcctctaattgattatatcttgatttctttttcatcctcctactagtttctttcttgtgttctttggaatttttttgatctcttgaagagatccggttcttggattaagttttggacaagaaccgtactgtgaccatgtcgtcgccttcgcgccggagctccagcccggagagcaacaccagcggcggcggcggtggcgccgacgagcggaagaggaagaggatgctgtcgaacagggagtcggcgaggcgatccagggcgaggaagcagcagaggctggaggagctgatcgccgaggcggcgcgcctccaggccgagaacgcgcgcgtcgaggcgcagatcggggcctacgcgggggagctgagcaaggtcgacggcgagaacgcggtgctccgcgcccgccacggcgagctcgccgggcgcctccaggcgctcggcagcgtcctggagatcctccaggtggccggcgcgcccgtcgacatcccggagatccccgacgacccgctgctccgcccatggcagccgccgttcgcggcccagcccatcgtcgccaccgccatggccgacgccttccagttctgagccaccatggagagctcgcacgccatggccattggcatcaatggcatggttgcagctgcattacaactagtagtactagcctctgtggttgtgtctgatgatgcttattatgtttaattatggtttgcttcatgttgttttcattaatctagaccattaataagcaatgtgtgttgtaatcttgtctagtcttatgtgagatgtgttcatctccagtgctccttgctaataagggtggaagagaacaatccgatttgatgtaattcttggagagcacatgtgtgctggtttgtgatgtgatgaactgatgattgtaatattttgacattgaacctatgctataatgtttgcagcaatgaatctatccttgtgtc

SEQ ID NO: 14620 - DNA, 2554 bp, Oryza sativa
  ref <308>: DATABASE ACCESSION NUMBER: AK065181
  ref <309>: DATABASE ENTRY DATE: 2001-12-06
gctggtctccaccctccctttctctctctagtcctctagagccgagggttgctgcgaggaaagcgtaggagagagggttgctggctgcagccccggcgagaagcgccattgttgtcgtcgttgggccaagaaccaagaaaccaagaagacaagaggaggaggaggggggaagaagacggaagagagagaggaagaggcactggataggtgcatcctttgcctctagccgctttctctttctccttcctggaggggggagagagagagaggagtgggagaggaaaggagagtagatgggcgagatggtcttggccgggtatggcatggacaaggcggtgaggagcagcgtcagcttcgagacgccgtgcggcaggctgctgcgcgagctcgagcaaatatggactgagattgggtagcgcgaagaagataaagatcgcatgttcttagaacttgaaacagagtgcatgcgtgtgtaccgtcgaaaggttgatagtgccaatgctgagagatcccagctccgtcagtcattgatggccaaagaagcagagcttaaagttttagtggcttcaataggtgattaccccaaaatttaaggtggatgaaaagcaatcattgaaagagcaacttgccaaagtgacgcctctactggaagatctcaggtcaaagaaagaagaaagaataaaacaattctcacttgtccaatctcaaatcgagaagataaaagcacaaatttcggatcacaataatcagcatgacaatggtccggtcaatcattccaaggacaatcatgatttgtcaaccagaaggctttctgatcttcaagcggagcttcgcaatttacagaaagagaagtctgatcgccttcagaaggtcttcatatacgtcgatgaagtgcactgcctatgctctgtgcttgggatggattttgcaaagacagttaaagatgtgcatccaagtttacatggggccaactcagaaaattcaacgaatatcagtgatagcactcttgaaggtcttactgagaccatccttaagctcaaagcagaaaagaggactagagtttcgaagttgcaagaaatcgtcggaaagctccacaagttatggaatttgatggagtcaactgaacaagagaggagacatttcaccagagtagctgctgttcttggatctactgaggaagagatcacttcatctagtgtcctgtcgctggagacaattcaggagacagaagaggaagttgagagactaactaaacaaaaggcaagtagaatgaaggagcttgttcttaagaaaaggttagagctagaagatatctgcagtaatgcgcatatggagcctgatatgagcacagcacctgagaagataaccgcattgattgattctggtctagtggatccttgtgaacttctttccagcattgaaacacaaatagcaaaagcgagggaggagtccctaaccaggaaagatatcatggagaaagtagacagatggctatcagcttgtgatgaagaaacttggcttgaggaatataaccaagatagtagcaggtatagtgctggtaggggtgcccatataaatctcaagcgtgcagagaaggcaaggatacttgttcaaaaaataccatcaatgattgacaacttgatagctaaaacatttgcgtgggaggatgaaagaagtgtgccatttttatatgatggagcccgtcttgttgccattttggaggagcaaaaactcagaagggtacaaaaggaagaagacaagagacgacaccgggaccagaagaaactgcaaagcttattgcttaaggagaaagagttgattttcggctccaaacctagtccaaaaaagacaagcagctttaataggaggacgagcagccatcacccgaatggaaatggagctgggttcatgaccccggtgccccgtagagtttctgcaggcagtgccactcctgagcttctaactccacgctcatattctggacggtacaataattacttcaaagagaacaggaggctggctgctgcaccactgaacttctcaacggtttcgaaggaggatagtatgtcatcctttgcctccatcagcggctcagaacctgattctcctttggttttgcactgagatcccatcgttcgattggacattttcgagaatgtcacagttgatcttttgaggttctgataatcctgatttccaaatgctgcatttctggttagggatgagagacttctcagcaagaaggatggtagtgaagactatccacgacattgggccattgtgtgttaactggttgacattgctaatgagtgacgacaggttgtgacaggatttagataagatttgcctgtagatatatgacctaacatctgcggtgctgttgtacctaaattacgtcgattgatcagtgggttggttaggaagcatgcctaagttgtgcattatattcgttttcttggtattctttgagttttgtatttagtcattgttttgcatgtgaaaaggagttggtgttgatttgcaatccaaaggtgctgtgtaatttcatcctgcg

SEQ ID NO: 14621 - DNA, 906 bp, Oryza sativa
  ref <308>: DATABASE ACCESSION NUMBER: AK065182
  ref <309>: DATABASE ENTRY DATE: 2001-12-06
ggtctcctccgctcctcctctccttgcgccaacaagccgactcgcgatctccatcgggcaagaagagcagagcagagcaggggaggggatcctgcagatctggaagaagctcttaatttcagagccttaacctctcttaatactacaagtaacaacagttttgttgtttgttccccccaccccaaaaagtttaggcgcacgcatcgcccatggccaccttcgagctctaccggaggtccaccattggcatgtgcctcactgagacgctcgacgagatggtctccagcggcaccctcagcccggagctcgccattcaagttcttgtccagtttgataagtctatgacggaagccttggagaaccaagtcaagagcaaggtttctatcaagggccacctgcacacttacaggttctgtgacaatgtatggacattcatcttgactgaagcatcattcaagaacgaggagactacagaacaagttggcaaggtgaagattgtggcctgtgattccaaactactcagccaataaattgataactgcgaggtcagggtttgcctggtatttgttagtctcttctgctagacctggctccgcctgaagtgtactgtaccaccacattgtttgtttcataatcaatgtgtgtcaatacaatcgtatgtgctaccagagtatatcacagcagcaactgttttaatttgtatgcttatgtaattgttatgctactgctgtgttgataatgtgatataaatgactaaacgatgagtagtagaaattgtgcggagtcaccctcccccttcctcatttctgaaccctttggttctgtgtgactctttgtatgtaacatgaacaaatacctcctttcccgtcttttttttggatcctatgttaatggtacctttacatt

SEQ ID NO: 14622 - DNA, 1188 bp, Oryza sativa
  ref <308>: DATABASE ACCESSION NUMBER: AK065183
  ref <309>: DATABASE ENTRY DATE: 2001-12-06
aaaaacccagatgacgctgtgctcgccgccgccatctcctccgccttctaacccgcgccgcgcgcttcctcctcctcctcctccagagcaactacctcctcccccgcctctcccctctctaaaaccctagtccttctcgcccgccatggggtacgcgcagctcgtcatcggccccgccgggagcggcaagtcgacatattgctccagtttgtatcaacattgtgagactgtgggtaggacaattcatatggtcaatctcgatcctgctgcagagcacttcagctatcctgtatctacggatattagggagctcatatcattggatgatgtcatggaggaacttgggatgggaccaaatggcgggcttatctattgcatggagcaccttgaagacaatttggatgattggttggatgagcaactggatggttatttggatgatgactatcttgtgtttgattgcccaggccagattgaactcttcactcatgtcccagttctgcgtaactttgttgaacatttgaaacgaaaaaaatttcaacgtttgtgccgtgtactttcttgattcacagtttgttagtgatgtgacaaaatacatcagtggttgcatggcttctctttctgccatgattcagcttgaacttcctcatatcaacattctttcaaagatggacctggtcgccaacaaaaaggatgtggaagagtatctgaatccagaggcgcaggttctcttgtcacagctgaaccgacagatggcacccaagtttggcaagttaaacaaatcgttagctgaactggttgatgattacagcatggtgaatttcatcccacttgatttaagaaaagagagcagcattcagtatgtgctgtcgcacatcgacaactgcatccagtatggggtagacgcagatgtgaaggttagggacttcgatcccgaggactaatcatttgatcgcgtatgaactagtgaaaaatactatagcagcattatgtagtgaacagtagtgataggactacatagtattcaagtaggagtatgcagaaagcatcgcaggattacaatgctgtttccgtatgagtcctatcggttgatcaacaagatagaatatctgcaacctcctgtatatcaagccgtacgttttctgtgtaatcggttgactggttggcattaacaagctgctgcttgcc

SEQ ID NO: 14623 - DNA, 1746 bp, Oryza sativa
  ref <308>: DATABASE ACCESSION NUMBER: AK065184
  ref <309>: DATABASE ENTRY DATE: 2001-12-06
gaacctaacgtatcatttacttccattgcactgcacatcctgtgagttcgttgtctgagtgagagctggacgtgctgcaccgagctcctggccgagatgcttgccgtgtcgccggcgatgtgccccgacattgaggaccgcgccgcggtggccggcgatgctggcatggaggtcgtcgggatgtcgtcggacgacatggatcagttcgacttctccgtcgatgacatagacttcggggacttcttcctgaggctggaggacggtgatgtgctcccggacctcgaggtcgacccggccgagatcttcaccgacttcgaggcaatcgcgacgagtggaggcgaaggtgtgcaggaccaggaggtgcccaccgtcgagctcttggcgcctgcggacgacgtcggtgtgctggatccgtgcggcgatgtcgtcgtcggggaggagaacgcggcgtttgccggggctggagaggagaagggagggtgtaaccaggacgatgatgcgggggaagcgaatgtcgacgatggagccgcggcggttgaggccaagtcttcgtcgccgtcatcgacgacgtcgtcgtcgcaggaggctgagagccggcacaagtcatccagcaagagctcccatgggaagaagaaagcgaaggtggactggacgcctgagcttcaccggaggttcgtgcaggcggtggagcagctcggcatcgacaaggccgtgccgtcgaggatacttgagatcatggggatcgactctctcacccggcacaacatagccagccatcttcagaagtaccggtcacacagaaaacacatgattgcgagagaggcggaggcagcgagttggacccaacggcggcagatttacgccgccggtggaggtgctgttgcgaagaggccggagtccaacgcgtggaccgtgccaaccattggcttccctcctcctccgccaccaccaccatcaccggctccgattcaacattttgctcgcccgttgcatgtttggggccacccgacgatggacccgtcccgagttccagtgtggccaccgcggcacctcgttccccgtggcccggcgccaccatgggttccaccgccgccgccgtcggaccccgctttctggcaccacccttacatgagggggccagcacatgtgccaactcaagggacaccttgcatggcgatgcccatgccagctgcgagatttcctgctccaccggtgccaggagttgtcccgtgtccaatgtataggccattgactccaccagcactggcgagcaagaatcagcaggacgcacagcttcaactccaggttcaaccatcaagcgagagcatcgacgcagctatcggtgatgttttatcgaaaccgtggttgcctttgcctcttggactgaagccaccttcagtggacagtgtgatgggcgagctgcagaggcaaggcgtagcaaacgttcctccagcgtgtggatgatatttgcatgatagattgatggttccgttactgactgattgcttatctggtcagttcaccaaaaaatgggaaaattcgccgacatgtccttttatttttcttttggcctagcgtttcttggacatctcgtttaatttttaacttgtgcagagttcgaaagacatctttgtttcgactccgggagaaattaacctgcgtattgtaaatgtaaaatgtattggccgtgagttctcagcagctaagaataaattaaataatggtcctccgagtagggtttacttg

SEQ ID NO: 14624 - DNA, 1784 bp, Oryza sativa
  ref <308>: DATABASE ACCESSION NUMBER: AK065185
  ref <309>: DATABASE ENTRY DATE: 2001-12-06
ggccgtctcgtctcccttcttctctctcctctcctctcttctccggcacaccacaccccaatcctcccccgatctccccaatccgagagctccggaggagcagcgcggaggcggagatggcgctgcggcgagcgctgctcagatctgccgagatctcccccgatcgcaaggctgcacttgagtacctccattatctatcgagagcacagcctactcgttctctaacaggtgctggcctttattctgctggcaaatcattcagcactcaggctgctactacatcaagcacaccacaacctccaccaccacctccacctccggagaagactcactttggtgacctcaaagatgaggaccgcatttttaccaacctctatggtcagcatgaccctttcctgaaaggtgcaatgaagaggggtgactggcatagaaccaaggatttggtgcttaaaggggcagactggatagtgaatgaaatgaagaaatcgggacttcgagggcgtggaggtgcaggattcccttctgggcttaaatggtccttcatgccaaaggtatctgatggacgcccttcttatcttgttgttaatgctgatgagagtgagccaggaacttgcaaggacagagaaatcatgcgtcatgacccccacaagcttctggaaggctgtttgattgctggagttgggatgagggcatcggctgcttacatctacattagaggtgaatatgtgaatgagcgtctcaaccttttgaaagctcgggaggaagcatacgcagcaggtcttcttggtaagaatgcttgtggatctggttatgactttgatgtgcatatacattttggtgctggtgcctacatttgtggtgaagagactgccctactggaaagtctcgaaggcaagcaaggtaaaccaaggttgaagcctcctttccctgccaatgctggcctatatggctgccccacaactgtcacaaatgttgaaacagtggctgtgtctccaacaattctcaggcgtggtccagaatggtttgcaagctttggacgcaagaataactcgggaactaaactattctgtgtctcaggtcatgtgaacaaaccttgcactgtcgaggaggaaatgagcatacctcttaaggaattgattgaaaagcactgtggaggtgtgagaggaggatgggacaacctgcttgcaattattcctggtggttcatctgttcccttgttaccgaagcatatatgtgatgatgtgttgatggactatgatgcactcaaggctgtgcaatctggattgggtactgcagcagttattgtgatggacaagtccacagatgttgttgatgcaattgctaggctatcgtacttctacaagcatgagagttgtgggcagtgcacaccttgcagggagggaacagggtggctgtggatgatcatggagaggctcaaagtaggtaacgcgaagcttgaggagattgatatgcttcaggaggtcactaagcagattgaagggcatactatttgtgcccttggggatgctgctgcatggcctgtgcagggacttatcaggcacttcaggccagaactggaaaggagaatccgtgagcgagccgaaagggagctactggcagcttcggcttaggacactgtcaatgacgatcctgcactagtttcctgatttctttcacagaaataatgcaaactgatggagctcatctctgtatacgaaatgcagctcccctgatttgtttaaacctttatgtggatgtttatttaatgcactcagaagctggcg

SEQ ID NO: 14625 - DNA, 1538 bp, Oryza sativa
  ref <308>: DATABASE ACCESSION NUMBER: AK065186
  ref <309>: DATABASE ENTRY DATE: 2001-12-06
tgggtcgcgtcgcgtcctctcctgatccccttttccttcgcccgtttgacatccgcagaaaagaaaagggaaatcctccgatcgaaatcatcgaaccgtctcttctacatcgatcgaaaagagaagaggagcggcggcgagatccaattccaatcgatccttgtgctgctgctgctgctgcgctcgacgatcccatccggatctcgatggcggccatggctcgccatctccctgctattcttcttctctcgtcggcgctgctcctcgcccttgcctccgcctccgcttccgctgctgctccggcgctggccgccttcgtcgatgccgcgtcgcgccgctacctgcgggatcagcaacaccacgaccaggccgcttcaatgtcactagaccaagtttctgcggctgtttctgtcttgcttggttttgcaccaccaccctcgctacctgcacaatcttcttcaaagttagacaagctgttactccctaacccatttgacagaccacgggctgttttcttgctgcaaatcgatggattccatgcctccgttgaaagcatcacatctgaagctggtagcatcttcaaaaccactattgatggtctaagcgattctgctacagggcttacagataaggatgatctagttattgttcattcagatgaatctccagctgttgattcaggttctgagtattttgatagtgatctcactgacttggcaaactggcttggtgggtcctatgagaaggttgatggcaaattgatcattcccttggagagtggagaaagtcttactttgcttattacaaaggaagcagacatggaatttgcatccagcttgatctcccttcgtaaaactataaaaaggggtattcaggttcatgaagatttctcaggaggtgtcatgagccctgcagagttattagtatgccacttcaaaggcattaaggctttggaagaagaatatggttccacagaaattgttaagcagggaactgatgtagtccggacagctgtcaccaaagcatttgatttactacgtggagcatataatggaaaaattgttgggttagtaatatccacaaaggaggcttcaccatccttagtgggtccagcatcttcactgcacatttcgagatggctaaaagagacaagccaaactaacactacaatagcctcttctgagatacttgttagaaagagtttggcatggattacagggatcattcttcttgtctctactctcattggggtttgcttgcttatgaatatgccacttaccagggacaccctcctgtattcgaatgtgaagatcgattagatggaattaggagggagggagagagattagcacattgatggttgtaatttccattttcacacgctgcgtggcctttatgggatggttttgacctttttgtaggccatatatgtttgacataaaaattgtgcttctgtgtgggtcagcccggccggaatgcaaaaccttgtttgtgaattgtcactgcctgtacggggcccttgttttttggttataaat

SEQ ID NO: 14626 - DNA, 2356 bp, Oryza sativa
  ref <308>: DATABASE ACCESSION NUMBER: AK065187
  ref <309>: DATABASE ENTRY DATE: 2001-12-06
gtttcccacctcggaatctctgcgcgcgatggccggaggcggcggcgcgggctcctccacgggcggctccggcggcggaggggggcgggagggcgactgggactgcggcggctgcggcaaccgcaactacgcgttccggtcgctgtgcaaccggtgcaagcagccccgtctcctggtcgaccccaacacccctcccgactccaagtggctcccccgcgccggcgactggatctgcaccggtaacacctgctccgccgcgccaaccacccttcccccctgctctaattaattccgcacttgttaatttttgatctgctacactggtgcctgtttctacatgagaaattataatatatgtggtggaaagggggaaatcaatgccagatgctggaaataatggctttgtggtttagtttcatgtttagggtgggggtattgggatgggcgacaaacgtgcatcctcttctttgggggaaatcttgatcaacctaaagcttattatgctacctctgcacaccagtattatgcccttttttactgtatatgcttagtttttaggcttgttagaaaccgagaagaccgcagtgctcgctcatatttttagtcgcgttgttgctgtcatagtttaaagagttgggagttttaatgaataataacagtggaaatagagagacaaccaaagggatatatgtggaatgtttggctttcttttgccattccaaccaagctctgcatcttgcaataaaatttacagttgttctgacagagttttgatatggatgatttctgttagtggttcaagtactgagagcaatttatcatcaagaaaaacgacatttgtctgggaccatgctattaattatttgcctttcttgttggaatttatttattttcagctgctgtttatttatatttatttattgtgtatttgatatccatatataaaattagaaaattaccattaagcatgctgagtaaatgactagtgtgtgtgtctttattcctttcattgggtttgtgcgggatggctggttggtgtgcgtgtgcttcggtgcgttgtctccctggtgtgctggttggtttatgcgccaaatggatgaataggttgcagtaacaataattatgcatccagaaagaactgcaaaaaatgtggcctgccgaaggaggaagcagcaatgccagcattatcaatggcaggaatggccatgccagcttatgcaaattatattgctaggatgcaaggccttgctggctttaagatgaacatgaactttgggatggctggcaattcagctttgcaacagcagctacttgcaagtgcaaactggccttatgcgttggctggtagatatgggatgcaagctgctggctggccatttggcggcaacaacgcaaatcagttttcagcggctccaaaagactggcgtagcggtgattggctttgtagctgtggatttcataactactcatctcgcacacagtgtaaacagtgtagtgctcctgtaccatcaggcattccctccacaacaatgaaaaccacagtaccagatacttcttccacattaggaactaagcggttggcgtcagaggaacttgccaatgaatgggataacaaaaggcttaatccaggaaatgcaagctatccactttcaacagcaggcacggataatttatttggtggtattgagcaaggagctggaagcagcaatggccagacaccttattccaagtttgacaatggaaactcaatagcgttaccctctgggcaggtctcagcaatgcctggtcttattggaaaaggagcaaaatggcgcgaaggagactggatgtgcagcaactgcaacaatcacaactatgcatctcgagccttttgcaacaggtgcaaaactcagaaagaggcatcagttcatcccggtgtgttatagtttgcttgagagcctttggtatgtagcttgaagtttcctggatctgttgttggtgattagtacctgagcggccaggatttgttcccttttggggtttcgattccccagtgcttcagctgctgttaaatgtttgcccctcagtgctttaccagcgcgttctgttgaagtttgctatttatttttgtccgaagcttgaataaaatggttcctcaatgcaccagcctgccatctggttctttgggaataattgaattagttctttagtaattggacgatgaactagactctaatgttggggattttattgctttgtgaatcaaatgtacctccgtgaagtctttgtaatcctgtttcagtattgttgtattgaacagaaaattgtatgctgtaatgcacattcatttcattcgaaaccttccttttgctgtttt

SEQ ID NO: 14627 - DNA, 1167 bp, Oryza sativa
  ref <308>: DATABASE ACCESSION NUMBER: AK065188
  ref <309>: DATABASE ENTRY DATE: 2001-12-06
gtcacccagccagctcgagcgagcgaagccagcagcagaagcagtagagagaaagtagagagatggaggggaaggaggagaatgtccggctgggagccaacaagttctcggagaggcagccgatcggcacggcggcgcagggctccgacgacaaggactacaaggagccgccgccggcgccgctgttcgagccaggggagctcaagtcgtggtccttctaccgcgcagggatcgccgagttcatggccaccttcctcttcctttacatcaccgtcctcaccgtcatgggggtcaacaactccacctccaagtgcgccaccgtcggcatccagggcatcgcctggtccttcggcggcatgatcttcgccctcgtctactgcaccgccggcatctccggcggccacatcaacccggccgtcaccttcggcctcttcctcgccaggaagctgtccctcaccagggccctcttctacatggtgatgcagtgcctcggcgccatctgtggcgccggcgtcgtcaagggcttccagaagggcctgtacgagaccaccggcggcggcgccaacgtcgtcgcgcccggctacaccaagggcgacggcctcggcgccgagatcgtcggcaccttcatcctcgtctacaccgtcttctccgccaccgacgccaagaggaacgccagggactcccacgttccgatccttgccccactgccaatcgggtttgcggtgttcttggttcacctggccaccatccccatcaccggcaccggcatcaacccagcgaggagccttggcgctgccatcatctacaacaggggccatgcctgggatgaccattggatcttctgggttggccccttcattggcgctgcccttgctgccatctaccaccaggtggtcatcagggcaattccattcaagagcaggtcgtaacctgcatcagctattatcactgtcaagatgccaatccagagcaagctgtttctgatgggcgcggctgtttcccgctgcctgctttgttagtaattattgtggagtcgacgttcctcttcaagtttgttgtactactgtttttatctgaacacagacttgtaatttcagtactcagttgtgtatccctcttttactatgtgcaaattaagctatcctcctcctattggagttcggttcg

SEQ ID NO: 14628 - DNA, 1749 bp, Oryza sativa
  ref <308>: DATABASE ACCESSION NUMBER: AK065189
  ref <309>: DATABASE ENTRY DATE: 2001-12-06
gaggagaggagaagcctcctgaaactgaaaggagacaagcagttgtgttgtccttctccctctcctccggccagcggccatggccatggcaacggcaacccccgcggcgcagaatgagcagcaggagaagggggggttggagtacgtatatctgtcggggctgggcaacagcttgtcgtcggaggcggtggcggggacgctcccgcgcgggcagaacagcccgctggtctgcccgctgggactctacgccgagcagctctccggcacgcccttcaccgccccgcgcgcccgcaacctccgaacatggctgtaccggatcaagccttcggtgacccacgagcccttccacccccgtcgccccgcccacccccgcctcattggggatttcgaccgcaccaccaccgacaccgtcgccacgcccacccagctgcgctggcgccccgccgacgtgcccccccaccatcctcccctcgatttcatcgatggcctctacaccgtctgcggcgctggcagctccttcctgcgccacggatacgccatccacatgtacgctgctaacaagtccatggacggatgcgccttttgcaacgctgacggcgatttcctcattgtcccccagcaaggaaagctgttgatcacaactgaatgtgggaagctgctagtcccacctggtgaaattgttgtcattccccagggttttcgctttgctgttgatttgcccgatggtccttcacgtggctatgtttctgagattttcggtacccactttcagctccctgatcttggcccgattggtgcaaatggcttggcttcggcaagggatttcctttccccaacagcatggtttgagcaagtccaccgcccaggatacacaattgtgcagaaatatggtggtgagctattcactgccactcaggacttttctccatttaatgtggtagcgtggcatggaaattatgtcccttacaagtacgacctgagtaaattctgtccatttaacactgttctattcgatcatgctgatccatcagtaaatacagtgctgactgcaccaactgataagcctggtgtcgcattgcttgattttgtgatattcccgcctagatggttggtcgctgagaacacatttcgccctccatactatcatcgcaattgcatgagtgaatttatgggattgatctatggaatatacgaggccaaagctgatggttttcttcctggaggtgctagccttcacagttgcatgacacctcatggcccagacaccaagacatacgaggcaacaatcagccgtcctgatgcaaatgagccatcaaggctaagcggcacgcttgcattcgtgttcgagtctgcactcatccccagggtttgccaatgggccctcgattccccatcccgggatctcgattactaccagtgctggattggattgaaatcccacttctcacatgacaatggaggggcaaccagcgaagaaccatgcagaaagtagctttgatcagttttagtagcttatgatgctgtgcttgtgtatattttgtgaggctgtaactgaaccattcaccagatccgtgtaagtaaagacaataatgctcagcagcctgtactgtacaatcgtgggtatagcattatcagaagcaagaatgtcaatttcaataagaggttgcctacactgtaggcagattagtacaggcgtgtttgtaacaccatgaatgaatgaatggatggatggacaccgtgtgaggtacc

SEQ ID NO: 14629 - DNA, 1958 bp, Oryza sativa
  ref <308>: DATABASE ACCESSION NUMBER: AK065190
  ref <309>: DATABASE ENTRY DATE: 2001-12-06
ggggatccccagacccagtgcagggttgcagcgctttgcataggaatgtctcgccttcctcctcctcctcctcttcttcttgcagctcatcgaaagccacatagtataatattcgccacctaaaagcccaccacatccatccatcttgcttgccacacacccaacactccacacaagtcagctcagtgaccgccatggctgctgctgcctgagctgagcgaggagtactatattgcagcgtccagaccagtccaggtctgcttgctcggcagagtgcttgttgcgccaaacaatgaggcaaccacagagcagaaagctcctgcagctgcaggctctttctctgctgctcttcatcatcgccctgcacagccgcctccatggctgctcgggccaaggtgaggcggcggacggctcggcgtccacggcggcggctccaatggaggagaaggagaagagggctctctacgcggccatcgagggattcgtcggcaagggctggaatggctccgccctctatcctgacccctgcggctggtctcccattcagggagtgtcatgtgatctgttcaatgggctgtggtacccaacagtgatgagcattggcccagttcttgacaactcactgcggtgctctgctgatgccaagttcagtccccagctgttcgacctcaagcgcctcaagaccctctccttctacagctgcttcccggcgaccaacccgactcccattccggccaccagctgggacaagctcgccggcagcctggagacgctcgagttccgcaccaaccctggcctgacggggcccataccggcgtcgctcggccgcctgtcgagcctccagtcgctggtgttcgtcgagaacaacctcaccggtgccgtgcccgccgagctcgggtctctggtgcggctgcgtcggctcgtcctgtccgggaacgggctgtccgggcagatcccggcgtcacttggtggcctcaagggactcctcaagatggacctcagcaacaacctgctgcagggtagcttgccgccggagctcgccgggctcgggagcctgacattgcttgacctcaggaacaacagcttcaccggcggtttgccgtccttcttgcaaggcatggcgtcgctgcaggacctgctcctgtcgaacaacccgctgggaggcagcctggggcagctcgggtgggagaggctgcgcggcctcgcgacgctggacctgtccaacctcggcctcgtcggagccataccggaatccatggcggcactgaccaggctgaggttcttggcgctcgaccacaaccggctcaccggcgacgtgccggccaggctcgccgagctgcccaacatcggcgcgctgtacctgaacgggaacaacctgacggggacgctgcagttctcgccggcgttctaccagaggatggggaggaggttcgcgtcgtgggacaacccgggcttgtgctacagcaatgccgcggtggacgcggcgcacgcgccgccgggggtgacggtgtgcaaggtggccggcggcgtgggggacgggaggaagccggaggcgagctccagcctcatggccacctcgtctgcttccaacctcatcaatggcttctgcttcttcttgtggatggtggccacgtctctcttgtagccaaagacagacaccaactttcagaatcttcagatagatggaacaacatgaaatgaagaaactgattctctcttagtttagcttggctagtgactagtagtgctgttcttacttttggctctcttttttgggtgtttttctgatgatggaaaaggaagaaatcctggtggtcacagtaaacactagtctgaaactgtgtagtgacgagtactagcttggttgttttttttgggtgtaattagcatgtttctcatgtgatgtttaattacgggaagtggataatggatataaggtaaactgctctccttgtccg

SEQ ID NO: 14630 - DNA, 2368 bp, Oryza sativa
  ref <308>: DATABASE ACCESSION NUMBER: AK065191
  ref <309>: DATABASE ENTRY DATE: 2001-12-06
gcttggggcgacgatcatcacgacgttctctggagcagtggctgattcttttggtaggcggcccatgctgatcgcgtcggctgtcctctactttgttagtgggctagtgatgctttgggcgccaaatgtgtatgtgttgctcttggcgaggctcattgacgggttcgggatcggtttggctgtcacgcttgtaccattgtacatctctgagactgccccgacggacatcagaggactgctaaacacgctgccgcagttcagtgggtctggagggatgttcctttcatactgcatggtatttggcatgtccctcatgccacagccagattggaggatcatgcttggcgttctatcaataccatcacttatatactttgcattgaccatcttttacttacctgaatcgccgaggtggctcgtgagcaaaggaagaatggctgaggccaagcgtgtgttgcaaggcctgcgtggaagagaagatgtttcaggagaaatggcccttctcgttgaaggtctgggggttgggaaagacacaaaaattgaggaatacataattggacctgatgatgagcttgctgatgaagggctggctccagatccagagaagatcaaactgtatggtcctgaagaaggcttatcgtgggttgcccgtcctgttcacgggcaaagtgcacttggaagtgcattaggtctcatctctcgtcatggtagtatggtcagtcagggtaagccccttgtggatccttttgtcaccctttttggaagtgtccatgagaagatgcctgagataatgggaagcatgcggagcacattgtttcctaactttggcagcatgtttagtgtggcggaacagcagcaagctaaaggtgattgggatgctgagagtcaacgggagggtgaagattatggatcagaccatggtggggatgacattgaagatacctccaaagcccacttatttctcgtcaagcgacaagcgtggaaggaaaggagatcgctgcacctcatggcagtataatgggtgctgtgggaagaagtagtagtctcatgcagggcggggaggcagtaagcagcatgggcattggtgggggatggcagttggcttggaaatggactgagagagaaggtgcagatggcgaaaaagaaggtggcttccaacgtatctacttgcatgaagagggtgtgacaggtgatcgcaggggctctatactgtcattgcctggaggtgatgttcctcctggtggtgagttcgtccaggcagctgctcttgtcagccaacctgctctttactctaaggaattgatggagcaacgccttgctggccctgctatggtgcatccatctcaggcagttgctaaaggtccaaaatgggcagacttattcgaacctggagtgaagcatgctctgtttgttggcatagggatacaaatcctgcaacagtttgctggcattaatggagttctgtactacactccacaaattcttgagcaagctggtgttggtgttcttcttgcaaacattggacttagctcctcatctgcatctattcttattagcggactgacaaccttgctgatgcttcccagcattggtattgctatgaggctcatggatatgtctggaagaaggtttcttctccttgcaacaatccctatcctgatagtagcactagctatcttgattctggtcaatattctggatgtggggaccctggttcatgcctcactgtccacagtcagtgtcatactctacttctgcttctttgtcatggggttcgggcctattccaaacattctctgtgcagagattttcccgaccaccgttcgtggcatctgcatagccatctgtgccctaacattctggatcggtgatatcattgtgacatacaccctccccgtgatgctcaacgccattggactcgctggagtgtttggaatctacgcagtggtctgcatactggctttcctgtttgtcttcatgaaggtgccggagacaaagggcatgcctcttgaagtcatcaccgagttcttctctgtcggagcaaagcaggccaaggaggactagttgctcggatcaagtgatcaatcagattgctggtggtaattttgttgcttccaaatcgcgctgcgggttaaacctgtgatggatgctttgttaaagaatcttggaagagatcaaaatgcagtgagcctaaagagatgatttggctgtacatcatgaggctgaatcctgtcgtagactggattttggagcttaggatatgtagatcatctgttccttttggtttggtcattttccatttgtgtttctttggaattcttctccctgtaactagtggtctatcacagttgtgttactggttttgcct

SEQ ID NO: 14631 - DNA, 2116 bp, Oryza sativa
  ref <308>: DATABASE ACCESSION NUMBER: AK065192
  ref <309>: DATABASE ENTRY DATE: 2001-12-06
ggcacgtgctcgcggcgatcgatcacagatttcattcttgtatacagtacgcgttcatggaggccttggcgtcgttcatggatttggaggggcggccccatcagcatcggtggtcgatgaggaggggcggcggcctcttcttcccgcagatcagcagcgctgccggagaattaggctggtccagcgatagctccacggcttcgagcccggcgccctcgacgttgtcgtcttcttgcatgtcatccccttggggcggcggcagcggccgctggtcagcttctccggctccggcggcgtcatccgggctccaccagatggtccgcgacaactacacgcaaggactcatccgggcgttcggccgccgccgccatgacgaagctctcctccacaagtggttctcgcagctggacgtcgagtgggttctgctcctccacgccggacaaagagatctagactcctcctccgtcgaagatttgatggcgttgatggagcggtggatgagagctctcctaatcatggtgcaggtcctctccatgacgctgctcgagctccgagacagaaggtcgtcgtcatcactcgccggcaccgacgacgacgatgccttcctgcttcgcacaaagggatcggcaggcaacaggtcaccggcaccggagctgccgggcttcgtgtgcgtgcaggaggttgtgcagttcgcggaggcgagcatcctcaggatgctggccttcgtcgacgccatcacactagccgctctcaacgacgaccaccgccgccgccaccgggagccggagatgctcccggggatgctgtacctctacgactgcttctccgacgcctcgccaaccgtcctcgccttcttcaaagaggcatccgatgtcctccggctccggctcagggaagaatgaggcgcggccggggccggcatttgacgacgccatcaatggcatcttctcgcggaagaggtccaagctgagtgatgctatctggggaatgatggagaaggttcgggcatccttcctgatggacaccttctggcaagtctcaccggacgcagctgatgatgaactacatcgcacttgtttggtgcaacggagacgtgctcaaattcatcctacaggatcaccacttccgcttgttcatctccgacaccgagggcttcaacgcggtggtgaacctaatcaccgatatgatctcctgcctcaggagcaagctcgaggaagcatcccttctcatctcggacccgggattgcggtgcatattcttgctcaacaattggcagcttgtcttgcgccgcgttgaatccatggacctgccatcttcggccctgatagaaacaagcatgacacagaggtacatagatacttacctccatgtctcctggtcccctctgctgagttgcctgttcattgaaaacccttctattagtcttggaaagacaagagccggcaaacctttcggctttcgaagatacttgtcacttgataggtttgagtcagaattccaaagaacctacacaaatcacaagttttggaaggttccaaaccctgaccttcggcagagactgcatcaagccatcgtccagaaagtcgtcacacactatagcatgtatctagaggagcgagcagcaaggggaatgcacaatcaaccgcccaagtccacgcccgagcagttgaaggagttgttggatgaattatttgaaggatgatgatgagttcaatgcaattgctatggaaaattcacctcaataacttaggcatttcagttgactctttctcaccattggttacgcgcttaaaggtttgtgctctagtcaacactcactctatggtcgtcttttggtgatgatggtgacaggctaatttcctgccaaaaaaaaaagtttgaatttcacttcagacttctggaaactactccaaaaaaaaaattcacccagatgctatactttgtagttttaatctttgcattacaatttcattaccctctgtacagagtatatattataatcgctttgcttgtactttggttttctagtgtgtgcccgcaaagtaagaactacttcctccgtcagtaacaagttgtaaaatcctaaaaaataacttaattgagatgttagcttatc

SEQ ID NO: 14632 - DNA, 3474 bp, Oryza sativa
  ref <308>: DATABASE ACCESSION NUMBER: AK065193
  ref <309>: DATABASE ENTRY DATE: 2001-12-06
ggtcctcccctctttctctccctctcccgctgccgccgcctccggcttccccgtcgcctcgcgtcgccgtcgccgtcgatcgcccctcaaacccttgctgccgccgccgctcgctccccctcgtcccccactctctccctctcccgccgccgccgcctcgcgccgccacctccgcctcgcgccgtcatcgctgtcgcctcgcgccgccacggacgtcgccgcctccggcttccccgtcgccgtcgaccgcccccgccaccatcgcgggcccccgaaaccctagtcgctgccgcccgctccctctcgtcccaccccctccctcgatgctccttctcccgcgacgacgtctcgaggtacgtggtgctgagcacggcggtgaactgttgggggaggttgggggggggggggtgagcatcgtgctggagaagaaggcgttcgtggtggagctgttcgacaagtatgtcaagacgctcggctccgggatcgacgtgctcgcccccctcgtcgaccacatcgcctacgtccactcgctcaaggaggaggccatccccatccctgaccagtccgccatcaccaaggacaacgtctccatccagatcgacggcgtcctctgcgtcaagtgccagcaatttgcctccctcatcagggccacatctacatgtggagttcatctcccataaaagaggatccacatagtatacctcacacatgaactctgtaataagctgtggtgatctttatatgcttcaccaactggtgaccaatgggctcttttctgagaaaacagcccagtttcctcttaattttgttaattttgcaccttggtgctcgtgaagcaagtgcactaagttcagatgatgaagcacatcttgccttcaagaaggcagttacaacttctgatgggatattcctcaactggcgtgaacaagatgtgtatccttgcaattggaaggttgttagatgtcacagtcacaccaagagagtaatttatctctccaacctctgggtgccatcagccaattgttacttctcagttgcgtgcttcttccactctcactacaagtctgggcagtcgagcacttatcagaagaatggtctgtgtcttaaaactttccccaaccgtgctattatttgtgttgtgagtttgcaacaatttggctatcagtctatactattacatggatgcactgaaatcttccccctgttttttttttttgttatttactctacagctggtggcatatcttgtattgtatgttgaaatttaaccttttaaagcaaaattggatttggtcgaaatgatgctagatggtggttatttggatttagttataaggatgctagatggtatgtttggattacagtgcgaatcaaattaggaggttgaagctaagaggtttttattcgagttaatgtttttttttataaaaaaaatctaccaaaaagatatatatttgatttgcatatatgcattgaaaattacacatttgcttggtggttataccgttagtccttctgatgtatatgatgtatgtttacctgtaggatgttttcctccgttcctctatcatcattccctatgacggggtatggctgcttcactttctgtgttggtcttgaatgattctgattcctaattattttggaagcttttctcataaaccaaaatggttttctaaacctttccacgagcaaataattgtttgcaatgcccttaagactagatgaatccatttttagcatctatgttgctacatcaattgaacaatcaccacctaccgatgcatttccttaagttaatgaatgaccgattcaaataaaagcgagaactattgaaattcttttaaattgcaaccttgccactgccagtgagtgatagaatcaagatgatcaattactccaaagtgatctttagaacatatgtggctctttgttcaaacttctcctaatttctctgcagtccaggtgatatcttcaataaatgtcaaaatcattaagaacaacccacagttgaataggcaggataaacggttggtgctcccatgtggcgatcgtggattaaagtaggaacaatggtttaattgggttattcacggagaagtgatattcgttggttgtcatggttgcctggaagggaattacaacatttgattttaagctttaatagcttaggcagcgtttgggctcactaaagtgcttcctttttcttatcttttagacttccactatgaattatttaacacccataaaagaactttccttgcatgattttctttattatgaaatcaacatttatattgacaaacctgcttagcttcagttggacaatgatacgctgcagtaaggcatctcattgaaggacattggtggattctgcactgctgttctattacttaacttcagtagagaatatatttgcccttttgcttgacttcatatggtgttatatttctcattttagatggacattcgtctaatttatctgtaccgtgatctttttctgaaaatattctctgcaaagagaggtcatctgaagcattgttaaaaaacagtaagtagcaaaaaaaaatcatggtacaggcgtcaatggtacgcagtagtgaaaacatagttaggagttgcatgttatgttgatttgctattccaaaacgtgtttgaactgtagcaggatgttcctatttaaactagagcttttagccatgtattaccttttgtagcttccctgctgattacgttcgaagaaaacaaaaataatccttattggaatatgcacattgtaaaacagtaaggggttcttatactgttttctttaattccacaatacagtaaaaagagtgagatcatatggcaacattctttgtgaaagcaacacatccatatctggatgtagtggttgccataatggagacaaggagctgttgaatgcagtattgcttgatgttaaaagtgggtcacaatttccagtgttggaatctaattcagtacatggcaatgaaatttcattgacctctgaaagtgaggtatcaaacttaaggtatactcccatggtacctcagatacatcatgttctaggtgttgaaactgaaagttgcattcattctggtgattcaaactttctggatcttgaatggctttcagcttcaggcaactcaagcgatgaaaggtccattgcaattagtactccagatgtgaacctttcagcggagaatgttattgccacaatgtcttcttttgactggtagatttgtatgatcaaatatagttgtaccatcaccatggacacattattccgatcattatgtaaaactttattttcattttttatatgcattggtgcttcatctttagattgtaatgtgtaagagttttgttctcagcagaatctgtacaacgatgtatgcaaaattactcatcaacagcatcccctgcaaatgtattcgtgggttttctccttacataatcattgattcagcc

SEQ ID NO: 14633 - DNA, 4021 bp, Oryza sativa
  ref <308>: DATABASE ACCESSION NUMBER: AK065194
  ref <309>: DATABASE ENTRY DATE: 2001-12-06
gttttttctcccgtcctaccttcatccacacctcggatcggtggatcgaccgatcgatcgacgggtggtggcacgttgttttcttctccatccatccatccatccactcggtggctatggcgtagggaggaaaatcacgaaaaagaggatcactcggacggattcttttctctctctctctcttttcttcttcttgttctacttctttgatcttcttcttctctgctgctctgccgtccatggtggtatggtggtgatgtggtggcgtgcaaggtgaggtaaagggggtgtggtggtggtcggctcggctgtttatccatccatccatggatgccggtgagggtggcggcgcgcccgccgccgccgccgccgtgtcgaatgggtttgttcacgccgtcgtgcggtggtgcttctctccgctcttcttctggctgttcaccgtcgctctcgtcgccgccatccacctcgcctccacctacatctctccctccagagacgaagaggacaaggagaagaaggcgcggcgcggcggcgatttcgccggagccggggaggagagggaggaggaggaggtgggaaggaacgacgacaagattctggagatgatgcggagcttcagcttcatgcatgcgagcgaggaggatttcatggaggggatggctacgtacgaccacgtcgtcgccaggatggcgccggagccgctgccgctgacgccgccggccgcgccgccgccgtcgacgttcagcttcaggttccagcaccagttgcccgagattctccgggagacggccgtggtctcgggtgaaatacctgtgcaagtattggaagaacacgagccggagaagaagccggcgattgcgatggaatcgaagcaagaacgcgagcgcgatgcagaggagagagaggtggtcatggaggaggaggaagaagaggagcagagtagagaggtcgtggaggcggcggcggcggcgccgatgatcgtgtcgaccacgcacaactaccggttcttgacggagcgtgacttccgagggttcgtcaaggagccggaggccatcacggtgcgcgtccaggaatccttcgtgccatcgccggagctggaggcggtggcggtggcggcagcggcgcagccggaggagcggcgagtggtcgacggggcgccacggcgcggcttcctcacgaccaacgacttccgcccggcgaacgagccggatagcgcgcgccagagcgtggcgtcgcagctggggcggaagccggcggcgagctccccgtccgccgcgtcgaggggcagcgccgccgccgccgtgagcgggaggacgagcttcgcgtcggagttctccggcttcggcggcgactccgactcggagtcaaccgccagcgacgggtactcggtgaaggacctcgtcgtcgactccgacagcgactggttcctctcggagaaggacttcccggcggcggcggtggccgggcacgacgccggcagcctcaggggctattacaaggccaaggtgctcaaggccctggaagccctcgacgcgtcggcctccaacctggaacgttcgttccaggactcggcgacgacggtgtcgccgggctcggtcgtcggccaggcctcgccggacatcatcggcgccgccgacgaccccgccaagtaccccgaggacatgtggtcccggagcccctcgccggacgtcgagtacaacgaagacgagcacaagggaaacgaggcgacgaacatggcggaggaggtgagcttcgacatgagcgacgacgagcggccgcccgcctccggcggcaagaagacgacggcgatggcagcatcatcatcatcatcatcaccggtgcacgacgccgaatctgaagatgagaacagcttggatcattcggagaaggaaaccatcacgatacatgatcattcgtacgaatctgtctccgatgtcaagaggaggagcccagaagcaatctctgacgcagaattggatgatgcctcgtctcgccatgctgctgttcttgatgccaaggtaagaagcccggacgttcattcatctgaacccatctttgacaattaggaagaacatgaggtctcaaatgatcaatcacaagcggcagtttctgatgagaagagaagcacaccgcattcggagagagaatttgctggtacagacgatcgctcacacgaactcatttctgatgtttggaaagatattgtcggtgcaaatgatcagtcattagcatcagctcacgatgaagaaagaagtcctgatcaatcggttgcgattatttctgatgatcacaaagcaattgtcagtgctacgaatgattcctcaaatggagaagtttctgatcataagagcaccccagagactgcagagcaggaattcagtggaaatgatgatccatatgaactagttgccgatgcaaggatcatttcagagcgtgcagaagaagatgatatcccaaatgagcgtccagggaacgccactcggcatgtcaccttctccgtcgccgagaaggggaaggtgttggacgtggtggaggaggatcaagaggacaagtggaaggatttgacggaagaggaggaggacgagctggagtcactgtgggagcaccaggatctgatcgagcagctgaagctggagctgaagaaggtgcggtcgatcgggctaccgacgatcttggaggagtcggagacgccgaaggcaccgatggaggatctcaagccatggaggatcgacgccaagttccttcgcgaggacccaatggacgagctgaataagttcttcagttatagggagagaatgaggaagtttgacatattgtgctatcagaagatgtatgcaatagattttcttcagttcagagggcctcaacaatcggcaaattctctaaaatccttatcaccaacggtgacatccatcctgtctcacaatttccggtcgtcacgtcgaaaatcacccgaggacccgtcagaaaggtttctcaaggagctccggtatgacttggagacagtttacgtcggccaaatgtgcctatcatgggagttccttcggtggcagtatgagcaggcccatgacctgccggaatccgatccttaccacagccatcagtacaaccaggtggcaggggaattccaacaatttcaggtagttgtgcagaggtttgtggaggatgagtccttcaagggccctaggttgccaaactacatcaataaccgatgtgttcttcgaaatctcttgcaagtaccagtaataaaagaggacagcttgaaggacaggatggaggatcagcgtaaggggaactatgtcataacgagcgaggagctggaggagatcatggaggaatgcatgcgcgtcttttgggagttcatcaggtccgacagagtcgagacgacgtcggtgctcaagggcttgtcgagcactcatgttgagctccaggaccctttagaccatgatcttatgatgcacatcgactccacgttacagaagaaagagaagaggctgaaggatctcctgaggaccggcaactgcatagtgaagaagttcaagaagcccaaggaggacaccttgaaccagagcctcttcttctcgcaggtcgacatgcggctcgtggcacgggtcctgcggatgccgaggatcaccagcgagcagctgcagtggtgcaaggcgaagctggacaagatcgcacttgtagataggaggatccacagggaggcttcatttttgttgttcccctgttgagaatacatatataaatacacatgcttcttttgttcatttttcccccctccataaatcatctccaccatgtaatccacggcttgtagatttttcttaaccttttagtaatccaggtctctttacacatgtccagtaaattacaaattgtaacatggtaaaacagctcataaaccacagagtccacacggtacagtacttacagtaccctagctagaaaatcagagtgtaataaatcagcatttcctctcaagaggaaacatctacctcagaatgcacagatttctact

SEQ ID NO: 14634 - DNA, 3768 bp, Oryza sativa
  ref <308>: DATABASE ACCESSION NUMBER: AK065195
  ref <309>: DATABASE ENTRY DATE: 2001-12-06
gagtcttcaagcatcaattccatcaaaagaaatgtttcgcttagctctcaataaacccatcacaccgatgctagtgctagccttcattcttttcctgaacttgcgccttcccttctgcttgtcagctcagtttcacaacgaatccaatgctgataggcaggctctcctctgcctcaagtcccagctccatgacccctctggagctttaggctcatggagaaatgattccagtgtttcgatgtgtgattggcatggggttacatgcagcacagggcttccagctcgagtagatggattagacctcgagtcagaaaacatcaccggccaaatatttccttgtgttgctaacctcagtttcatctccagaattcacatgcctggtaaccaactcaatggccacatttcacctgagatcggccgtttaacacacctcaggtatctaaatctcagcgtgaatgcacttagtggtgaaataccagagactttatcgtcatgttctcgcctcgaaaccatcaatctgtatagcaactccattgaaggtaagattcctccaagtcttgctcattgttcatttcttcagcaaattattcttagcaataaccatattcatggaagcataccttcggagattggtttgcttcccaacctttctgcactattcattcctaacaatgagctcactggcaccattcctccacttttgggaagtagcaaaacacttgtatgggtgaatctccaaaataatagccttgttggggaaatacccccttctctcttcaacagctctaccataacttacatagatctctcacagaatggtctatccgggactattcctccattctcaaaaacatctttggttctgcgatacctttgcttaactaataattacatctctggcgagattcccaactcaattgataacattctctccctgtctaagttgatgctttctggaaacaacttagaagggaccattccagagagcctaggaaaactctctaatttgcaattactagatctaagttataataacttatcaggaattatttcaccaggaatatttaaaatctcaaatcttacctatcttaattttggtgacaaccgatttgttgggagaattcccaccaacattggctatacccttccaagactcactagtttcatactacatgggaaccagtttgaaggaccaattcctgctacattagccaatgctttgaatcttacagagatttattttggacgcaactccttcactggtattattccttcattgggatccttgtccatgttgactgacttagatctaggtgacaataagcttgagtctggagattggactttcatgtcttcactaacaaactgcacccaactgcaaaatttgtggttgggtggaaataatctacaaggagtacttcccacttctattggcaacctatcaaaaggactacagatattgaatctagtacagaaccagttgactggcagcataccttcagaaatagaaaacctcactggtctcactgccattctgatgggtaataatatgctctccggacaaattcccagcacaattgcaaatcttccaaacttgctgatcctaagcttatctcacaacaagctttctggagaaattcctcgatcaataggcacactagagcagctcattgaactttatcttcaggaaaatgaattaactgggcaaataccttcaagtttagcaagatgcacaaatttggttgagctaaacatttcaagaaataacctcaatggaagcattccgttagatctcttttcgatttctacactttctaaaggtctggacatatcctataatcaactcactgggcacataccactggagattggtagattgattaatcttaattctcttaatatctccaacaaccaattatctggtgagatcccctccaatcttggtgagtgccttgttttggaatcagttcgcttggaggcaaattttctacaaggaggcatcccggaatctctaattaacttaagaggcataattgagattgatttttcccaaaacaacttgtctggtgaaatcccaaaatattttgagtcttttggatctttacgctctctcaatctatctttcaataaccttgagggacctgttcccaaaggaggcgtgtttgcaaattctagcgatgtgttcatccaaggaaataaaatgttatgtgcaagttcaccaatgttacagttaccactttgcaaggaactgtcagccaaacggaagacatcctatattcttactgtggtagttccagttagtacaattgttatgattaccttggcatgtgttgccatcatgtttctgaagaagagatctggaccggagagaatcggcattaaccattcgttcaggcgtttggataaaatatcatacagtgatctgtacaaagcaacatatggtttctcttcaacaagtcttgttggttcaggaacatttggattggtatataaaggtcaattgaagttcggtgcacgcgatgttgcaattaaagtatttagacttgaccaaaatggagcacccaatagtttttctgctgaatgtgaggcactgaaaagcattcgccatcggaatcttgtaagagtaattggcttatgttcaacctttgatccatcaggaaacgagtttaaagcactaattcttgagtatagagcgaatggtaacctcgaaagctggatccatccaaaaccatgcagtcaaagccccccaaaactgtttagtttggcttcaagggtaagagtagctggagacattgccactgcattggattatcttcataaccgatgcactcctcctttggttcactgcgatctgaaaccaagcaatgttcttttggatgacgaaatggttgcttgtattagtgattttggacttgcaaagtttctgcacaacaactttataagcctcaataattcatcaagcactactggattgagaggatcaatcggatacattgcaccaggtgagcacttgcttcattgttatttgtattttatctattgtttccactagctctaccaaggaagtgatgcaaaattgtatcatattttgactgactaatgaatattattaacttgcacaatattgattgtagagtatggcttgggatgcaaggtctcagctgagggtgatgtatacagttacggaattattgttctagaaatgataacaggaaagcaaccaactgatgaaatctttcaagatggaatggaccttcacaactttgtggagtcggcatttccggatcaaatcagtgacattttagatcctactatcaccgaatattgtgaaggtgaagacccaaatcatgttgtgcctgaaatactaacatgcgccatacaaatggccaagcttgggctaatgtgcacagagacatcaccaaaagatcgaccgacaatggatgatgtttactatgatatcatttccatcaaagaaaaatattatgcactgatcaactgaggaaatggatggatactactgaagttcacctcctgaaactagtaaaattgtgttggtactcatctttccagttgttgtagtgaagattctctttatgaatccaaataaactatgattacgattttgtagttacacttgtacacactacaattttaacatgggggcaatgcagctgttaaggttctcccatgctgttatgcagtctattccaaaggcattgatcacaaaattttgatggcccatgcaacaattgcataggagtgattttc

SEQ ID NO: 14635 - DNA, 1398 bp, Oryza sativa
  ref <308>: DATABASE ACCESSION NUMBER: AK065196
  ref <309>: DATABASE ENTRY DATE: 2001-12-06
gcccgatcccccttcacacgcggcggttgacgtctccgacgccggcgatctcctccgccccctcccctcccccgccgccgccgccgaccctcctcagctcggccgccacctcctccgccagagggagagccccctccacctcggctcctgctcctccaacgccgccatgaattacatcatcggagcattcaaggcgccctgcgacgtcttcatcaccttcgccgatgagaggagccggaagcaggtggcgatcaagaaggataacgggaagacgttgatggtgccggccttccagagcctggagactattgcaggagaggtgtcggtagcgcccgttccaggtaaaagggtggagcaccaaggtgtcaagattgagctgctgggtcagatagagctgtaccatgagagaggtcacttctatgacttcacttcgttagtgcgagagttagaggttgctggtgaaatctatgaaaggaagacttatccatttgaattctctactgttgagatgccttatgagtcgtataacggaacaaatgtcagattgaggtacatcctgaaagttacaattggcagaccatatgctactagtgttgtggaatgtcgagatttctgtgtaaggaattacactcctcttccttcaattaacaatagcatcaagatggaagttggaattgaagattgtttgcatattgaatttgagtacagcaaaagcaagtaccatctcaaggatgtgatcgtgggaaaaatctattttcttctagtcagaataaagataaagaacatggagcttgagattcgtcggcgggaatcaacaggatctgggcctggcacatatattgagactgagacacttgcaaagtttgagttgatggatggcgctcccgtaagaggtgagtctattccggtaagactcttcttgacaccatatgagttgaccccgacttaccgcaacataaacaacaagttcaatgtcaagtactacctgaacctggttcttgttgacgaggaagaccggaggtacttcaagcagcaagagatcacaatgtaccgccttcaagaaactccgcaatcttcataaactcctgttgccttgacttggtaacgaccagaaaaacttgggtctgtctggcataggagagcaccggagtagcaacttagcatgatgcgccttcctgtatataactctccagaggagcgatgccctttgtgatgtaccgtgtactgtttttgcctatgctcttttcccccccattttctccttcattctgatcaggaaacaaaccatgacaacgctggcattgtcgcccttttcgccttgttcatttgagctttcttgttagactttgtgggataaccatatatttgttgatattttgcttcattgttttacccttt

SEQ ID NO: 14636 - DNA, 1791 bp, Oryza sativa
  ref <308>: DATABASE ACCESSION NUMBER: AK065197
  ref <309>: DATABASE ENTRY DATE: 2001-12-06
ggttccctcatcaacctcaccaccattattttcttctctcctcttctcttcttcctcctctcctctcctctcctcgctctccatccatctcgtcttcttcttcctcctcctcagcttcgagatttcagcttctccaaacccccattcttcccgccacaagctctgctctgtgctttgctcgctcgcctttcccgccattggtgtgcttcgctttcttggcttcaaagatccgacgagctctgtgatagctggggagaagaagaggaggagaggaggatgctgggagcgagccctaaggccaagaaaggcgcgacggtgaagttcgggtcgatgaagaatcctcctcctcccccggtggttggcgccgccgccggagcagcggcggcggcggcgggtgggaaggtgccggcggaggaggtgtgggaggtgcggccaggcgggatgctggtgcataagaggggcggcggcgccgacgaggagcccgtcaacttgaagccggtgcccaccatccgcgtcaaggtcaagcacgccggcatcacccacgagatctacatcaactcgcaggcgtccttcggggagctgaagaagatggtggcggcgcgaacggggctgcatccggacgaccagaaggtgatgtacaaggacaaggagagggactccaaggcgttcctggacatggccggcgtcaaggacaggtccaagctggtggtcgtcgaggaccccgaggcacgcgcccgccgcctcatcgaggagcgccgcaatggccacctcgagaaggccgccaaggccgtcgccgccgtcaccgccgaggtcgacaagctcgcccccaaggtggcggcgctggacgcgtcggtgaggaagggggagaaggtggcggagaacgacgtggtgcaggtgaccgagctgctcatgaacgagctgctcaagctcgacgcggtggtcgccgacggcgacgtcaaggcgcagaggcggctacaggtgaagcgcgtgcagaagtacgtggagacgctcgacgccgtcatggccaagaacgccgccatcgtgcgcaagtccggcgagaagctcacctccaaacaacaccatcacccgccggcgaggcagcagcagcagcaagctcaccaacaccatcagcagccggcggcggggcagacgcggtgggagatgttcgacctgctgtcctcgctgccgtcgacgtcgtcggcctcctcaacgaccaccgtcagctcaacggcctcctccggcgcgccgccgccgctgccgccgccggcgaaccggctcgactggatgctattctgagcacacacatcacagaatcggcagatgcaatggtggtgcttggttggcaagaattgcacccatgtccggaaaatccgaggtgtcctgtccctgatgagatgatgatgaagatgatgattgaattgccctggattatttgctgctgctctagcaatttggttggccacattacatggtactactaccacttctagatgagttcagttcatcatgtgagagtaatttttttttaattttgttttttctttctttctttctttcttcttcttcttcaccatcaaatgtttgatattcttttgtgtgcatatattctgagaaagagagagagagagagagagagagaggaaattaggggggaagagagaaattgaagtgtattcagattgggaataagtcaaaaagggttattattgttctccaattggcgtttgaagaaaaggcaaagaaaatgttgtacccatatggatacagataccaatacataccgttcttgat

SEQ ID NO: 14637 - DNA, 1612 bp, Oryza sativa
  ref <308>: DATABASE ACCESSION NUMBER: AK065198
  ref <309>: DATABASE ENTRY DATE: 2001-12-06
gtttctccaaaccctcgcgggagatcggaattccccaccccggagcgccggatccaccaccgatcgtcggcggcggcggcggaggaggctgcgacggcggaggcggagatgctgggccctcctcgccgcgggccggcgtacaagacgaagctgtgcgcgctgtggcagcgcggcaactgcaaccgcgacacctgcagcttcgcccacggccacggcgacatccgccgcccgccgtcctcccgcggcgccttcacgcaccacccggggagaagagattatagagccggtgatttcagaggcaggattgataggaggttttcacctcggaggaggcattcccctggaagagagtccaggggtcatcgtcccctttatgatagaaggccatcttctcgagaaagagattctagctattcacgatctcctagcaggaagagtgagaggaggcatgaaaagaagactgacgatggagaaaccaactcatctaggagtttaagtctctctgataacaacgatgaaaagaaaaaggacaaattctcaagtggtgatgagaaagaagaccacgaaaagcagctgaaacaaatacggctggatatggaggctttgcgtgacgataaaactcagatggaggtcattttggatgagaagatagatgaagtgcgcaagatctctagcaaagttaatgatcttgaggtgcagcttagaagggagaaagatgaatgccataggatgacctcaaagatgaagaagtttattaaagctcatgctcggtttttgaaggcacaagaagaagtgaaaaggtcacaagctcgtttcgagaggcttggtgatttgcttgcttcagatattttgaagcgtggtgctaatgaagaggggtccagtgtcaatgaagacctaaacgaaaggagtcctaatactgcagcaactaaaaagagatcaatcccatactcaacaagtgaagaagcgaaagctgtgaagaagagaagggagcgagactctgatacaatgactaggtcagataaatataggtcagatgttacagattttgataaaacaagtaaggggactgaggcaaccaagtctttatatttgaagaagaaattatgggaagatgaaaaaagtaagctaggagccaacattttcacagaaaaggtcaaaggttctcccgtcagacatgttttgccctccactggcatggctgctcatgctattgatgatctcaacgaagctattgaactggaggacagacatgaatccatagacgcattactagaaaatgatgctgatgacaaaactagatcacctgctattcccctgcagccaccaccagtggtacagaatgcttatgagcagtatgagggtgatgacgaggaagtcgatgtggaataagtggatggcctcgtttctagacaagaggcctctgatgaagcaatggcgagattagcatcttccccagctccttataattagtactattagcatcttggtgtacaaagtgctatctatttgacattgggaattcagcttatatttatcaagaatccttttgtagtaacatccttggcgctgagacagccttagtcaactatgtggagcagccgtataaataccc

SEQ ID NO: 14638 - DNA, 2451 bp, Oryza sativa
  ref <308>: DATABASE ACCESSION NUMBER: AK065199
  ref <309>: DATABASE ENTRY DATE: 2001-12-06
ggtgtgtgcctccatgacagtgctcgctctccctgagccgagagagtaaaggctctctccttcacacacctaccgcctactctcccactcttcttcccaccccactcgtgtgcgcgccactgccgccggcgatggcgccaatgccggcgccggccgtggctctggcggttctggtgctcctctccgccgttccggggtacttctccgacgacctcaacaccgacgcgcaggcgttgcaggcgctgcggtcggcggtggggaagtcggcgctgccgtcgtggaacagcagcacgccgacgtgcaattggcagggggtgacgtgcgagagcggccgcgtcaccgagctccgcctccccggcgccggcctcatgggcaccctcccgtcgaacgtgctcggcaacctctccgcgctccgcacgctctccctccgctacaacgcgctcacgggccccatccccgacgacctctcccgcctgcccgagctccgggccatctacttccagcacaacagcttctccggcgaggtcccggcgtcggtgttcaccctcaagaacctcgtgaggctggacctcgctgggaacaagttctccggcgagatctcgccggacttcaacaagctgaaccgcctcggcacgctgttcctcgacggcaacagcttcaccggcgagatccccaagctggacctgccgacattgagccagttcaacgtgtcgtacaacaagctcaacgggtccatccctaggtcgctccggaagatgcccaaggactcgttcttgggcactgggctgtgcggtggcccgctcggcctgtgccccggcgagaccgcgctcacgccggccggatctccggaggttcaacctgctggtggaggcgcggcagacgccggcggcgcaagcagcggcacgaagaagaagctctccggtggcgccatcgccggcattgccatcgggtgtgtgttcggcgtgctgctcttgctggccctgatcttcctcctctgccggaagaagtctagctcatccacgccagcgacagcggtggagaagggtcgtgacctccagatggctccgatggacatggaaccaaagggacagaacggctcagcagccggcaacggcgcccacgtcggagcagccgcggcagcgccagccgccgccacctccgccgccgtcgcggcggcggcagcagcagcgaagaccggcggcgcgacgggcgggtccaagaagctcatcttcttcggccccatggcggcggccccgccgttcgacctggaggacctgctccgcgcgtcggcggaggtgctgggcaagggcgcgttcgggacggcgtacaaggcggtgatggagagcggctccgccgtggccgtgaagcgcctcaaggacgtggaccttccggagccggagttccgggagcgcatcgccgccatcggcgccgtgcagcacgagcttgtcgtcccactccgcgcctactacttcagcaaggacgagaagctcctcgtctacgactacatgtccatgggcagcctctccgccctcctccacgggaaccgtgcttccggcaggacgccgctggactgggagacgaggtcggcgatcgcgctggcggcggcgcgcggcgtggcgcacatccactcgacggggccgacggcgtcgcacggcaacatcaagtcgtccaacgtgctgctcaccaagaactacgaggcgcgggtgtcggaccacggcctccccacgctggtcggcccgtcattctcgccgacgagggtgtccggctaccgtgccccggaggtgaccgacattcgccgggtctcgcagaaggccgacgtgtacagcttcggcgtgctgctcctcgagctgctcaccggcaaggcgccgacgcacgccgtcgtcaacgaggagggactcgacctgccgcgctgggtgcagtccgtcgtccgggaggagtggaccgccgaggtgttcgaccaggagctcctcaggtaccagaacgtcgaggaggagatggtgcagctcctccagctcgccatcgactgctcggcgcagcaccccgacaggcggccgtccatgtccgaggtggccgcgaggatcgacgagatccgccgctccagcctcggcgaccgtccggccaccgacagcgccggcgagggcgaggagccttcactataaccgaccagccgacattgccgtctggatcaccgtacatcgatctcagcctcagcgaacggaaattaagttggagaattgcttagttctttgcatggatcttgctcccccaggctacttttggttcatcagcaacttgtgcatgtttttttcattactttttctttcttcttcctttcttttttttcccttcttttttttgggcctttctctcacgggctttgattctattctatagcacatgtcactgtactctttgattcttggaaaggaacacttgataatgcgttgtatc

SEQ ID NO: 14639 - DNA, 1341 bp, Oryza sativa
  ref <308>: DATABASE ACCESSION NUMBER: AK065200
  ref <309>: DATABASE ENTRY DATE: 2001-12-06
ggagagaagccgaaccccacaaaacctcctcccccctcgccgccgccgccgccgccatggccgacgagctcgacgaactcctcggcttcctctcctctccccagccaaacgtgcgcggcgcggcggcgggcatcgtgcgggggctgacgggcgacgcggacggcctgcgcgccctctcggcgcgcgccgaccgcgcgctgccggcgctgctccggctgctggcgtccgcggggggcgagctgggcacggggggagcggcggcggactcgctcgtcaacctcagccaggacggcgcgctctcggcccgcctcgtgtcgctcggcgccgtcgtggccgccatggacgtcgtggccaagcgcggcggggagcagccgggcctcgcgcgcagcctcgtcatgctgctcgccaacctcacccaggtcgactccggcgtcgcggccctcctccaggttggagatgaaaagatgcaaggactgtatgttgcaaagcttgtgcggtcattctgcaggtcatccagtgagtctgaagaggaagatatctttgaacatgttgcttctatattagtgaacatctcaaaggttgaagctggaaggagaatactgatggaacctaagagaggccttttaaaacagattatacggcaatctgattcaacaaaccaacttagaaagaaaggggttgttagcaccatccgtaactgttgctttgaagctgatacccaaatacaaaatttgctctctctagcagaatatatttggccagctctacttttgcccgtagctggaaagaagatctacagtgaagaagatagatcaaaaaatgcctcctgagcttgcaaatgcactctcccatgaacgagaggctgttgagaactctgaaattcggcaacaggcacttgaggctatttatatgattgtccttcaggatgaaggacgaagggctttttggtcagtcaatggtccgcgaatactgcaggttggttatgaagacgaggaggacccaaaagtgatggaagcatacgagttaattggatctctgcttgttggcaagggtgatgatgagcaagatcaagaacaaggaggacagaagccttaatttctgctgtttagaaaaaaaaaattcagtcctccatcgtgtacaatattcttctatttatcagttgttgcaaaaactgggctacattgcaatgctaccgtaatcaattgttgtattatggacaaaatttttttgcaccatttggcaggtttttccctggcttaaagctatcaagagttctccatacaattatgtaagaacatggagaaatatgcataaacagagcaatttgcccacttttcatcg

SEQ ID NO: 14640 - DNA, 1495 bp, Oryza sativa
  ref <308>: DATABASE ACCESSION NUMBER: AK065201
  ref <309>: DATABASE ENTRY DATE: 2001-12-06
gaggtagccgcagcgagaggagagcgcgagcagagcaagcaaccaagcagcagcagcgatggccgccgcagccacgacatcctcccacctgctcctgctctcccgccagcaggcggcggcctcgctccaatgcggcctctccttccggaggcagcccggcaggctcgccggtgggtcgtcggccccgagcgtgcggtgcatggcggccgtcgacacggcctcggcgcccgccgcgacggaggctagcaagaagagcagctacgagatcaccacgctgacgacgtggctgctgaagcaggagcaggccgggaccatcgacggcgagatgaccatcgtgctggccagcatctccacggcgtgcaagcagatcgcctcgctggtgcagcgcgcgcccatctccaacctcaccggcgtccagggcgccgtcaacgtgcagggcgaggaccagaaaaaactcgacgtcgtctccaacgaggtgttctccaactgcctcaaatcgagcgggcgcaccggcgtgatcgcgtcggaggaggaggacgtgccggtggccgtggaggagagctactcgggcaactacatcgtggtgttcgacccgctcgacggctcctccaacatcgacgccgccgtctccaccggctccatcttcggcatctacagccccaacgacgagtgcctagccgacatcgccgacgaccaaaatgtaacgcgttatcgatcgcctagcaatcgctcatgcacacactgacacggtgctaacagaacgaaacgcctctgtccgcgcgcgtgtgcctgcagcttgaccaggtggagcagaggtgcatcgtgagcgtgtgccagccggggagcaacctgctcgccgccggctactgcatgtactcgagctcggtcatcttcgtgctcaccatcgggacaggggtgtacgtgttcacgctggacccgatgtacggcgagttcgtgctgacgcaggagaaggtgcagatccacaaggcaggcaagatctatgccttcaacgagggcaactacgcgctctgggacgacaagctcaagagctacatggacagcctcaaggagcccgggccgtccgggaagccatactccgcgcgctacatcggcagcctcgtcggcgacttccaccgcacgctgctctacggcggcatctacggctaccccagggaccagaagagcaagaacggcaagctgcggctgctgtacgagtgcgcgccgatgagcttcatcgtcgagcaggccggcggcaagggctccgatggccaccagaggatacttgacatcatgcctacggagatccatcagagagtgccgctgtacatcgggagcgtggaggaagtggagaaggtcgagaagttcttggcttgactgcaagtttcatatacgggggtgtttctaaaaaaaaaagtattgtaactaaattataatatatttgtagaaattttcttttctgatggcgaattaattaaacccattgtgaaggatttct

SEQ ID NO: 14641 - DNA, 1503 bp, Oryza sativa
  ref <308>: DATABASE ACCESSION NUMBER: AK065202
  ref <309>: DATABASE ENTRY DATE: 2001-12-06
gatcatcaatttattcaacaatgggagggacccgtgaacccccgcgtcgcccacgcgcaggcgacacggggggcgaaacctagctccgccgcccccttcttccccctttccccacctcgccgccgccggagctcaccgccggaaagttggccggcgagttaggagggcggcggcggggccttctcctgtggtggcgtcccctcttggcgcgggggaggcggcgaaaaccggcggcggggagtggcggcggcgagctctccgggcaagacgatgacggatctgcggttgctgtcaccggatctggcctggcccaggccggatccggcggaagcggccggcgttgtggcgcagcgcgaacgaaggaggtatggctggcagcggaggggcgcccctctctggcggcggagacggctcgcgaggccggcgcgcgcgccgacacacgcaagcggggcgcgaggcgtcgcccggtggagccgtcggcggcggggcacatcggcggctctgcaccggtggttggggcgacactgtcctagccgccgtggcgtccgcccccttcggcctgccccccctcccccttctccttgagttgacggcagggtcggccggtcgggcggatctgtgggcggtggcctaggctgattgctgaatggtcaatgtggcttgcgacgttccttgtgcaggttgcgtggatttgaatggggtatcgcgggtgaaagccctgctgtgccgttggccggcttgacgacggcggcgtctttcggcgtcgttcccctccttggaggcgttgttatagcgttgacccctttcttttccttaccgttctccgggtgaaaaccttgctccggcttccggatgaagcggtggcggcgaccacgtcgtgtccttcttggggcaccgctttggagaagctttctcgtacaaggatatcgttggtctttgcattggcttcgaagctttttagtcctaggtttcgacgaggcctttgctcttctagtttcactttttgtttcgcggcgggcgacctttgctccttgtttgattttgctaggtgaagtcggagctgcttcgttgtggtaatgaagctgggtaacgatgacacactacagtttctttctaggggtgttgttgctgaacatgaataggatgtggcgcttaggcagcttgggctaatgtccattgtgggatgttgaggccgcttgatcattatggcagcgtgttaggtatcgatgttgtattctaaagtcggagctgctgtgtcgcttggcggtaagctcggcaacgatgacagattgcaaagtcggaacctcctatattgctcttggtcaaatttggtatcgacaccctatgttgggctccgtcagtggtttttagttgtagtgtgttgtggcgagtgctgtgtgttcagccagtcggtggttgttttttcttttcttgtaacccgtctagggtttttactcctgcttattgaaaatataattggcagttctcctgccagtttagttt

SEQ ID NO: 14642 - DNA, 2350 bp, Oryza sativa
  ref <308>: DATABASE ACCESSION NUMBER: AK065203
  ref <309>: DATABASE ENTRY DATE: 2001-12-06
tcccatctcccagttcgagcccacgccatcacggccgcgccgatgctcccgtcgccaccggcgccgccgccgatctcgccggcgcggctgcacaagctcgtgacctcccagccggacccgctcctcgcgctcgagctcgtcaccgtcaccgcgccgaccaccgcgccccacccgtcgacgctccacgcgctcgcgctccgcctctcccgccgccgccctccccgcggatcctcctcccgctgctcctctccgcgctccgcctccgccggcagcctcacctcttcctctccaccttcaactccctcttcgtctccggctccagcccgttgccgctccaccccgagcttctcctccgcctcctctccgttctctcttccaccgcttcctacttcccgtgcgcgctgcacctcctccgcgacgtctccacccgccttcccctccccgagccgctcgtcctcgcctcgcacaacctgctcatcgaagccgccgcccgctccggccacctcgccgtgtcaatctccctcttccatcgcctccgctccctccatgtgtctcccaacgccgagacataccgcatcctgacccagtcactatgccgcaggggccaggtccgcactgcagccaacctgctcgacgaaatgctccacaggggcatccctgctgacccactggcatacaccaccgtgctgaacgcgctctgccgtaagaagcagcttcgagaggcttaccgcttgctgtgcctcatgcgaggccgtgaggtctcacctgacattgtacattacaacacggtcatcgtcggaatgtgccgtgagggacggccactggatgcctgcaaggtgttcagagatatgagggagagtgggtgcgcgccaaatgcggtggcatatactgcggtggtcaataggttgtgtgtgagtggattatatgacaaggcagaggcataccttgatgatatgttgggcaaagggttactaccacatttctctgtgttccattcagtgattaagggatgctgtgcagttgggaaggtcaatgaggctgcagggatgatgactcgaatgcttgatcttggaatggttccacatgctgagacctggagttcagtgatcaggagtgtttgtagtgatgaggataatgtcgaggtggttttgttgcaagtgatgaaaggaataaagcacctctcaaacataaattcaaggagtacttggacatgatatcatgtggcatggatgcaaggaacacctattttatggtgtgttgtaacaatcagttttgaaaggaaacagtagatgatgtgcaaaatgtggaccacaaccatttttctcatcgtatgcagctaatttgatatttgagtttatttgtttatatgcaggttaggagatattgtctgacttcaactaaggtatgctatcctattgcaagaaaaaaaaagttatcgcccttaattaatgtgattcatatgattgttttggtagtacattttgaaggttgattctgaatttctgatgcttgttagttaaagaccatactttgttctactctgaatccagttgatcatttatactttttcttatgcctcttcaattgtgtgcattcgcagatcttataatctgccaaaacccaaagattttggttcaccttggttcatgttttctggattttgttagaccccagttctgtgtactttgtggaaactataatgttttggcagcaggagctgactcagctgagtgaaggatcagcaattcagcatggagatcatctcacggcaaatatgggaagctcactggacgttggctgaattccaactgctgttgtcaaggtgcatctgatcttctcacgacaagcatacactatacatatcgttgcaggtgcagacaaaggttttacgactatttgatttcctgatacaacgcggcaaagctgctgggatctggatggttcactcgcacggcttgctacatttttgtgcacccactgacctcgtcgtacttgccgtgcccggtggtatcctctccctgtgactgcataggtagtgcggtactgcctcagagagttttgtgtgctgaagtagagaaatttttgtaattctattttcactgggtgatgtacctttcaagaattcaaaattaccagcgattaccggtaacagtggccatgctatgtactatgagtctatcttgtatagacttagaacaagccccccttcattcaggagataaaaaaatgatggattcttgagattttagatttaaaaaatgattatgtacacgtattggaaatgcaaacgtgtaatcgtattgtactgattatgtaatgccatacggtgtccattgacatttgcttattc

SEQ ID NO: 14643 - DNA, 3209 bp, Oryza sativa
  ref <308>: DATABASE ACCESSION NUMBER: AK098907
  ref <309>: DATABASE ENTRY DATE: 2002-08-28
gatatccgacgctctctcccaagcgtcgtcgctgctacctccactccgcctcggtcctcctcgcctcctcgctcctccctgcgtggcgccgctccgccgtcgtccccttgcttcgctccccctctcctcctcctcgcctcctcactcctcctcgcgtggcgcacgccgccgtcgtccccttccgccgccgcccagacgccgccgtcgtacccttccaccgctgcccggacgccgccgcccatacgttgccatcgtccccttccacagccggagccgcggtcttccccatcggccacacaaatcgcgccatggcaactcacaaaattccccacgcgtggaccaccaaggctccatcgcgctaatcccgcggtggctcccctaatcatgataacgccgtcgccgcgcctttgaacgctgctgcaccatccgtcatcatccgcacttccgccgccgtcgtcaccgcaatcagtatcctggtggtccagggtttccaccagtgccgctaccccgtctcgccctggttgtgcatactcccaccagcgtcgcagctccgtcgtcgccctgcaatcggtgcctcagtggtccagggctccgctggcgatgccaccccgtcgagccacggtggtcaagccttccgccgacactgagcctccatctttgtcgctgctctgtgagtcctctagtgttgccgccattggaaggggatagactcagcagctaggcctcccagccgtgtgcctccctctcttatgttggtgatacctgattcaactcaaatcgactcttttcaatccccatttttcctctttgtgaattttccccattagttctctagctgaattttcttattcaagcttaatggtatgcatctccttttagttatgttattcggttcttctttacctttgtggataattgcaggctatatattacgtgattggtgctgcagtttcatacatactaacattatagttgtcatgttgaatatcttgcagattgtcttacagagagcaaattcaaccatgcctagtctcttatcttttttatttagtcgaaaaataacagttcctttcttactgaaatggaaaatgcacgaaaccctacactgcaattttctgcaatgacagggtaaatagccatatcaagcccgtttgttgctgttgggctgcctgcctcttatttttcttttttatttctgtgatcatcaacaattactggattgtcgtcccttatggtctttcatttgattcactgcacggttgataagttcactcatttgctgccaattgttgttgactaatttctttttcatattttcttttatctaaatatatttattctgtacttctattgggccatatatagtctgatttagtgtttgtcatttcaggtgacattgcttcttagccaattggagcacaaaagaaaatccaataaacaggaaaacatgatttagtattggacatcatttctgaaagcttttgcacttaagaaatgcaaatggacaagaataaggtatgcggtaaacatgatacttctgtgtggcttactacttcactggtcctactactttagagctatatatttttgtgtgactgtagatgggttccattaatggatggctgtgagaactaacatttcaattttgtatatatggtagagcttcctcgggtggttggtagcagaacaagatagtataagttttcaagtggatagaactaaagcaaagctaagaattaaacatgtgtaatggaagtatcaggaattcagaatggtagttggcgcatatggaatggatttgatgactgaaaattgtgtaccctgtgaagaattcattgctggttttaagttttaacttcataccgttatcatttcaaggaaagaaggtcttgcaatcgatcttctgaagagctgagaaaggtacagcttaaaaccattatttgttctatagtgaagttgatgtgtgtatactaaataacatcgtcagaatgagcaaacgctataaacgaaaatcaaccttcaaatataatatgtataagctttaaatgttaatggccacttatgcaaaatgcactaggtaatgttgttcttcattttcaggagcgatttgtaaattaggttaatgaaacaaaatattccacgttttgcccaatttctataaatttgagtacctgaattcactcacaccaaatggattgccacatcttttaaaggtcaaatttaattgtcttgtcatattgctgcgcaatctcgacccgcacaacgggttgtgcaatggaactaggcttatgattagagcatttcagaattattccattagtgctgagattgtcagtggtgcacatgctgggaagagggtcttcataccacggattccattatacccctcggaggatctttcattgccttttaagttcaagcggaagcagttttccatccgtcttagttttgcaatgactatcaacaaagctcaaggagacaatcccaaatgtggcaatctatctccctgaacctgttttctctcatggtcaactctacgttgcactctctaggggtgtctcgaggggaacaaccagaattttggccaagccaaggatagacattgaccccactggaaaaagcacaaagaacattgtatatcgagatgttttattctgaacagattgtctaaggttgattagagagtaccatgttcagattcttctgaaggcccagttctttatattattcattggactgttgagcttggttgtttctggaggaccaggttgcatggatggtagaatgtggttgcattgagagtactatgttcagattcttctgctggccctgttctttattttttttttttcactggactattgaacctggttgtttctggaggactacggagcatggctggagtatcatattgtttgcaccaagtgttcgatgatatctagaatatcatattgtttacaccaagtgttcgatgatatctggaggataacctgatgtggattatgagcttggctttgtcttgacaaataatagatgagttgatgcttgtaagagaggtctcgatgatctgctaattgccactgtttagttacatggggtgaaataattttgtgcaaacataactgatgtatatgacaatacgtctctgatttggatcttgtaaacttatttgatttgggaaggactgcaacacttgaaatttttattgg

SEQ ID NO: 14644 - DNA, 1769 bp, Oryza sativa
  ref <308>: DATABASE ACCESSION NUMBER: AK065204
  ref <309>: DATABASE ENTRY DATE: 2001-12-06
gatggatgagctctccttcggaagcttgtgcatggtcgctatggccactctcgccctcgcgttggcgctcatggtcatgggagctcatcgccgcgtcggcgagaagggagcaaccaccggagccaagaaccttcctccggggccatggaacctccccgtcatcggcagcctccaccacctcctcggcgcgtcgccgccacaccgcgcgctgctccgcctgtcgcggcggcacggcccgctgatgctggtgaggctcggcgaggtgcccaccgtgatcgtctctgggtcggacgccgccatggaggtgctcaaggcgcgcgacccggcgttcgccgaccgcgcccggagcacgacggtcgacgccgtcagcttcggcgggaagggcgtcatcttcgcgccctacggcgagcactggcgccatgcgcgcagggtctgcctcgcggagctcctcagcgcgcgccaggtgcgccgcctcgagtccatccgtcaggaggaggtgtcgcgcctcgtcgactccatcatcgccggcagcagcaacgccgccgccgtcgacatgacccgggcgctggcggcgctgacgaacgacgtgatcgcgagggcggtgttcggcggcaagtgcgcgcggcaggaggagtaccgccgggagctcggcgtgctgacgacgctggtggccgggtacagcatggtggacctgttcccgtcgtcgcgcgtggtgcggtggctgagccgccgcaccgagcgccgcctgaggaggagccacgcggagatggcgaggatcgtcggctcgatcatcgaggagcgcaaggagaagaaggggagtgacgccggcgtcggcgcgaaagacgaagacgatgatctgctcggcgtgctgctgagactgcaggaggaagacggcctcacctcccctctcacggcggaggtcatcgccgcccttgttaccgtgagtaactgcctatataccctttacatgtttcttcgtctctaagagcatcccagcagatccttcatccggtagtccatccgaaatatagcgcacgggagaagaaaacggcgctccagcaaatacggcatcgaggcctactccaaaaatagacgataccaaatcagagagagttcggccaaagtgattttctcctcatgccatgtctcaacgtctgcgcttccgccctcatctggagttacggatcaacctccccttcgtcattgtcgtcgcccgctggctgccgcagccacttctgcgcccgctcgctgtagccgttgccgccgcttccaatccggtcgcctactcgcctcagcattcgccgccgtcgcctgcgcgttaccacgcccgccggtagtctgtgccacccgcccgcctcagcatccgccgtcatcgcctgcgcggctctgtgcccgctagccacctcggctacttccgtgccgtacgccgcctatgccgcccacccacctcagcatcccctaccgtctcctacgcggctccacggccgctttcgcgcccgccagccgcctgcgcacctccgctcctactggccgccccgactgctctgcggagtcatattagagaaaagagcaaagaaggatagagaagaatagagaaaaagatataaagatgaaatatagtccttcaaatataatatataagtgtatggtagttggaaaatattactaaaatatagaaggatgtgatatggagaatgtaatatgtatgatcggttagagtgggaggggaaatgaaggagaaatctttttggatgaccatccatttaggc

SEQ ID NO: 14645 - DNA, 969 bp, Oryza sativa
  ref <308>: DATABASE ACCESSION NUMBER: AK065205
  ref <309>: DATABASE ENTRY DATE: 2001-12-06
ggcttctcctcttccatctcacagagcttccaaattccaagaactgaagaaaaaactttcaagaacatctgaaacatggcactgcccatcaagcttctcctagtctctgcatttctctccctcctcctcctgatccaaggtaggatacatctttcttgccggttcttggtgttctctgatcaaagacaccatgcatccatctttgtttctgactggctgtggaattaggcgcggcggcgaggtcgtcgccggcggcggggaagtgcgcggcggcgagcgtggaggtggagcaggcgaacaccggcgagaaggcggggtacgacccggtgttcgaggtgacggtgcgcaaccggtgcgcgtgcgcggcgcgcggcgtgcgcctccgctccgaggggttcgcgagctccgtcgccgtcgacccgcggctgttccgcctcgaccgcgacgccggcgactacctcgtcggcgacggccgccgcatcgagccctccgccgccgtcacgttccgctacgcctgggaccgcgccttccgcatggcgccggccgccctgctcgacgactgctcctgaaaaaccaaccatcatcgatcgtccactgattgattctctgatcgagattcaagaacaaccggtgataaatgtgtttattagcagcgtgtagtgacagtgaattaaggagtaattagtagtagtatttacttagttgagagtgttcttgggtatttgctggcttgctgctaatggcatcaatggcatgaatgatcattgggcattggcatgtgctgaagaacacaaatcggattcagaaaaaaaaagtgaaaggtggatgaggcttttttgtttttagctgagaagatcaagtgtctcagtttcaggtgacgggaatgtatggtttggttggttgtttgcttcccagtaaaggagcttagtggctaagtcttggattaatttaacccctgtgttcaacttc

SEQ ID NO: 14646 - DNA, 1900 bp, Oryza sativa
  ref <308>: DATABASE ACCESSION NUMBER: AK065206
  ref <309>: DATABASE ENTRY DATE: 2001-12-06
tggctgtatttatcgtctttgtcctcatctttctttcttgctttcctctaccttgactttggcttccccactctctcttcttcttgggaggctgggagctaccagcacaacacaccaaggaagctgagcaggtgcgttgatttcttgatatcatggccaagaggcacctcttgttggtgacaacttgtttgtgggctctgtcatgtgccttgctgcttcatgcttcctctgatgggttcctgagagtcaacctcaacaagaagagattggacaaggaagatctcactgccgccaagttggcgcagcagggcaaccgtcttctgaagaccggcagttcagacagtgatcctgtccctctggtggactacctcaacacccagtactatggggtgattggcctcggctcaccgccgcagaacttcacggtgatatttgacactggaagctccaacctgtgggttccttcagcaaaatgctatttttcgatagcatgctacctccacagcagatacaactcgaaaaagtcgagctcttacaaagcagatggagaaacttgcaaaattacatacggttctggggcaatttctggattcttcagtaaggataatgtgttggttggagaccttgtagtgaaaaaccagaagttcattgaggcaacacgcgaaacaagcgttacctttatcatcggaaagtttgatggaattcttggtcttggctaccctgaaatctctgttgggaaagctcctccgatttggcagagcatgcaggagcaggaactgcttgcagatgatgtcttctcgttttggctgaaccgagacccggatgcatcctctggtggtgagctcgtctttggtggcatggatccgaagcattataagggggatcacacctacgtccctgtttcccgcaaaggctactggcagtttaacatgggggatctccttattgatggccactcaactggcttctgtgcaaaaggctgtgctgctattgtcgactccggaacttccttgcttgctggtccaacagctatagttgctcaggtgaaccatgctattggggctgaaggaatcatcagcacggaatgcaaagaagtggttagcgagtatggagagatgatcctcaacttgctcatagcacagacagatccgcagaaagtatgcagccaggttggtctgtgtatgtttgacggtaaacgctcagtaagcaatgggattgaatctgttgtcgacaaagaaaacttgggttctgatgctatgtgttcagtttgtgagatggctgttgtgtggatagagaaccagctacgcgaaaataaaacgaaggagctgatattgaattatgctaatcagttatgtgagcgtctaccaagccccaatggagaatcaactgtcagctgccatcaaatctcgaagatgcctaatcttgcattcaccattgcaaacaagacatttattcttacaccagagcagtacatcgtgaaactggagcaaggagggcaaaccgtctgcatcagcgggttcatggcgttcgacatacctccaccacgcggtcctctttggattcttggagatgtcttcatgggtgcttatcatacggttttcgacttcggcaaagacaggatcgggttcgctaaatctgcatgaagagtgtatgtagatcactcttcagatcacggagattagcctgtatatttcataagctgaaaccaaacatgtatggttttatgatatatagtagctagtacacggacaaacctctttggttgcttctttctgaagaaaaaagaagaacagacatggatgtatgatctacctgatgtgtataaattgaatgatgcagtctgagaaataatcctctgatcatattgtggattctgaaatatatccgagtttcttttttc

SEQ ID NO: 14647 - DNA, 2033 bp, Oryza sativa
  ref <308>: DATABASE ACCESSION NUMBER: AK065207
  ref <309>: DATABASE ENTRY DATE: 2001-12-06
gctttctcctacgcggccggagagaggaggggggaagagaggatctcgcagagcgccatagcctcggatccagaagcggaattcggtggaggtctcgggcacctggatcgatcggaggaagggaaggcggagcagcggtgatggggaaggcggcggcggtggggacggcggtggtggtggccgcggcggtcggggtggcggtggtgctggcgcggaggcggaggaggagggacctggagctggtggagggagccgcggcggagaggaagaggaaggtggcggcggtgatcgaggacgtggagcacgcgctgtcgaccccgacggcgctgctgcggggcatctcggacgccatggtcaccgagatggagcgaggcctgcgcggggacagccacgccatggttaagatgctcatcacctacgtcgacaacctccccaccggaaatgaacaggggttgttttatgcattggatcttggaggaaccaacttccgcgtcctgcgagtccaactcggtggcaaggagaaacgtgtcgtccaacaacagtacgaggaagtctcaattccaccacatctgatggttggaacttccatggaactgtttgattttattgcttctgcattgtcaaaatttgttgatactgaaggtgatgatttccaccccccagaagggagacagagagagctgggcttcaccttttccttcccagtgagccagacatcaatatcgtcaggaacgctcatcaagtggacaaagggtttctccatcaatgacgcggttggcgaagatgttgtatctgagttgggcaaggccatggagaggcagggattagatatgaaaattgcagcattggttaatgacactgtcggcacattggctggtgggaggtatgcggataacagtgttgttgctgctataatattgggcactggtacaaatgcagcatatgttgagaatgctaatgcaattcctaaatggaccggtttactgcctaggtccggaaatatggtaatcaacacagaatgggggagctttaaatcagataagcttcctctttcagaattcgataaagcaatggattttgaaagcttgaatcctggagagcagatatatgaaaagttgatttctggcatgtatcttggagagatagtgcgaagaatcttgctgaagcttgctcatgatgcagctttgtttggggatgttgttccatctaagctagagcaaccgtttgtactaaggacaccggatatgtcagccatgcatcatgactcgtcacatgaccttaaaactgttggagctaagctaaaggatatcgtcggggtcccagatacttccctggaagtaagatacattaccagtcacatttgtgacatagttgcagagcgtgctgcacgcttggctgctgctggcatatatggggtcctaaagaagctaggtcgggacaagatgccaaaagacggcagtaagatgcctaggactgtcattgccttggatggtgggctctatgaacattacaagaagttcagcagttgcttagaatcaactctaacagaccttcttggggatgatgtctcgtcttcggtggttaccaagctggccaacgatggttctggcattggagctgctcttctcgcagcctcgcactcccagtatgccgagatcgactagctttaaggatgatcttgatgaatgatgaatcaaactccgtttgtaggttctcatttcccccttcaaaatccacataatactcctggctccccccttgaaatcttaccatctttttttggctattctgagggcaaacataagtgcctctgcagcgggatatagctagtatagcgccaatgagtttggaggttttctaatggcataaaacgttggatggcagtagcagactaacagggaaatggaggcacaggcaatttccattcctgttctgtcagattcttttcccccttaattgatgttgagaaccaagatttttttgctctgtattttctcttcgtaataaagaaggggacataatctaattgctcc

SEQ ID NO: 14648 - DNA, 1835 bp, Oryza sativa
  ref <308>: DATABASE ACCESSION NUMBER: AK065208
  ref <309>: DATABASE ENTRY DATE: 2001-12-06
gcgccggtgacttggtcccactgtcctacattgccggcctcatcaccggccgccagaactccgtggccgtcgccccggatggccgcaaggtgaccgccgccgaggcattcaagattgccggcattgagcacggcttcttcgagttgcagcctaaggaaggtcttgccatggtgaacggcactgccgtcggctctggccttgcatcgaccgtgctctttgaggccaacgtccttgccatcctcgccgaggtcctgtccgccgtgttctgtgaggtcatgaccggcaagccggagtacaccgaccacctgacacacaagctgaagcaccaccctggacagatcgaggctgccgccatcatggagcacatcttggaaggcagctcgtacatgaagctggcgaagaagctcggcgagctcgacccgttgatgaagccgaagcaggacaggtacgcgctccgcacgtcgccgcagtggctcggcccacagatcgaggtcatccgcttcgccaccaagtcgatcgagcgcgagatcaactccgtcaacgacaacccgctgatcgatgtctcccgtggcaaggcgcttcacggtggcaacttccagggcacgcccatcggcgtgtccatggacaacacccgcctcgccctcgctgccatcggcaagctcatgttcgcgcagttctctgagctcgtgaacgacttctacaacaacgggcttccttccaacctgtccggtggacgcaaccccagcttggactatgggttcaagggcgcggagatcgccatggcgtcgtactgctccgagctccagttcttgggcaacccggtgaccaaccatgtccagagcgcggagcagcacaaccaggacgtgaactcgcttggtctcatctcctccaggaagaccgccgaggccatcgacatcctgaagctcatgtcctccacgttcttgatcgccctgtgccaagccatcgacctgcgccacctcgaggagaacatgaagaccgcggtgaagaactgcgtgatgcaggtggccaagaaatccctgagcatgaaccacatgggcggcctccacatcgctcgcttctgcgagaaggacctgctcaccgcgatcgaccgcgaggccgtgttcgcctacgccgacgacccctgcagcgccaactacccgttgatgcagaagctccgcgcggtgctcatcgagcacgcgctcgccaacggcgacgccgagcgcgtcctggagacctccatcttcgccaaggtggccgagttcgagcagcacgtccgcgccgcgctgcccaaggaggtggaggccgcccgcgccgccgtcgagaacggcaccccgctcgtccccaaccggatcaaggagtgccgctcgtacccgctctaccggttcgtgcgcgaggaggtcggcaccgagtacctcaccggcgagaagacgcggtcgcccggcgaggagctgaacaaggtgctcgtcgccatcaacgagcgcaagcacatcgacccgctgctcgaatgcctcaaggaatggaatggcgcgccactgccactctgctgaacagaaatggaatactaaaaaaaatgcaaaacaagaagacgtatagcaacacaaaactgaaagatagagagcatttcgagagtgtgaatgttttctactatgtctagatgaacatggtgatgatactattttacggttctttgtagttaacttgatgttactgttgctgtttcagcttctgcggttgccataacctgcagttccgcatggcctggcacgcagctttctgaaacttttggtgctgtaaatttgtataagttgggggactaaagtaaattattttgtttt

SEQ ID NO: 14649 - DNA, 1304 bp, Oryza sativa
  ref <308>: DATABASE ACCESSION NUMBER: AK065209
  ref <309>: DATABASE ENTRY DATE: 2001-12-06
gaccactatggccgccgctgccagactcgtctccaccactctcgcgcgctcctcctcctccctcgccgccgccgcgcgccgccccgaccttctcgcctcctcgccgcgtggtttttcaagcatggcagattcaattcaaaggagcggctctggcgatattacgcgggttttattctgtggaccttattggcctgcttctaccagcttcaccaaggagtatttgcagagctatccatttattcaggttgatgaagtaggtctagaggaggtacctgatgttattcaaaattaccacttatgtgtagtgaaaaatcgacgtctagactcagataccattgccaaggcaagtcagatgaagatcattatgcaatatggtgttggattagaaggtgtcgatgtaaatgctgctacagaacacaagattaaagttgcacggatacctgggagtacaacaggaaatgcagtctcttgtgcagaaatggcaatctatcttactctgggtgtcctaaggaagcaaaaggtgatggatactgctgtgaaacgtaaggacctgggcattccagttggagatacaatatttggaaaatcagtccttatcttgggatttggagccattggagtagaaattgccaagaggctaagaccctttggagtaaaaattcttgctaccaaacgaaattggtcatctgatacattgccatgtgatatagatgaattggtcgataagaaaggtggaccagaagatatgtatgaatttgctggagaggctgacatagttataacatgcttgctattgacaaatgaaacagttggaattgtggatcataagttcctctctgcaatgaaaaagggatcatatctggtcaatattgctagaggacgtctactggactacgacgctgtgtttaatcacctgaaatcaggccatttaggtggtttgggcattgatgttgcttggacggaaccatatgatccagaggatccaattctgaagttctcaaatgttattataaccccacatattgctggagtcacggaatactcttacaggacgatggcaaaggttgttggtggtgttgccctgaagcttcattcaggggagccaatcactgaagtggaatttgtgaactaagctcaggaaatgcgtggcacagatgtgccattattatggattgattcaaaaagatcaaaaataggtttgttgtagtgtcaaaattgctttgcccctaggtgaataattgatcattgaatcgcctatccttgcaaggatataataataagatgttgctctgtaatttgttatg

SEQ ID NO: 14650 - DNA, 1480 bp, Oryza sativa
  ref <308>: DATABASE ACCESSION NUMBER: AK098908
  ref <309>: DATABASE ENTRY DATE: 2002-08-28
ggaaccaatccaattccgaacaagcaaggcaccaaatccccccaccatggatcaccgcctcctcctcctcggcctcctcctcctctccccggcggtggccgccgcctcagtccccggcgaggaggagccgctgatccggcaggtggtcggcggcggcgacgacaacgagctggagctgaacgcggagcgccacttcgccagcttcgtccagaggttcgggaagtcctaccgtgacgccgacgagcacgcgtaccggctctccgtgttcaaggccaacctccgccgcgcgcgccgccaccagctgctcgacccctccgcggagcacggcgtcaccaagttctccgacctcaccccggccgagttccgccgggcctacctcggcctccgcacgtcgcgccgcgccttcctgcgggggctcggcgggtccgcccacgaggcgcccgtcctccccaccgacggcctccccgacgacttcgactggagagaccacggcgccgtcggccccgtcaagaaccagggatcgtgcgggtcgtgctggtcgttcagcgcgtcgggggcgctagagggagcgaactacctggcgacgggcaagatggacgtgctctccgagcagcagatggtcgattgcgaccatgagtgtgattcatcagaacctgattcatgtgatgctggatgcaatggtggattgatgactaacgccttcagctatcttttgaaatccggtggccttgagagtgagaaggattacccctacactgggagggatggcacctgcaaatttgacaagtcgaagattgttacttcagttcagaacttcagtgttgtctctgtcgatgaggatcagattgctgccaaccttgtcaaacatgggccacttgcaattggcatcaatgctgcgtacatgcaaacatacattggtggtgtttcgtgcccgtacatctgtggcaggcaccttgatcacggtgttcttctcgttggctacggcgcatctggttttgctccaatccgcctaaaggataaggcctactggatcatcaagaactcctggggcgagaactggggagagcatgggtactacaagatctgcaggggctccaacgtccgcaacaaatgtggcgtggattctatggtctccaccgtgtctgccatccacacctcaaaggagtagattctgatcagtagtcccccgaccatcctgtggatggttcacagttggtgattctgatattatatataagctagaactacgaaatatacttagtttatgctccatctgcgctgttattgcagttatgataagcagcgatgatgtgaagctgcaactgaatgtttgtcctaagttatatgcttggtttgctacgcaatgctacacgctatttggaggtagctttaagtattatcgccattcacgaacttgtatttttactattaccaatcttttgaatggtctgtattatatgcatgtggtctgtttacatgg

SEQ ID NO: 14651 - DNA, 743 bp, Oryza sativa
  ref <308>: DATABASE ACCESSION NUMBER: AK065210
  ref <309>: DATABASE ENTRY DATE: 2001-12-06
gagagctctcgaggaggaggaggaaggaatcatcaaggcaaccgatcaaatcgtcgatcgattttccatggcgcggccggggcacggaggcgttcccggacctgggggcgcagtgcgacagggaggactgcaaccagctcgacttcctccccttcgactgcgacggctgcggcaagacgttctgcgcggagcaccggacgtaccgggaccacggctgcgcggcgcgccgcggaccagggccgcaccgtcttcttctgcaaggcctgcggcgacgccatctagcggcgggccggggacgggggcggggacgacgccgccgtgctggaggcgcacgcgcggtcgcggcggtgcgacccggcgaggaagcgcaagccgcggtgccccgtgccgcggtgcaaggagacgctcacgttctccaacacgagcgggtgcaaggggtgcggccagaaggtgtgcctcaagcaccggttccccgccgaccacgcgtgcgccggcgcaggcgccggcgcggcgtcgaaggccgccggcgccgcggccgccgcgaggagcgccgggcagtgcgggcgcgacgcgcagaagaaggagggcggcgggtggaagctgccgcaatcggtgaggaacatgaagattttctgacttgtcacgccacggtcgccggcgcacgcggcgcgccgcggtttctttcgtaggaggacaagcaaagaaagtgccaaagagcttgccgaggaggcatttgatctgtc

SEQ ID NO: 14652 - DNA, 1746 bp, Oryza sativa; identical to SEQ ID NO: 14623
  ref <308>: DATABASE ACCESSION NUMBER: AK098909
  ref <309>: DATABASE ENTRY DATE: 2002-08-28

SEQ ID NO: 14653 - DNA, 3196 bp, Oryza sativa
  ref <308>: DATABASE ACCESSION NUMBER: AK065211
  ref <309>: DATABASE ENTRY DATE: 2001-12-06
ggttgttctaaaaaaaagttctgaaaaaaaagtgagagaccctcaatccctccccaaccggaacacccactccgacgagaacgacatggacgccggcggcgaggaggagaagcaggagcgccaccgggttgatggtgcttcgccttccatggtcgccctccgctccgacgtcctccacgccaattgctgacgctgaagagaatttgggtgaggttgaagtgcgtgaggcccatatagccaaatccttgtacttcataagggttggggagaaggtccttggagggaagtctcataatcaggacacttctgaattggtcacactgtcatgcaagaatatgataaaagatcacatggtattgacttcctcaatcgggactttgttgtccgaggtaaattgatatacatgctcggtgtctgtatgaagtgcatggcaatgcatccggaagcatcagctgttgccccaggtcttcttgatatgatcagatctagagctgtttgacaacatcctgaagcatatgtcagaaggtctgtgttgtttgcagcttcttgcatattgatagcgctgcacctgttgtatgtctcatcagctcttatagaaggaaatcaggacattctacatacacatatgggttcttcatgttgcagaagctgatcctgatacagaatgcacatatcagccattatgacctgtttgcaacttcgttctgagatcttcagacatcacaagcactgaatcggtggatcacagcatggccagcagctgcagggcgagaggaggaggaggaaggtgcatgctccatggtgaccaccagccacaggacagggcactcccggagcgttggattagccgcgagggacgatccaacggccgagatgcgtctggtgcagatgggtatgtgctgcctgcggctccattctgagatggcccttcagacatcacgagcactggaatcggcggatcacagcaaagccagcggaagcagggggagggatccgtggggaccaccagccacaggatgggggcactcctcgagcgttggatcagccgcgagggacgaaccgacggaggagatacgtccgtgcagggggagcgatctgtggggaccaccagccacaggatgggggcactcctcgacgttggatcagccgtcgacgatccagcaaaacaaaggtctgctatgggtaacagccttcctgtagaatcaaagttcactgatgaaaaagagaatgacagaattaagtatgttgtgtcgtctatgcaaggatggggtgagaaaatggaagatgctcatgcagctattctaaatcttgatgataccatgacgtcattctttggtgtttatgatggccatggaggagctgaagtagcatcatattgtgcaaaacgatttcatattgagctttgcaatcatgaagactacgacagcaatctaagtaatgcgatgaggagtgcgttttacagcatggatgaggacctgcaactgtccgatgcttggagggagttagttattcctcgtaataatggatggatgtattttctcaaggctgcagcttgtacaagcatttgcaaggtatcttttaaaccctgaacgtcttttaatatccatatattgaaggtactcaaaactgtatttgttggacagtgcatattgtatctatgaaaaaggaaatggaagaatgtgtgtgatatcgagactattgttctttcttgagatgtactttggagttggaagagatatgtttaaccctaaccttgactaattgctcctattaaaaaaggttcagttagttacatatcaattgtctggtttactgcgttggaggccaacaggttcttaagttcacattgcaccttggttcttatcatactgtggtactaccctaaattgaggtattgtttgcggcatctcttctatggtaatctctttcatacactggtttggctttcagaaatgtttttctttgtctggtggctttggtgagctatttcttgcttgacttgtatttctaactatgttgggattccctattatgtcctccaattcatttcttctttttccaggcaacttatactgagccagcatatgaagggagcacagcatgtgtggttgtcatcagaggtaaccaattgattgttggacatgctggtgattctcgttgtgtactctcaagaaatggtcaggccagtgcattatccgtcgatcataaaccagacagtgagtctgaaagagagagagttcagaatgcaggaggagtagctgttgggcatagttatcgtaaaataatggggaggtgggtaaccaagaaacaatggggctttactgattttaagggaagagtatcaatctcaagatcaattggggactttgcttgcaagaagaacgaacgtttacctcctgaagatcaaatgctgacatgtaatccggacatcctgactatggacataactgatgacatggagtttcttgtgatagcaactgaaggcctctggtgcaacatgacaaatcaaaatgtggttgatcacacacatgaccgtcttttggagggtgcagaagcgcgtgtcatctgtgaggagcttgttcagtttggcttgccatcgggcgacaacacgaccgtcatcctggttctgttcaagcccggcgcctaccctgctgttccgccggtcgacaccgacactgacactgacagccacaccggcgatgatgtcgacaacaacgaccccgccaacgaggttgatcccactgccaatgccgggtctgatgacagcaacaccagcgatgaggtcaaggtcgacgccactgccactgccgtcggcagcagcagtaccaccgccgtggctgccgacgaagccaccgtggtgtcgttgtcgactgcaaccatcaccattgtggacaactacttcttcattaacaccagcgaggaggttgatcccactgccaatgccgggtctgacgacagcaacaccggcgacgaggtcaaggtcgacgccactgccagttccggtctttccgattgggaacttatatattctgaattctgatcctgttagtggtagacgagtaatagcaccgacccgttgatagtagtagtttggttgtgctactttgctagactgagacaccttgaattaattgtttacgaatcatctctagcctttttagttctgaaggtgattgatctagtgatgcttttgttg

SEQ ID NO: 14654 - DNA, 2203 bp, Oryza sativa
  ref <308>: DATABASE ACCESSION NUMBER: AK065212
  ref <309>: DATABASE ENTRY DATE: 2001-12-06
ggccaacccaacccaacccaatccctccacaccccccgcctatgcacgcccgccgcgcgtggcgccgggcggcggggtgacgtgacgtcatctcctcgtcggtcggcgtcccatgaggcggagcggcaacggcggcgcggcgaagaagaagaagaagaggagcgcgagcgcggcgtccgagaggaggccgcgggcggacggcgggatgcgcatcgtggtgccgctgcagggggtggtgcagggacgcggggggctcgtgctcggctccctcatcccctgcgccctcttctacttcttccagctctacatcaagcgcaaccgcgcctcgccgccgccgccgcccggatcccccacggccgcctccgccgcggcggtgtcgccgatccaccgctcgctctcgcgcggcctcctcgccccgcgcgccgcgctcccggccatctccgcgcgcggcgcctccgtccgcgacgacgactcgctctactacgccggcctccgccgctgcgccgccgacccctaccacccggtcaccaacccctccggcatcatccagctcggcctcgccgagaactacctgtcgctggatttggttgggagatggatggaggagcacgcggcggaggcggcgtccatggcgggcggagaagacgaggacgagagggagctctccatcagaggcctcgccgcctaccagccgtacgacgggatacttgccttgaagatggctcttgctggatttatgaggcaaatcatgcaaggatcagtgtcctttgaaccatctcaggtggttataacatctggtgcaactcctgcaatggaaatactgagtttctgccttgctgatccaggaaatgcatttcttgttccatcaccatactaccctgggtgggacagggacataaaatggcgcactggaattgagttgatacctgttccttgccgtagcactgacaacttcaacattagtatcactgctctagaaatagcctacaatcaggcaaagaagcgaggaataaaggttcgtggggttctcatatccaacccaaataaccctacaggaagctttgtgcccaagcaaacactgcatgatcttctagagtttgctgcagagaagaacatccacttgatatctgatgaagtgtttgctggctcaacatatggatctggaaaatttgtaagtgtggcagaggttgttgatgatctagaagactttgacaaaggcagggtgcacataatatatggactctcgaaagacctatctcttgccgggtttcgggttggggtaatatattcctataatgaaagcatcgtgacagcagctgctaagattgctaggttctcgtctgtgtcaactccaacacaacgcttgcttgttgccatgctctcggaccaaaagttcatttcagattacctaaaagttaatagagagagattgcgcaagatgtaccatttgtttgttgatgctttggatcaagtggggattgagtgctacaagagcagtggagggttctactgctgggcagacatgagcaagttcatcaggtcttacagcgagaaaggggagcgcaagctttgggataggttattggaggaggcaaaggtcaatgtcactccaggttcatcttgccattgcatcgagcctggatggttcaggtgttgcttcacgacattgagcgaacatgatatccctgtcttagtgcaaaggctcaggacgattacagatagccataaaccgaatcattgaaacaccaggattatcctctcgagcttgtcatggaatggaataactgctttgccaggtactccacagagaatccagggggcatagaggaaaaagatggtataatcctctttaccatgggaactactcctaacaaccagtaggagcaatcgtacgcctttgctggaacaaagacaaatcaggaccatgtttgtattgatctgttgaagaacaacagttcttttgaaagttgttgctgagttgcttttattgatctgtaggtctcagctgcttccattgtaggggtttcagatagaaaattgcccatctgttgataggttaaatcaagcataagttcattctctctgtaggtccattgtgacataagctagtgttgggtttttgttttgtgagtttgtaaatcagttcctgcttgtgccagggttttggacgcgactcatatgttgtcatcaaaattatttattt

SEQ ID NO: 14655 - DNA, 2360 bp, Oryza sativa
  ref <308>: DATABASE ACCESSION NUMBER: AK065213
  ref <309>: DATABASE ENTRY DATE: 2001-12-06
acggaggccgacaaatccgctgctcgacggcatcttcgcctcctcccccacccgcaccctcttccacctctcgcgctcacgccatttatactctcctcctcctcctcctcctctactcctagcagcagcgttggttggtgagctgaggcatatggccatggctgccacgtcccgcgcgccgtccacgctggccccggcgtcgttctccgccgccggcggcagcaggaggcggcaccggtgcccgaatcccagggtgcgggtgggggtgggggtgcggtgctcgctcgacagcaacgtctccgacatggccgtcaacgctccgaaaggattgttcccgccggagccggagcactacagggggccgaagctgaaggtggccatcataggggccggcctcgccggcatgtccaccgcggtggagctcttggaccagggccatgaggttgatctgtacgagtcccggccgtttatcggcggcaaagtcggttcttttgtggataggaaagggaaccatatcgagatggggctgcacgtgttcttcgggtgttacagcaatcttttccgccttatgaagaaggttggagctgataataatctgctagtgaaggagcatacccatacatttgtaaataaaggaggcacgattggtgaacttgattttcggtttcctgtgggagctccgttacatggtatccaagcattcctacgaactaaccaactcaaggtttatgataaagcaagaaatgccgttgctcttgctctaagcccagttgttcgagctcttgttgatccagatggtacattgcagcaagtacgggatttggatgatgtaagtttcagcgattggttcttgtcgaaaggtggtactcgagagagcatcacaaggatgtgggatcctgttgcctatgctcttggtttcattgactgtgataatatcagtgcacgttgcatgcttaccattttcactctgtttgccacaaaaacagaggcatctttattacgcatgctaaagggttcacctgatgtttatctgagtggtccaataaagaagtacataacagacaggggtggtaggtttcacctgaggtggggatgtagggaggttctctatgataagtcacctgatggggaaacctatgttaaaggccttctcctatccaaggctacaagtagagagataatcaaagcagatgcatatgtcgcagcttgtgatgtcccggggatcaaaagacttttaccttctgaatggaggcaatgggatacatttgacaacatcttcaagttagatggtgttcctgtagtcacagtacagcttcgttataatggatgggttacagaacttcaagatttggagaaatcaagacaactgaaaaaggcagttggcttggataatcttctctacactccagatgcagatttttcatgtttttcagaccttgcactttcatctcctgctgactactacattgaaggacaaggttccttgatccaagctgtgctaacccctggcgatccttacatgccattgccgaatgaggagataattagcaaggttcaaaagcaggtcttagaattgttcccgtcatcacaaggcttggaacttacatggtcgagtgtggtgaaaatcggtcaatcattgtaccgcgagtcaccaggaaatgatccatttagacctgatcaaaagacaccagttaaaaacttcttcctgtctggctcttacacaaaacaggactacattgacagcatggaaggggcaactctctcaggcaggagaaccgcggcctacatctgtggtgcaggagaggagctgctcgccctccgaaagaagctcattgtcgacgacagcgagaaggccaggggtaaggtcgaggcccttcagacaagctgagcttcctcaaatgacacatgctggagtgagtggattgctatgcccaaaacaaaaacagcttcctgggtgtagtaggcgatttccgcagcgactctcatgtaaatcctacttgattgagcatttaggtccaatctgctgctgccctttttgccttgacacgatcgttcgttcgcccgtcaatggtgtgttcttcgttattgtgaatttgtgattgggaaccaaaggtggcatacgggattacatcaggcagcgtgtgttttgttcagcttaaccgatcattgaacccattgatgatgatgatgatgtttatatagtgcacacatcacttaaaatcttgtgagagatggtgcttaaatttggtgagtactgctgtactttataaggcagctttagagtttttataaggagtatattttgaacattgtgagatgagaaattttagatacttaaaagtacgagttacttaaatttt

SEQ ID NO: 14656 - DNA, 918 bp, Oryza sativa
  ref <308>: DATABASE ACCESSION NUMBER: AK065214
  ref <309>: DATABASE ENTRY DATE: 2001-12-06
gtccggagaggaaaggaaagctcgggatcggagcagtagtagtactaggacgactcaacgacgacgatgcttcgccgccgcggcttctgctgctgctccggcgcacccgccgccgccgccgccgccttgctcctactggccgtggcggcggccgccccccgcgccgccgggttccacctcgggggcgacgagagcgtcctcgtgcggggcatgctcgccgcgatccgccgcgagcaggccgaggcggaggacgcggcgcgcttcgccgtcgcggagtacaacaagaaccagggtgctgaattgggatttgcacggatagtgaaagccaagcgtcaagttgtgactggtaccttgcatgacctgatgttggaggtagttgattctggaaagaaaagcctgtatagtgcaaaggtatgggtgaagccgtggctagattttaaggcagtcgtcgagttccgtcacgttggggactcccagtcacagtcggccactgctgctgatgataacgctgggcaagatactgctgatcccactgtggcatcaaggaacgacctgcacaacactgagaacaataaagtctctgttgtcctgtcaaccttttctcagacatactcggtgtgaatctagctccatggagaggatatggaagacttgagcttctgagagctagctgtcagtaatttgtgaagtaaagtagctgttatccttttgtgaagttttccccactgttatggaatgatgtctagatcgtaatatgccgttgagcagacatgagtttgacatctggagtgtatatttgttgctgcaaactgcaaagtgaacactcccatgtatattccatacctttcgttcccatgcatgtatataaggcattactgctaccgttgtatggtatacccgctgcatgtgtttgcattt

SEQ ID NO: 14657 - DNA, 3186 bp, Oryza sativa
  ref <308>: DATABASE ACCESSION NUMBER: AK065215
  ref <309>: DATABASE ENTRY DATE: 2001-12-06
gtgatgccatcggagagcgcgccgagaacacaacctccgcgacagcgacgcgctccctccgccgccgccgccgccgccgctgccacgcgaaaggctccgtcctcgtcctcgccggctccgcgggaccctgcttgatgctcgccgtctgcgcgcggcacgggcccgcgaagcttccgccgccgccgccgccgctcgccggggagcgggcggccgcatgggtcgtcgggaggtggtggtggaggccggcggcggcggggcggcgcggcgtcgtcgccgcgcgggcgtcgttcttcagctcgcggatcgggctcgactcccagaattatcacacaagggacctgtcccaactgttgtgggtgggtccggtgcccggcgacattgcagagattgaggcatactgccgcatattccgtgcagctgagcagctccacactgcggtcatgtctgcactctgtgatccagagacaggggagtgccctgtccgctatgatgtgcaaaccgaggacctgccagtactggaggacaaggtcgctgccgtgctcggatgcatgctggcattgctgaaccggggccggaaagaggtgctctcaggtcgatcaggtgttgcgagtgcatttcagggatctgaggacagcacaatggataagattccacctctcgccttgttccgtggggatttgaagcgatgctgtgagagtatgcaggttgcacttgccagctaccttgtgccaagtgaggcccgagggttggatatatggaggaagctgcagaggctgaagaatgcctgctatgatgcaggttttccaagggctgatggtcatccttgtccaactttatttgcgaattggtttccggtgtacttttcaactgtgccagatgattcattatcagatgagttagaggttgcattctggaggggagggcaagtcagtgaggagggactggaatggttattgttgaagggattcaaaactattgttgatctacgggaggaagatgttaaagatgatttgtacctttcagcaattcatgaagctgtctcattgggaaagatagaggtggtgaatttgcctgttgagattgggactgcgccctctgctgaacaggttcagcgattcgcggaaattgtgtctgatagtgcgaagaaacccatttatcttcatagccaggaagggattagtaggacatctgcgatggtttcgagatggaagcagtacgtcactcgtgctgagagactggctactcagaaccgttcattaaatgggaatggtaagcatgtgaggaatgatcaaacagaacagctcacaaacagcccaggtttctcctcagaaggtagcgaaaacggtacacctctggaatccgatagaaccatggagggggaaacatgtgacatagacattgaaacagcacgtcataatctggaaatcactaattcccttcccagtgaacaaagtactgaacaaggtgaactgcatggcaccaggacagaacttcagtcaaactttagactagagagtaatcctcttaaggcacaatttccttcttgtgatgttttctccaaaaaggggatgactgacttttttagaagcaaaaaggtatatccaaaatctgttttaaaccctcggagacggtcgaatagcttgttggtctcaaggagaaaacaaagtctcagtgctgaacaaaatggagccattgactatgaagcagccgaatttaaagttctaaaaagttcgaatggagcatcgttcgataatgattatattctatcagttgcttcaggtattactaatggaaaaccatccaacaatggagcctccacatctgttgaggacagggaaatggaaacctcagttgtaacagttgatcctagaacatctgataccagcaattctaatggcaatgctccacttggatcacaaaaatctgctgaaaggaacggttctctttatgtggagagagaaagatcagatcatgttgatggaaatatgtgtgcatctgcaactggtgttgttagacttcagtcaagaagaaaagcagagatgtttctagtacgcactgatggattttcctgtacaagagaaaaagtaactgaatcatctctggcttttacgcatcctagcacccagcagcagatgcttatgtggaaatctcctccaaagactgtcctactattgaagaaattaggtgatgagctcatggaagaagctaaagaggttgcttcatttctgcatcatcaagaaaagatgaatgttctagtggagcctgatgttcatgatatatttgctaggattcctggttatggttttgtgcagaccttctatactcaggataccagcgaccttcatgagagagttgatttcgttgcttgcctgggtggagatggcgtcattctgcatgcgtcaaatttatttagaacttctgtaccacctgttgtctctttcaatcttggatctcttggatttctgacttcacacaatttcgaaggtttcagacaagacttgagggctgtcatccatgggaacaatacacttggagtttatataacccttagaatgcgtgtacgatgtgagatctttcgcaatggaaaagcaatgcctggaaaagtatttgatgtgctaaatgaagttgttgttgatcggggttctaatccttacctgtccaaaattgaatgctatgagcataaccatttaatcacaaaggttcaaggtgatggggtgatagtagcaacaccgactggcagtacagcatactctactgcagcaggaggctcaatggtccatccaaatgtcccgtgtatgctgtttactccaatctgcccgcactcgctatcatttagacctgtcatccttcctgattctgctcgtcttgaattgaagattccagatgatgcaagaagtaacgcctgggtatcatttgatggcaaaaggaggcagcaattatcaaggggagactctgttcaaatatccatgagtcagcacccgctcccaacagttaataaatctgaccaaactggtgactggttccgcagcttgatcaggtgcctgaactggaacgagcgactggaccagaaggcattataggcattagaggctagttttcccttgtacatacatacatagccctacacatatagatacactttttaacaggtgcaatggctaatcaatatcgatagtatatagttcc

SEQ ID NO: 14658 - DNA, 2525 bp, Oryza sativa
  ref <308>: DATABASE ACCESSION NUMBER: AK065216
  ref <309>: DATABASE ENTRY DATE: 2001-12-06
gaggagtcggagtcccccacgcttcgtcctctgcttcccacgcgccacaaatttcttcgccttcttcccacgcaacgcctcgccggagaaacaggagacgagtagtagacgactagtgcgagccaagggcatggcgcggcagcagcagcagcgggaggaggagagggccccaatgggcgcggcccagcggcggctgcgcgccgtctccggccacctccagccgccgacggagtccggcggcgttgacctcgccgccaaccccaccgccggcgagtacgcgcacgtgcagggctacagtgctgtactccctgagaagttgcaaactggaaagtggaatgtgtacagatccgcaaagtcacctcttaagttaataaatagattccctgataacccagacattggaacgcttcatgataactttgtgtatgcagttgaaacctttagggactgtagatacctgggcacaagagtctgtgttgatggaacagttggggactacaaatggatgacatatggagaagctagtacaagccggactgcgataggttctggtcttatttaccatggaatacctgaaggtgcgcgcattggtttgtattttataaacagacctgagtggaccatagttgatcatgcctgtgcggcatattcatatgtatccgtgccactttatgatactctaggtccagatgcagttcagttcattgttaaccatgcgacagtacaagctattttctgtgtgcctcaaacactaagcactctactaagctttataactcaaatgccgtgtgttcgccttatagtggtaattggtggagacaatgcaaatatgccatctaccccaacagctactggagtggaaattataacttactccagactacttagccagggaaggatgagttctcaatcttttcgccctccaaaacctgaagatattgccactatttgttacactagtggcactactggcacaccgaagggagttgttctttctcatgggaatttaattgcaaatgtagcaggatcaagcctagtcattaagttttacccatctgatgtgtatatctcatatctacctttagctcacatctatgagagagttaaccaggtctcagtggttcactatggtgttgccattggtttctaccaaggggataatttgaagctgatggatgatctggctgcattgagaccaacagtatttcctagtgtgcctcggctatataatagaatttatgctgcaattacaaatgctgtcaaggagtctggagggttgaaagaaggattgtttcatgctgcatacaatgctaagaggcaagcgattattaatgggagaaatccgtccccaatgtgggacaggttggtatttaacaaaataaaagctaggcttggtggacgtgtgaggcttatgacttcaggcgcttctccattgtcagctgatgtaatggaattcctaagaatatgttttggtggtgaagtactcgaaggatatggaatgacagagacatcatgtatcatctctgcaatgaatattggtgataggttaattggtcatgtcggatctccaaatccatcttgtgagattaaactagtggatgtcccagaaatgaattacacctctgaggatgaaccatatcctcgtggagaaatctgtgttaggggacctacgatattctgtggttactataaagacgaaatccaaactagagaggctgttgacgaggatggttggttacacactggagacataggtttgtggatgcctggagggcgtctaaaaattatagataggaaaaagaacattttcaagttagctcaaggagaatacatagctcccgagaagattgagaatgtctatgctaagtgcaagtttattgcgcagtcctttatatatggtgatagtttaaactcttctttggttgccgtagtagcagttgaaccagatgtgttgaaggcttgggctgcatctgagggaatccagcacgaggatttaagacagctttgtgctgatccgaaagcaagatctgctgtcctggctgagatggactctattggaaaggaagcacagctaagaggttttgaatttgccaaagctgttacccttgttgctgaacctttcacattagaaaatggtctcctcaccccaactttcaaggtcaaaagaccgcaagctaaggcatactttgcaaaagaaatcgcagatatgtatgcacaactgcgccaagcagaacagataaaacctaagctgtaactacccgagtgacaatcggagtaaaagttctagcaacaaactacaaatgactggcttggtatagtgaaggcaactgtgaatgaactctgttggatatgtccacgaatgcttgataatcatctaataggatgatcaggtaaaagaatagcctgttttatgtacatctgtaagatgaaatgaaaaaagatgtagacatgttaaatgtcatatatatgaatccattgaatttcacctgactatcataggaatataaggtaaaactttccctctt

SEQ ID NO: 14659 - DNA, 1744 bp, Oryza sativa
  ref <308>: DATABASE ACCESSION NUMBER: AK065217
  ref <309>: DATABASE ENTRY DATE: 2001-12-06
gtcagcaacccttcttcttcttcttcttcttcttcttcttcctctgatcctccattgctgcaaaagaagaagaggtagacgaaggaggaggagatcaggtgatcatggggactcaggtggcagataactacccaccggccaaggatggccggagcgcgcaggagaaggcgatcgacgactggcttcccatcacgtcgtccaggaacgccaagtggtggtactccgccttccacaatgtcaccgccatggtcggcgccggcgtcctcagcctcccctacgccatgtccgagctcggctggggacctggcatcgcggtgctgatcctgtcatggatcatcacgctctacacgctgtggcagatggtggagatgcacgagatggtgcccgggaagcggttcgacaggtaccacgagctcgggcagcacgcgttcggcgagaagctgggcctctggatcgtggtgccgcagcagctcgtcgtcgaggtcggcgtcaacatcgtgtacatggtcaccggcggcaagtcgctgaagaagttccacgacgtgctctgcgagggccacggctgcaagaacatcaagctcacctacttcatcatgatcttcgcctccgtccacttcgtcctctcgcagctcccaaacttcaactccatctccggcgtgtccctcgccgccgccgtcatgtcgctcagctactccaccatcgcgtggggcgcgtcggtggacaaggggaaggtggccgacgtcgactaccacctgcgcgccacgacgtcgacggggaaggtgttcggcttcttcagcgcgctgggcgacgtcgcgttcgcgtacgcggggcacaacgtggtgctggagatccaggcgaccatcccgtcgacgccggagaagccgtccaagaagccgatgtggaagggcgtcgtcgtcgcctacatcatcgtcgcgctctgctacttccccgtggcgctcgtcggatactgggcgttcggcaaccacgtcgacgacaacatcctcatcacgctctccaggcccaaatggctcatcgcgctcgcaaacatgatggtcgtcatccatgtcatcgggagctaccagatctacgccatgccggtgttcgacatgatcgagaccgtgctcgtcaagaagctcagattccctcccggcctcacgcttcgcctcatcgcaagaacactctacgttgcgttcaccatgttcatcgcgatcaccttcccgttcttcggtggattgcttgggttcttcggtggattcgccttcgcgccaactacttacttccttccctgcatcatgtggctagcaatctacaagccaagaaggttcagtctctcatggttcaccaactggatctgcatcattcttggagtgatgctcatgatcctgtcaccaatcggaggactccggcagatcatcatagatgccaagacatacaagttctactcgtagattacatgttcatcatagtaatctcatgtggctgcaagttcaagttctactcataggcacacatgatgaaaccagttactgcaaaagttttttttttagccaacaaaggaagaagaaagttcaacaccaagttcatacattgtcactacgacgatgatcttttgagacgtgtcatgcatgcatcagtcgttaattatgtgacttaattaaaaacaaagaggttgtgtttgtgcattgtcgctgggttaatcatactgtgtttttatatttcaatctactattatattgtaggctgg

SEQ ID NO: 14660 - DNA, 2803 bp, Oryza sativa
  ref <308>: DATABASE ACCESSION NUMBER: AK065218
  ref <309>: DATABASE ENTRY DATE: 2001-12-06
tcggtgccaaactgccaatattctctctgccaaacaaaaaaaaaggaaaaaaaaccaccgcttttcgcagtgcgcttcttctctctccctctctgctctgctcttcctgagctccgcggcaaggaagcttctggaaggttctgcgggatgacgacgagcagctggggtggtggtggtggtggtggcggtggcgccgtgcggctgtggtgctgcggcctcctcctgatgctcctttcaggcggaggcgggggcggaggcgccgccgcgcagaggcccccggcctacaagaccctctccggtaacgcgcccatcgtcatagctgaaggtggcttttcaggagtgtttcctgattccagcaaaaatgcctacgtttttgccttgtcttctacctcgggtgacaccgttttgtggtgcaatgtgcaactaaccaaggatggtgtcggaatttgcctccgggatttacttatggacaactgcaccagtataagccaagcttaccgagcgggaaagaaggcataccttgtcaacggcgaagaaaaaaaaggatggtttcctattgactataccatgtcttcgctgcaaagtgttatcttaacacaggcaatttggtctcgcaccgacaagtttgattttgcattccttcccattcttcctgttaccaatgtgatagatttggccaagccatcttctgtttggctgaatattgagcacgatattttctacagacagcatggtttgaatatgacaaaatacatcctttcaattccgaagggtggttctgtgcagtatatctcatcacctgaattgggttttctccaaagtatatcaggaagagttaatcgcaaaacgaagctagtgtttcgttttcttgatgcaaccagttctgatccttcttcaaaccaaacatatggttctctgttgagtaatttgacatttattaagactgttgcctctggtataatggttcccaaggagtacatttggccagtgacaactaataactatattcagcctgccaaatcaattgtcagagatgcccacagtgcaggtttagaaatatatgcttctgactttgcaaatgatagaattattccgtataattacagctatgatccgttggaagaatatttgcattttgttggtagtgataacttctctgttgatggagtattatctgagttcccactcactgcagcagcggctattggttgtttcactaatttgaatgtaagcagtaagacagatcatgggagcccattaattatctcgcacaatggtgctagtggagactacccagactgtacggatttggcttatcagaaagcggttgatgatggcgccgatgtcattgattgttccattcagatgaccagtgatggagttcctgtatgcatgagttcaattaatctgtttgagaccacgaatgttcagagaacccctttcagcaatcgtgcttctatctttaaagatattcagcctactccaggaatcttcacattcaatctcacttgggctgatattagcagtagcgatttgagacccaagatatcttccccagagagtatatattatcttgtaaggaacccagtgcacaaaaatgcgggaaatttcttcaggttatctgactttctaacatttgctaaggataaagatttgtctggcatcatgatcatcataaagaatgctgtatttatggcaaattcattaggatttgatgttgttgattctgtaaccaaagccttaagtgatgctggctataataatcaaactaccaaagccaaggaggttatgatccagtcagaagatagtgctgttcttgtcaacctgaagcagctggaaaccaaatacaagcttgtctacactctcccatcaactatcggggatgcttctgcttcctcactggtagatgtgaagaaatttgctgatgctgtcattgttgacagggaatctattttccccgagagccagggctttatcatgaaggaaacaaatcttgtgaaagatctccgttctgctgggctagctatctatgcacaggtgttccggaatgagtttgtatcaccaccttgggatttcttttcagatgtaacagtggaaatcaatagctatgtccagtcagttaatattgatggcatcataactgattttccgaaaacagtcagaagatacaaaatgaactcctgtaccggtctgggagttaacatgccttcatacatgaatcctgcggaaattggcggcctagcgcagctactcaacggcagccaagcccagccaccagctctggcaccaatgccggtactgaactcatcagacgtcactgaaccgccgttcccttctgccgcgccgaagaatgcacctggcggcgctgccaatgggagcacccctgcacccggtgcgtcgccgtcaggctctcaggccgctgctgtcatgagagccggcattctaccgatggtgacggcgctcttcgcgtctctgctcatctgagctgacatcctcagttgaagctgtgtaattggttgttcagagttcagttatcacactttccattggattgggaaagctatttattgtctgtcaatgctgtgctgctaggaatccagtagctgttttggtagggaaacatctgaatatccgtttcttcctgctgtataaatctgtttataggacaaaggctacaaatatattctagcaagcactgaactactgaatgaatgaagccgtaagtgtaactagtagtgtacattgctgactgagctggaagcttcagtgtaatgttgtaattaatctcatctcctgtctgagg

SEQ ID NO: 14661 - DNA, 1989 bp, Oryza sativa
  ref <308>: DATABASE ACCESSION NUMBER: AK065219
  ref <309>: DATABASE ENTRY DATE: 2001-12-06
ggggtaactccccaccttaaaccccagacaccctcaaaaaccctaatcccctccctcccgccgccgccgccgccgccgccgccatgggctccgcctccgcttcctcgctcccggcctccgccggcttcggcgagaacctggtcctcatcctcgacttcggctcgcagtacacccacctcatcacccgccgcgtccgccagctgggggtcctctccctctgcgtctccggcacggcgccgctcgcctcgctcgcgggcctccgcccccgcgccgtcgtcctctccggggggccccactccgtacacgcctcgggggcgcccacgttccccgaggggttcctcgagttcgccgccggcgcgggcgcccacgtcctcggcgtctgctacgggatgcagctcctcgtgcagtccctcggcggcgccgtcgaggccggcgagaagcaggagtacgggaagatggaggtggaggtaaccgcccgctcctcggcgctgtacggggagggggaggtcgggaagcgccagacggtgtggatgagccacggggatgaggtggtgaggctgccggaggggttcgaggtggtggcgcgcagcgtgcagggtgccgtcgctgccgtcgagaaccgtgagaagcgcttctatgggcttcagtatcaccctgaggtgacacattcaccccaaggaatggaaacactgcggcgcttcctttttgatgtttgtgggataaaagctgattggaagatgcaagatgtgctggatgaagaaattaggacaatccaaagcatggttgggcctgatgaacatgtgatttgtgctttatctggtggagttgattcaactgttgctgccactctggttcacaaggcaataggggatagacttcactgtgtttttgttgacaatggcctattaagatacaatgagagggaacgggtaatgttaacctttgaaagtgacttgcaccttcccgtcacatgtgttgatgcatctgagcaatttcttagcaagctaaagggtgtcaaagatccagaaatgaagagaaagataattggaagggaattcatagcagtttttgatgattttgctcacaaattagaacagaagataggaaaaagacctggatatttagttcaagggacactgtaccctgatgtgattgaatcatgcccacctcctggaagcggaaggacacattctcataccatcaaaagccatcacaatgttggtggtcttccaaaagatatgaagttaaagctaattgaaccactcaagctcttatttaaggatgaggtacggaagttggggagtattttaaatgtcccagagtcattcttgaagcgacacccatttcctgggcctggtcttgctgtacgtgtcctaggtgatgttacagaaggcaatgctttggaggttcttcgtcaggttgatgaaatatttgttcaagccattaaagatgcaggtctctatgatataatttggcaagcatttgctgtgtttttgcctgtacaaacagtgggagttcagggtgaccagagaactcactccaatgcagttgctttgagggcaattactagtgaggatggcatgactgcagattggtattattttgagcgtgagttcctggtagatgtggtcaacaagatctgcaacaatgtgcgaggtgttaaccgtgttgtccaggacatcacgcaaaagccacctgcgacagtggaatgggaataggaacttcgtgctctgaattctgatgccgtggagtggcctacttttatgctgcaatggagtgggaatatcaacatattcccatattatacatatagctgtttattactagattgtttgtttacatcctttgacaaatccctatttgtcaacctgtgatagattttgaactgagaaaagctttgaactgcacttattaactgtgctttctattcttgaatagatatcttcacctttgaagaccttttatcttttggagtaaatctttgttgct

SEQ ID NO: 14662 - DNA, 3655 bp, Oryza sativa
  ref <308>: DATABASE ACCESSION NUMBER: AK065220
  ref <309>: DATABASE ENTRY DATE: 2001-12-06
gagttctcacttctcacacaactcgcaaccctaataaagcgcaaaaaaggaaaaagaaaaatcgccacggaaaaatcctcgctgccccccatcgggcaggagcaaccgccgcatcggcccccgatccggtcgccgccgcctctcgcccggttcatccgccgcttgccaacccctccgctcccagcaaccctagtcccccaccccaacgccgccgccagctcagctcgcctcgcgcggggcgcagccgactctctacttgtggcctcggcggctcgggccctctccggattccacgatgtctgaagatgcgtctgtcggggccagcagttcaacagtaaaagctggcgatgatccagaggctaccattgagatcaacatcaaaaccctggattcacaagttcataagctccgtgttaagaagaatgtacctgttctggtccttaaagagaagatagtagaggcaaccggggttcctgtggaccaacagcggttgatttttagaggaagagtcttaaaggacgatcacctgctatcagaatatcatttggaagatgggtacacattgcatttggttgctcggcgtgcagctgctgaaggccaacattcttctggtacttctgatgaaaacacccatgctaatgttaatgttgctggaaatggactgttaggagatatctccagggtatgcttctaacatcgctttgtctcgtatacttaaaatttccaatctgcttaactcttagcaacaactacaggttaactttaattttctttgaattctttttcattaactctcttctaggaaattatagaggctatgcattctgaggggatgatagatgacctggctaggagtgttcgggatatccttggctccctaggtcttgcgacgcctggtggcatgaccaacactacattttcggtgcctttaaccactgcaccagaaggggccaataatgtcaatggaagaactaaacaagggaatcatgcacaaccagggttttcaattctgaatcatcaaatccaagtatcacaactacaaccagcaggctctattcctcgcaacatggttattcctgattctctcacaactcttttggagtatatcaaccgcatggatcaagtactacagaataacggcacaccatctgttgatacaaatacccagcagccaccaagatcggatgatgcttatctaaatcaaagatttccaagtcctgaggttctggtgtcagtcattgaaagagcccaacaacttcttggtggcagtgctgcttctgctctttcacatctcgcacaacgaatccagagagattctggcaccagtgatgcatctatacgtagccagatccagaatgaatcagctcagctgggagtagcaatgcagcatttgggtgcaatgtttttggagcttggtcgaacaatgatgatgcttcggatggggccatcccctgctgatgcttttgtcaatgctggatcttctgtttatataaactctgcaggaccgaatccaatcatggttctgccatcttttcaaaatactcctccttttggagtttcgagcataccagtcctcggtggaatttctggtgcctttggtattgttgatccttctcgtacatctgctgtcaatacccatggtacttctacaacaagtgggtcatctgctggtatgaccactgcttctgcaggcgctgtcaatgaaggtcgtcaaaatgtggaaagaactcaaggaggtaacccatctgctacctcaatgcatggattgccagcaaggacagttattgcggctattcctgcacggtccacggctgaggctccaaaccatgtcctgagtgttatcctgcctgttcaagtgaggagtcaagtagcaatgcctaatcaatcaacagtttctcaaggttctcagactgcagtgggcggtggatctcaaccacaagcctctgtaggtggtgttgctagcattccttctatagtggcacaggtaaccgcgcaagtagccaatgcattgagtgcaaatcaacaaggccaggtttcatcatctgcgcagaacacagtagatcagggatctcgctcggtcacaactaatggagttgacaatgtggattctctggtatcagcaagtacgcaactgcaaaatgagctgtcagattctaacaatggacgcacttcactaaatgcacaatctcttgtagctggagcaggtatttctccttcaaacacatctgatcccaatttagcatcggaagacagcagcactgaaaatgctcccaacatcggcagtattcaacaacatccagagatggaagggatccatgcagataatgtcagaaaaccttctgaggaatcaacaacagccaacttagtggggcagatcacaaccacctgtacagatgatatttctgtgaacagatcagcagaaaattcttcacagaagaacattccattggatggagtatctgcacagtccattaagccatctgcaagtagtaggtctgaaccagtaggtcttggtggaggtttgcagcctaagaggcggagcagaacagcaaagccacctgggagtagcagtgatactggcgaagtcgtcaattcctctcgcatcagcaatagccaaaatgctgtttcaatgggccagcaggttctgcaagcccttgcttctcaaaatactaatgtaaacagaagccatgttacggattctccacttccatccactacttctcagttttctggtggaatgcctccgagaagacagggtggtgaaggacaagttgattttggcagtatgatatccagtgtgctaaacaacccagcttttggcaatctgttgtccaatgtagcagagcaaacaggcatgggttccgcaggtgatttgagaaacatggtggaagagtgtgcacagagccctgcaataatggatactatgagtaatttagtccaaaatgtggatgggtcaggaagaggtcaaggtggcattgacttgtctagaatgatgcagcaaatgatgcctgttgtatcccaagttcttggtggagctggggctcgtcctgctggtacaaatagtggacaatccagattgcagcctcggcgcagtgacatgagagtggatgatgcttcagattatggaaattctcagattgatctacaccaagctcgtgaacacattgagcaacatgactcccccagggatatcttcggtgcggtcctcgaaactgctgcacaggcttatggtgaagatgagagtattgaggacatgcttgaagagcttgtcagtgacccagaacttacagatgactacctgaaacttctgctccaacaagttcgccagaggatacagtcggcatctcaatccgggaaccagtcttgagcaatcatggcaaagaaggtgatccagatatagaggtgattgcataggcaaggtggttgaaccatgcaggtattcactgcagagtttatattttataagttgaaaatggacagaacccagtgtttggtttggtggtcatgattaggcgcctccgtggatgtacatgtgccgtgttctctaattttggcctcagagatgatgtttacaccacccactgcacttgctttaaatgttttacagattttgttagtggtacatagctatcatcaagagctttagatttcgtgg

SEQ ID NO: 14663 - DNA, 2233 bp, Oryza sativa
  ref <308>: DATABASE ACCESSION NUMBER: AK065221
  ref <309>: DATABASE ENTRY DATE: 2001-12-06
gatcctgttccccaacacccatggcaactagccacctcacctctcgctccctcctcgtccaagcccagtaccccatctcacggctcccatccaacctccgcctctccctctcccaccacaagcaaccagccgccgtcgccaagcgccgccgagcccccgccccctcccacccggccttctcttcggtcatccgcggccgtcccaagaaagtccccatcccggaaaacggcgagccagccgccggtgtccgcgtcactgaacgtggcctggcctatcatcttgacggcgcgcccttcgagttccagtacagttacacagagacgccgcgcgcgcgccccgtcgcgctccgcgaggccccgttcctgccgttcgggcctgaggtaacgccgcgcccatggaccgggaggaagccgctccccaagagccgcaaggaactgcctgagttcgactccttcatgctcccgccgccgggcaagaagggggtgaagcccgtgcagtcgccggggccattccttgccggcacggagccgaggtaccaagcggcgtccagggaggaggtcctcggggagcctctcacaaaggaggaggtcgacgagctcgtcaaggcgaccctcaagaccaagcggcagcttaatatcggtagagatggtctaacacacaatatgttggagaacattcattcgcattggaagaggaagagagtgtgcaagataaaatgcaaaggtgtatgcacggttgatatggataatgtctgccagcagctagaggagaaagttggaggaaaagtaattcatcatcagggtggtgtgatatttctctttcgtggtagaaactacaattacagaactcgcccaatctatccacttatgctttggaaacctgctgcaccagtgtacccccgcttggttaaaaagatcccagacggcttaactccagatgaggcagaagatatgcgcaagagaggacgtcagttaccaccaatttgcaaactcggaaaaaatggtgtttatcttaacctcgtgaagcaagttcgagaagcatttgaagcatgtgatcttgtccgggttgattgctcaggtcttaataaaagtgattgcagaaagataggagctaaacttaaggatctagttccctgtaccttactgtcttttgagtttgaacatatactgatgtggagaggaaatgattggaaatcatcccttcctccattagaagaaaatgattttaaagtggcgagcgaccaaattttgaatagcaaagaagcaggttctggaagtgctctgaccccaattgagctggtcaacaatgccacgtctctcaagaaatgcaacttgattgaaggtgcagaaaaattggaagattccatgaagtctagttttgaaaatggtatgattttgggttctgcatgtggaaaccctggagtatgcaactctgaaggtatagatggaactgagtcctcagctgatgctccaattgaattttctccttcaaattcagcaagggatttagatccatctcaaacatcaacattgtattgccaaagctccctattggacaagagtgaaaatggagagctcattgagatgtaccctgacagatgtggaaactcggaacaatctccagatgtaccagaagctttaacttgtctaatgggcagcagtgatgagattcatgaattggaaactatgaggagaaactgcaaacatttaaacggcagcgatggtgttaacagtgattccatagtcccttcctacatggaaggaattttactccttttcaaacaagccattgacagtggcatggcactcgtgctgaatgaaaatgagtttgctgatgccaattatgtgtatcaaaagtctgttgcttttacaaagacggctccacgatacctggtactccggcatacaccaaggaagtcccatggtacccagaagactgagccagccaagaatgtaaggataaataagcatcttgaagaacataaagtatctgatcatgtcaaaaagaaagaaattgtcatgggaggatcaagaatgcagagaaatgatcacgcacgagaatttctatcagatgttgttccacagggtaccttaagagtagatgaacttgctaaattactggcttaaaggtgatcggtcctttattaaccgaaggtgtgttgcgttatcaaccttgaattaacgtgcaaagtatatacatgtacattgatatgggacgtataaaacttttcgtc

SEQ ID NO: 14664 - DNA, 3543 bp, Oryza sativa
  ref <308>: DATABASE ACCESSION NUMBER: AK065222
  ref <309>: DATABASE ENTRY DATE: 2001-12-06
gaccccacctcatcgcctcagaattcagaaacgaaagccaaaaaaaaaaaaaaaaaaaaaatccccatctgctttagggtttccgtcgatctctctccctcgcgcggcgccgccgatgtcgtcggagccgccgccgccgcagccgcagccgcaggaggcggcgggccgggaggcgtcgtcctccctctcccccgcgaaggaatctgccgccggtggaggcggggtcggggggtcgggggcaccggagacgaacacgctgtgggtgggcaacctgcccgcgcaggcggcggaggacgacgtgatggcgtccttctccccgcacggcgcgctcgactgcgtcatggcccgcgcgggcccgcggagctacgcgttcgtgctgttccgctccgtcccggaggcccgcgccgccctcgacgcgctccagggctccaaggtcaagggcagcgtcgtccggctcgagttcgcccggccggctagagctgttaagaacttatgggttggtggcattagctcctcaatttcaaaggaggagctggaggaggagtttaagaaatttggaaaggttgatggtattgcattctctcgtgatcagacttccgcgtacattgattttgacaagctggaagatgcaatttcggcacatagagccttgaatggaagagttttaggtggacaagaactgtgtgttgatttccaaaggtccaggggcagagcggaatggttggagacaggcagcttcaatggtagaactggacctgcaaagggttatggagtacgaaatcgagaatccaatcccaccaatgttctttgggtaggtttccctaatacagctaaaatcaatgaggaggcacttcggcaagcgatggctgtacatggtgctgttacaaatacaaaagttttcccaacaaggcaatatgcttttgtggagtttgcaacagttggggaagcttctaatgctaagaaaaatctagatggtcgtcttttcaatgatcagagaattcaaattcttttctcgaacagtgagcttgcgccaaataaattagataatccaacagcagtttctggatttccaaaatcagagatgtattatgatgatggtcagtatggcgcttctgattattttgatcctcgacggggaagatcaagatactttgagtacagtggtgtccctgtttctggtggtattcttccatcaccggaatctggaaatcctctcttaactggacgatctgctcagagtacattcgatccaagagaagccaagaggttgcggttggatgctgcagctgacccttatgatacaagggcaggtagtgagggtctttattctgctgggtactctcagcgcgagagtgcacgttctgagaggagctcaagtcctgctattcgaatccatggcacagtgcaccgaacatcataccttgagcacttctggcgtggtagcattgccaaaggtggatctcctgtatgtcgtgctcgctgtttgcctataaggaagggtgttgagatacctttaccggatgttgttaattgttccgctagaactggactagatatgctggcaaagcattatagagacgcttcagggtttgatatcgtcttcttcttgccagatagtgaagatgactttgtttcttacactgaatttttgcgctacttaggctcaaaaagtcgggcaggggttgtaaaggttgatggggggactactttatttttggtcccaccttccgattttttacgaaatgttttgcaagttgatggtccagaacgtctttacggtgtagtattacacattccgcaaatgtctgctgctgctcctgcttctgctcccactcctgctgtacaaaggccacaactaactgcaccagaatcacaaccttactacgatgaaagggaaattcctttgcagagaaggtatagtatgattacgcctagcaacaatcaccatcgagatgctgatcaccgtggatctttacgtgaggattcattgcatcaattggggcaaattcttgcacgacctcgggtggatgaaggacaagtagttcagccaaaccttgccggtatccctacaaacgcaggactacaggtacagccttcactccagcctgatatgatagccactttagctaaacttttgccaagtgggcagtcatcagctctggtcactggccagcttcccctgagctcaacagaccaacctgcattaacccaaatgaatgatgcatctactcttgcaaaagtatggagacctgaaaatcaagcaatggcttctacttcatccttagagcagatcggtaatttccagcattcaggacaacagttcagcaaacaagctggagcagttcatctgccaaactatgggaacttggcaggtgcacaggagcacccaacacaacatagtgcttacaatcctgaaatgactctaaacttgccaccaccaccaccacctcctacgctgccacccagttctgctatattatcatcgcaagttggtcacagtttgcctacgcagatgagtcagcaacagtatcaaccagagcagtattatatgactcaaagcaattatggtcaattggccacagttagcagttctaatcttcaggcgcaccatcaacaaattgttgcgactcctgctgcacaagctcctgttgctgcgcaattccctcctgctatgcaagctcctgctgccgcacaagctcctgttgctgcacaagcttctgctgacgaggcagaacggaacaggaagtatcaggcgactcttcagttggctcagcgcctgttgggtcagctacaacagaagcctggaaatcaaccttaaggctatcctggaaatcaaccttcaggctaagttacttattcaggtacgttttatgtgctgctctgcaattgttctttccgtgccatttacaacttctctgctatgaaattaggtatcaagtgaaatatccaaacagattcaggcattcagctaatcgtaggtgtagtatatgcacttcttaaaagttaaaaccagaaactctgctaacaagttttgtaggctttatttctgctagggcatagtccaatttaggcgaacaagggagatatgatagtttgcatcatacttgttcccttgtattttgttcaagcatatcttaacaaagttgaggtttttttccttagaaaaacaaatatatatatatgacaaactattaagatgacttttaaacttggaatttaaactattaaggttagcttatgcatatcacggattataattgtggctggttacagttttagatctttttagtgagacacgtttaccattttctgtgcatttgctattgatagtatttaatttatagttgtgtgatatgttatctgcatattcttgtgttattctagtatatacaatgcttaggttgttctacgagtgtgcataccatacacaagcattcaagttatttgatttgataaatgtatgaacttctttcatgtaataagctttgtggtaatctaaagtagcgaaccttatctgaaatgaacccaaaatcacattttgcc

SEQ ID NO: 14665 - DNA, 2144 bp, Oryza sativa
  ref <308>: DATABASE ACCESSION NUMBER: AK065223
  ref <309>: DATABASE ENTRY DATE: 2001-12-06
gacttctctcttctcccacttcccccctcctctcctccggcgtgcggaaaattcgagaccccgaaattccggcaatttcaaacgcgccccctcgccgccggcgagccccagcgcgatcctgagccccggcggtccgtcgccggaggtgttagcctcgtgaggtggctctcgccgtcgccggcgagcggcgtaggcggaggcggcggcgatggggaactctctggggtgctccgcctccggggagaggctggtgtcggcggcgcgggacggggacgcggtggaggcgcggatgctgctggagctcagcccggcgctggcgcggtactccaccttcggcggcctcaactccccgctccacttcgccgccgctaagggccacctcgacattgtgacgctgttgctggagaagggcgcggatgtgaacgtacggaactactgcgggcagactgcgttgatgcacgcatgccggcatggccactgggaggtggttcagatgcttctgctcttcagatgcaatgttaccagggcggattacttgagtggccgaacagcattgcatttcgcagcacatgatggacttgttcggtgcgttcgtcttttactcgcggactttgtcccaagtgctcccttagaggatggtgcttcttcgacggtggatggtggtgaatgtcagacgaatagtgggagcagtccttgttcttctttgggactgaaatttaatgaatctgctcgtttgagatatatcaacaaacctgctgatggcggtgttacagcacttcatatggcagctttgaatggtcattttgattgcatgcaattgttgattgacttgggtgctaatgtgtcagctgtcacattcccgtatggcactacagcaaatttgataggagctggcagtactcctttgcattatgcagctggtggaggaaatgctgagtgttgccagctacttctgtcaaaaggcgctagcaagttgacactgaactgtaatgggtggcttcccattgatgttgctaggatgtttggacgccgtttcttggagccattactttctccaaactcaaactcgagtatccctgcatatcaaccatctaattatcttgccttgccattcatgagcatacttaatatagctagagaatttgggttgctgcacaccgtagcctctgtggatgatagtgatctttgtgcagtttgccttgaaaggtcttgttcagtagctgctgaaggttgttgtcatgagttctgcatcaaatgtgctctttatctttgctcaacgagcaatacccgtgttgagttcactggcccacctggatcgattccgtgccctctttgtcggaatggaataatgtcatttaccaagttgccaagcacgccaacagaagggcttaaatctagctcagcactcacgttctgtaatccatgcatgctaaacacccgatctgtagactcaccagcaactatcagcaaagcagaaataaggcgcaaccgtgttgcagctgtctcttcagagctagtctgcccactaacctgcagcccatttccatcgtctgccctcccgacctgcaggtgcagtgacgatgatccatgtgatgccatagaaacacaggatggttccgaggtgcaatctcctcagccatcgcactgcgcaagcatggagatggacaagagggaacagcaggatcttgaccggactagctgctcaggcatgttctggagccgaagaagctgccacagggaggagcagtgtaatgcagagatcaatgcttgattgtttcttctttctggttgttaatatatctggattcatagcagctcaatgtgggagatgagcagcggttattttttttgcctccccagctgtgtttctttcccctatttgcagccaagattttcttgattggtgaagtgaatcctgcagcttttggctgctgtagtttttactgtattgtagcattttggttacaaatgtgtgtcgtccctgtgatcctagatagccccaaaatcaccagttactcctctttgtagctgtatgtaaattgcaggagttggttgggatttgttttctggtaaagatgttgagaatctatgtacaatggcatcagtcatttgccctcttaaatcttaatgataatactatatag

SEQ ID NO: 14666 - DNA, 2174 bp, Oryza sativa
  ref <308>: DATABASE ACCESSION NUMBER: AK065224
  ref <309>: DATABASE ENTRY DATE: 2001-12-06
ggaagtgagcccccgcgccacggccacgcgccgcgggcttcctcctcctcctcctcctcctcctccccgagccgcacgccgatcgatggccgcgcggcggcgcctcctcctgctcctcgtcctcctgctgtgccgcctcgccgccgtcctccccacctccgaagtggaggccttgcagggtttcatggcagggttcgccggcggcaacgcggcgttccagagctgggacgcgtccgcgcccaacccttgcacctggttccatgtcacctgtggcccggggaaccaggtcatcaggctggatctcgggaaccagtcgctgtccggcgagttgaagcccgacatttggcagctgcaagcattgcaatccctggaactttatggcaatagcatcagcgggaaaatacctagcgagcttgggcggttagctagcttgcaaactttggatctctacttgaacaatttcaccggtgaaataccgaatgaactgggaaatttatcgaagctcagtaacctccgtctgaacaacaatagtctgtcaggtgcaattcccatgtcattgacaacaatccaaaatcttgaagtgctggacttgtcacataacaacttgtcgggaataataccgaccaatggttcattttcacacttcaccccaatcagtttctccaataacccacgtactttcgcaaattcttctgattcgccatcaaataactcgggagcagcggtgccatcaggaagaagtagtgcatccagcattggaacaattgctggtggagctgctgcaggtgctgccatgttgtttgctgctcctattgtattgttcgcatggtggtggcggcgtaaaccacatgaccaattctttgacctactagaagaagaaactccagaagttcatctgggtcagcttagaaggttcacactgagagaactgcaggtggcaacagataacttcagtcaaactaatttgctagggagaggaggctttggaaaggtctataaaggaaggttgttagatggttcattgatagcaataaaaagactaaatgaagatcgaattggaactggagagcggcagttcctaatggaagtctagatcatcagcatggccgtgcatcaaaatctcctacgcctccaggggtattgtatgacacccaccgagcggctgcttgtgtatccttacatggagaataaaagccttgagacacgcttacgagagtgctctgattcacaacaaccacttgactggccaacacgaagaaaaatcgcgttagggtctgcaagagggatctcttacttgcatgaaggatgtgatcccaaaattatccatcgagatgtcaaagctgctaacattttgttggatgaaaaacttgaagcagttgttggtgatttcggtctggctagaattatggattacaaagtttcccatgttgtaaccggcgtgatggggacattggggcacattcccatggagtacctgactgcaggaagaacttcagataaaactgatgtttttgggtatggaatcatgctttttgaactgattagtgggaaaaggggatttgatcttgttggtcttgcaaatgaagaaaatgccagagtgcatgattgggtgaagaaactgctggaagaggacaggctggaggtgctgattgacccaaacttactggaaatctacaatggtggggaacagggagtgcgagaggagatgaggttgctggtgcagattgcgctgctctgcacccaggagtccgctccaagccgccccagaatgtcaacggtggtgacaatgctagaagacggtatcgcggagcactgggatgcatggcaaaggaagacgattgtgcaggcaagcctgcaaggaggacagggcgtttctgaggctcgcaatgactctgttgcaaatctccctccagacacattgtctggtccaaggtgactgccaccttaaggactatgaagggtggttcttttgtagagcttagtgaacttagacagaacacttgccattcttaaaaaaacagcagattatatgttttcttgtagcatgtgtatgtattttagtttttcccctttttttcaagtaattcataatcactactagacacagggctttcagaaactgttcagaaaccacatcatagttatgctaacgcatcaatacatgtggttgtgct

SEQ ID NO: 14667 - DNA, 3389 bp, Oryza sativa
  ref <308>: DATABASE ACCESSION NUMBER: AK065225
  ref <309>: DATABASE ENTRY DATE: 2001-12-06
tgtgccttttgtctggaatttgctttccgttcgtccacccttgcttctcttctagatctggaagaagctcttgtcttaattccagagccttattcttaagacaagtaacagttttgtttgttcccccaaaagtttttggggttcaactgaacccccccccccatgtcccaagttggatccgctcctgctgtggcaatcccttctcgtgttacaacttacagaagctgattctaattcacattcgttgcaaaatagtataactgagtgtgttttgttgagatgtgtgtccttacatgtcgattctttaggcttgatctcacaaatgcataatgggtatcatcaagttagtttttttcctcataaattagttgtctttttttttttggagggaatggtactgctagtttcatgttgcaatcttccgttgccatttactggtctttctgctcctatggtaaaattatcagaaatttatccgaacttccatatgcacaattcaatattgttgccagctaagatgggagaagaaaaaaaaaacataaactgtggactatgggtggcaattctttaatcccagtttgactgccttcatgtgcttacacccttaaaaaaaatcatcctgtatacactcttgttattcatgttgcttgcttgcaattttaaccaagataagattccctcccctcactgctgcttgttcccatggtctcccaacattgcttcaccaattattcccactgtcccctcacctcaagatgctgaccttgtgttctgcaggttctcagcgtgtgtgatgtgatccagcttgggggaggaagagcttgttggcctcttggcattgcggtctcctggacccagatcttgatgcaactgccgactactttttttttttttttactgatagaggtggtctggttgggttcttgacctgattttgtgggggctttgccaccacgcaagggaggcagtttggcctggatctttatcactagctgttggtcatgtcctttgagctagcaagcattcacatggcagtggccgccggtttggtacattcttgatgggttaagtgctgtgggtttgttgtggagttctcttcctggttcccatttggggtggacggtatgtgttgaagggaaaggggcagagatagaaagagcaaaaagaagataggagttcttcggttaattgtttttttcagtacggcgcaatgaagcatatgaaacttggatcaaagccagacctcttccagacagaaggcggcaatatcaggtttgttgcaacggaactggcaacagacattgttatttccataggagatgtcaagttttgtcttcacaagtttcctcttttgtcaaagagttcctgcctgcaaagattagctgcttcaagcaatgtggaaggcaatgaagagttggatatttctgacatccctggtggaccttcagcatttgaaatctgtgctaagttctgctatggaatgattgtaacactcaatgcgtataacgttcttgctgctcgctgtgcagctgagtatctagaaatgtttgaaaccattgagaaaggaaacctcatttacaaaattgatgtcttcttgacatcaagcatatttcgtgcctggaaggattcaatcatagtactgcagagcacaaagtcattgctaccttggtctgaaaatttgaaagtaatcaaccattgcattgactcaattgcatcgaaggcattaattgatccatcagaggtcgagtggtcatacacatacaacagaaagaaactgccatcagagaatggccacgattctcattggaatggtgtcaggaagcaattgatagtccctaaggactggtgggttgaggacctttgtgatctcgagatggatttgtacaagcgggtgatcatgatgataaaagcaaagggaagaacatcgcctatagtgattggtgaggcgctgagagcctatgcataccgcaggctgctgggttccctagaagacgctgtgagcaatggagttgattgcactaaacgccgtgccgtgcttgaaaccatcatatttctgcttcccactgagaaaggctccgtgtcatgtggttttcttcttaagcttctcaaagctgcatgcttgctggaggctggggagtcttgtcatgatatcttgatcaagagaataggcacacaattggatggtgcttctgtttcggacctccttataccggcaaacactagcgaaaacacgttatataatgtaaacctgatcattgcaatagtggaggagattgtttcgcgacaaagtgatactggcaagatgaaatttcaagatgatgatgagattgtggaggttgagaaccttactcctgtttccagcacctcaaatctggctgttgcaaatcttattgatgggtatcttgctgagattgctaaagacaccaatcttcccctttcaaagttcatcgcaattgctgaaatggtgccccctgcatcccgcaaaaatcacgatggtctatatcgtgccattgacatgtatctcaaggagcaccccagcctatcaaagagcgaaaagaaagcattatgcagattgatggattgcaagaaactgtcccaggatgcgtgcctgcacgccgtgcagaacgagcgccttcctctgcgtgtggttgtgcaggttctcttctttgagcaaattcgggcatcagccgcttcggggcggaccgatgccgcagcagagctcacctctgctgtacactcactactccccagagagaatggaaactcctatggcagctccaggtcagcggccaccacgacaaccgaggaggacgggaccggggtcccgacctccagcgacatcaactcgttcagttcactgaggctggccgacaacagcgggggcagcgagaggagcagtggcagcagcgacatcaacaacaagagctgtgacgacaagagctccagcaagtccaagggatcgctcatgcccaagaagatcctgagcaagctctggtccgggaaaacaaacgccagcgagaacagtagctcggacacgtcggagagccctgggtcactcaacccggaggaggtgaagtccacaacgtccaggaatacaaggcgtttggtaacctagtgtcaacagagccagccatggtttttgtttttgtttcttttttggctttgatttgccttcagatgagataaaaaaaagtagtactagcaatctttagaatgtggaatactactgactggcagtccctccgatggcagatagtgttttttatagcattgttattatgctggcatttgctataggtttggtcatcggtaaatttgttcaggaacgtttcatgatatagtcttgtaatttttttggtggaaatataaagataaaggaaggaaagatc

SEQ ID NO: 14668 - DNA, 1181 bp, Oryza sativa
  ref <308>: DATABASE ACCESSION NUMBER: AK065226
  ref <309>: DATABASE ENTRY DATE: 2001-12-06
gggtcggagcaaactctctctgtttgaagccacggagaaaaagcttgggtgatttcttggaagcgaagagtgaggggagaagaagaagaagaagaagaagaagaggggggaggaggaggagcagcatggctgagcacaaggaggagcagtcggtgatggagaagctctccgagaagctgcacggcgactcctcgtcgtcttcctcggactcggacgacgacaagaagggttcctcctcgtcgtcggcggcggcggccatgaaggccaagatctaccgcctcttcggccgcgagaggcccgtccactccgtcctcggcggcggcaagcctgctgatctcgtgctatggaggaacaagaagatctccggtggggtgctcgccggagccacggccatctggctactcttcgagatcatggagtaccacctcctcaccttggtgtgccactgcctcattctctccctggctgtcctcttcctctggtccaatgcctccactttcatccacaagtcccctccaaacattcctgaggtgaaaattccagaggacttgacagtaaacattgccctttctctgagatatgagatcaatagaggttttgcaaccttgagggagattggtcatggccgtgatctgaagaagttcctcattgtgatcgctggactctggattctgtcagttcttggtagcagctgtaactttttgactttgttctacatagtttttgtggcgctctacactgtgccagtactgtatgagaagtatgaggacaaggttgatgcttttggtgagaaggctgagattgaatttaagaagtactatgccctctttgaagagaaatgcctatcgaagattcccaagggtcctttgaaagataagaagcactagattagtagaaggtacctgcaatgaatcagcagccgtgttaatcactattgctcgacttttattttggaggatggttatgagtccttgtgtgtgtgtctagttgataatatatacttgcatgggcagttctagccttctagcatggctgatagttgttatgtggtggcagatggttgtggcgtgcaatcttttgtggagttgagcaatgctggctcaaatctgctgatcttttcccccctttcatgttcaactttaagcatagttactaaatctggatgctaaaagtattatggt

SEQ ID NO: 14669 - DNA, 2926 bp, Oryza sativa
  ref <308>: DATABASE ACCESSION NUMBER: AK065227
  ref <309>: DATABASE ENTRY DATE: 2001-12-06
cactctgtgtgtgttccctccttgtgctgagccgcggccgcggccggccttccgcctcctcctcgcctcctcgcgcgcgccgctggcgagcggcctcggagtgcgcggcgtgtgcaagtgctcctactctacttcgcgatcccactctcctcctccgcacctcagctttgctctcgcgcagggccagcgagctggttcggagagggcggtgtggctggcctccccttccactgacctccgtctcgtctcttctcgaatcgaatcgaacgaactgaagatagtcagctgatactagtgaagatgaaccgggaatcaaatttcatgcctactcctgatcaggatgttctggaagtcaagcccctgaggactttggctccaatgttccctgcaccattggggatcgatgtgcttaaccggttgacagccccaccgttggtatttgtcgcaccagctgggcagtttcctgggggttttggatctttgaacattcctgcggtcagatcgtttgccgctttcggtggtcaggatgctagtggaggcaagactgctggtggtggtgatcaggatgctagtggaggcaagactgccgctggcggtgatcaggatgctggtagaggcgagactgctgcttttggtggtcaggaaactgtcagaggtgaatttgttgcaaatgggactccaaatgtaggtgctagtgcaactgggccaattgacgccactcctatctcagcttgcaaatcaacacaaccaagtgtgatatcactggatgatgatgacaatgatgatgatgagccttacggtggtaaccaaacatcagcatctggacggaagatcaagaggccatcccatctcaaaggatataatgtaagtgatggtttgggcaccgacagctccaacggaacaaagaaacgccctaagacctctaataggaaggctgctactgacaatgagatttccttgatgcctccatccagcgatcccagggaggttgtggaagtgcttctcatgaccttcgaggcactgcggcgtaggcatcttcaattggatgagacacaagagactagcaaacgtgcagacctgaaggctggtgccatcatgttggccagtaatctgagggctaacattgggaagaggattggagctgtccctggagttgaagtaggggatattttctacttcaggatggagctatgcattatcggcttgcatgcacctagcatgggtggaattgattatatgaataagtttggtgatgaggatgactctgtagcaatatgtattgttgctgcaggtgtttatgagaatgatgatgatgatgatacagatacactggtctacagtggttctggaggtataagcaggaacagtgaggagaagcaggaccagaagcttgagaggggtaaccttgctcttgagaggagcctgtccagaaagaacgtgatccgggttgtacgtggttacaaggatccagcttgcttgactgggaaagtttatatctatgatggtctttataagattcatgagtcctggaaagaaagaacaaagactgggatcaattgtttcaagtacaagttgcagcgagagccaggacagcctgatgcagttgcaatctggaagatgtgccagagatgggtagaaaatccagctgctagaggcaaagttttgcaccctgatctatcatcaggtgctgaaaatctcccagtgtgtcttatcaatgatgttaacagtgagaaaggaccagggcacttcaactatattactcaggtcaagtacttgaagccactccgctctatgaagccatttcagggttgcagatgcactagtgtttgtctgcctggtgataccagttgtgattgtgcacagcataatggaggtgacttaccgtacagttcatccggattgcttgtatgtcgcaagcttatggtatatgaatgtggtgaatcttgccgatgttcaatcaactgtcgtaatagggtagcccaaaagggagtaaggatccaccttgaggtcttcaggacaacaaatcgaggctggggtcttcgttcatgggatcctatacgggctgggtcatttatttgtgagtatgttggtgaggttgttgatgatactaaagttaatttggatggtgaagatgattatctttttcgaactgtctgtcctggcgagaagacattaaaatggaattatgggcctgaattgataggggaacacagcataaatatttcagctgatacttttgagccgctgcccatcaagataagtgcaatgaaaatgggaaatgttgcacgtttcatgaaccatagttgcaaccctaacaccttctggcaaccagttcaatttgaccatggagaggatggttatccacacatcatgttcttcgcactgaagcatattcctcccatgacagaactgacttatgactatggcgacatcggatgtgaatctaggggtgtaggttctagagctaagaactgcctttgtggatcctcaaattgccggggcttttttagctgactgttgaagatgtgcattatcttatcaacatgcaaatatatttacctgatccttttgcttttttggtggtactaggaagtggactatgttcaagactttagaagtatggagaagctggttacttcaaatggctaacctcgtttgccgctgtggaagtagtaatagtaaattagtgcaacatttgcaatgcccattctcgtggtgtctcttgcgatgtgtgattgtaggccttgcaagatcaattttgtaaaattatgtggggggggtgggggggggatgtgatgctgctgatctgactacagtcgatgatgtttgggtaggcaaagttgggactgaacccctcgcggtcagctgtgaattcagaagctgagatatttggatgaatgctgatatggtggcatatggttcttcg

SEQ ID NO: 14670 - DNA, 2397 bp, Oryza sativa
  ref <308>: DATABASE ACCESSION NUMBER: AK065228
  ref <309>: DATABASE ENTRY DATE: 2001-12-06
gaataagttcacgcctccacacgccaaaaccaaaaccctaaacccctcctcgcctccctcccctcccctcccctccccgtccggccatggcggcgtcgctgcttctccgagccgcccgccggcgagacctcgcctcgcccctcggaacgttgaccgccaatgctcaatcggcatattctgcgaatatttgttcacaatggggtagttttgcaagagctttcagtgtaaaaccaactggaaacgaggttattggaattgatttgggaacaactaattcttgtgtttctgttatggagggaaagaaccccaaagtgatagagaattcagaaggcaccaggacaacaccatcagttgtggcctttaatcagaagggagagcgacttgttggaactccagccaagcgtcaagcagtgaccaacccacaaaacactttctttggcacaaaacgtctgattgggagacgctttgaggatccacaaacacagaaagagatgaaaatggtaccatacaaaattgtgaaggctccaaatggtgatgcttgggtggaaacaacagatggcaagcagtactcaccaagtcagattggcgcatttgttttgaccaagatgaaggagactgctgaatcttaccttggtaaaactgtttcaaaggccgtgattacagttccagcttattttaatgatgctcagcgtcaggcaaccaaggatgctggtcgcattgctggacttgatgtccagaggatcatcaatgaaccaactgctgctgctttgtcttatggaacaaacaacaaggagggtttgatagctgtgtttgacctgggaggaggtacctttgatgtctcaattcttgaaatctccaatggggtgttcgaggtcaaagcaacaaatggtgacacttttctgggaggagaagactttgataacactcttttggagttcttggtgagtgaattcaagaggagtgaagctattgatctggcaaaggacaggctggctctgcagaggttacgtgaagctgctgagaaggctaaaattgaactctcatcgactgcccagaccgagattaaccttccattcatcacagctgatgcttctggagctaaacatttgaacattccacttacaagatcaaagtttgaatctttggtgaatagcctcatcgagaggaccagagagccatgcaagaattgcttgaaggatgctggtataactaccaaggaggttgatgaggtccttcttgttggtggaatgacaagagttccaaaagtgcaggaaattgtttcagagatttttggcaagtccccaagcaaaggggtcaacccagatgaagctgtagccatgggtgcagccatacagggtggtattctccgtggagatgtaaaggagctgcttctccttgatgtgacccccctttcacttggtatcgagactcttggtggtatcttcaccagactgattaaccggaacactacaatccccacgaagaaaagtcaggtgttctccactgctgctgacaaccagacacaagtgggcattcgtgtcttgcaaggtgagcgtgagatggcgacagacaacaagcttcttggtgagtttgatcttgttggcattccaccagcgccaagaggtatgccacagatcgaggtcacatttgacatcgatgccaatggaattgtgacggtctctgcaaaagacaagtctaccgggaaggagcagcaaatcaccatccgatcctccggtggcctctcagaagctgagattcagaagatggtccaggaggctgagcttcactctcagaaggatcaggagcggaaagccctcattgacatcagaaacaacgctgacactaccatttacagcgttgagaaaagtctgggagagtacagggacaagattcctgcagaggttgccactgagattgagacagcaatcgccgatctccgctctgtgatgacctcagatgacatcgagaagatcaaggccaatatcgaagcggccaacaaggctgtttcaaagattgggcagcatatgtctggtggtggtggtggcgcaggcggttcagagacaggaggatctcagggcggaggcgagcaggctccagaggctgagtacgaggaggtcaagaagtgaaaccgcatgtgctaacagttgccctgcttttagagatagcagctagtagttttttggaagagaccgggatactaggaccttgcgcgttgtaataagttttgtcatacgaaaacacacctaagctcgtaggcctgtctagttgggttgtaatgcatgacttggttgcattggctccttttgcttgcgatacatcgcgcaaactggacgtgatattgtgatattttttttcaccctgttcactcatgagtacaatgaatcctgcatggaagcg

SEQ ID NO: 14671 - DNA, 1457 bp, Oryza sativa
  ref <308>: DATABASE ACCESSION NUMBER: AK065229
  ref <309>: DATABASE ENTRY DATE: 2001-12-06
gatccgtgatactcccaaagattcttatcgattgaagaaaaaaaaaagccggagaaaaggatagagagggaaagcaaccagccatggagtcgctgactctccgggcatcgccgtcgacggccgcgccgttgcgccgcgtccccgggcggcggcacgcggcggtgtccgtccgcgcctccgccggcgccggcgagccggacctctccgtgcgcgtgaacgggctgaagatgcccaacccgtccgtgatcgggtcggggcccccgggcaccaactacaccgtcatgaagcgcgcgttcgacgaggggtggggcggcgtcatcgccaaaaccgtatccttggatgctgagaaagttatcaacgtaacccctcgctatgcccggctcagggcggaccccaatggatctactaagagtcctatcatcggatggcagaacattgaacttatcagtgatcggcctctagaaactatgctgaatgaattcaagcaactgaagaaagagtatcctgacaggatactcattggctcaataatggaggagtacaacaaagctgcatggcatgagcttattgaacgcgttgaagagagcggagtggatgctcttgagattaatttctcatgcccacatggcatgccagagcgaaaaatgggtgctgccgtgggacaagactgtgacttgttagaggaggtctgcggttggataaatgagaaggctacagtgcctgtttgggcaaagatgactcctaacattacagatattacaaagcctgcaagaatttctcttaagtcaggatgtgaaggagtttctgctattaacacaatcatgagtgtgatgggaattaacctcaaaactttgcgaccagaaccttgtgtggagggttattccacgcctggaggctattctgcgagagccgtgcaccctatagcacttgcgaaagtcatgcagatagcaaggatgatgaaagaagaatttgctgatggacagtcactctctgctattggaggcgtggagactggcaatgatgctgctgagtttattctacttggcgcagatacagtacaggtatgtacgggcgtaatgatgcatggttatggccttgtaaagaagctttgtgcagagctgcaggattttatgagacaacacaacttttcctcaatagaagatttccggggggcctctctcccgtatttcaccacacacaccgatttggtacatcggcaaagggaggcgatcaaccagaggaaggctattaggaagggcctgtaatcagacaaggactggaccggtgatggattcgtcaaggagacagaaagcatggtgtccaactgattcgactctgaactcacacccccttccaccatacttccaacttgtgattaaacagggaccatgttcagcccaaaacagcagaaacttttgcatcatctcgttcaaataaaaagcataccaaattacttc

SEQ ID NO: 14672 - DNA, 1753 bp, Oryza sativa
  ref <308>: DATABASE ACCESSION NUMBER: AK098910
  ref <309>: DATABASE ENTRY DATE: 2002-08-28
gatctactcctcttctacctctcctcctcctcctcttcttggtcgtcttctcctagctcgccaagatgaggatttccatggctctcgcggcggccgcgctgctgctgctgctgtcgctggcagcggcggacatgtcgatcgtgtcgtacggggagaggagcgaggaggaggcgcggcggctgtacgcggagtggaaggccgagcacggcaagagctacaacgccgtcggcgaggaggagcggcggtacgcggcgttcagggacaacctccggtacatcgacgagcacaacgccgccgccgacgccggggtccactccttccgcctcggcctcaaccgcttcgccgacctcaccaacgaggagtaccgggacacctacctcggcctcaggaacaagccgcggagggagaggaaggtcagcgacaggtacctcgccgccgacaacgaggcgctgccggagtccgttgactggaggaccaagggggccgtggctgagatcaaggaccagggaggttgcggaagttgctgggctttctcagcaatagcagctgtagaaggcatcaaccagattgttactggcgacctgatatctttgtctgagcaggagctagttgactgtgacacttcatataacgagggatgcaatggaggtctgatggactatgcatttgatttcatcatcaacaatggtggaatcgacaccgaggatgactacccttacaaaggcaaggacgaacggtgtgacgtaaacaggaaaaacgcaaaggttgtcacaattgacagctacgaagatgtaacaccaaacagtgagacgagtctgcagaaggcggtagcaaaccagcccgtcagtgttgcaattgaagccggtggcagagcattccagctctactcatcgggtatcttcacgggtaaatgtggaacagcactagaccacggcgtcgctgctgttgggtacggcacagagaatggcaaggactactggatcgtgaggaactcgtggggcaagagctggggtgagtccggctacgtccgtatggagcgcaacatcaaggcgagcagtggcaagtgcggcattgccgttgagccatcctaccctctgaagaagggcgagaaccccccgaaccccggccctactccgccgtccccaaccccgcctcccaccgtctgcgacaactactacacttgccccgatagcaccacctgctgctgcatctacgagtatggcaaatactgctacgcctggggctgctgcccactcgagggcgccacctgctgcgatgatcactacagctgctgccctcacgagtaccccatctgcaatgttcagcagggaacctgcctcatggctaaggacagtccactggcagtgaaggctctgaagcgtaccctggcaaagccaaacttgtctttcttgtttggcaacggcaagaagagcagcgcttgagcaatttcagaaccgtatcagaccgtccagagccagcgtggttgcatcatcaaatgatcagctggtaactgacgaagacgattgcgcagctcggcggcgaaccctgcgcactaagtatatctgcttttataatagatttctcgtgtacataaaatctaaaaaaacgggttcagttggttacagaactgccaaatttgcttctgaatgtatatgtaaaattcagctaggtttgctcctaagctcctagatgccagttcgacggaactgcaaattgatattggaacaagataaggtcattgccatattaatcc

SEQ ID NO: 14673 - DNA, 1676 bp, Oryza sativa
  ref <308>: DATABASE ACCESSION NUMBER: AK065230
  ref <309>: DATABASE ENTRY DATE: 2001-12-06
gctcttgtttctctctcctgctccccccccaacgccgccgccaccgccgccgccgccgccgccgaatccgagacccccatctcggattcacctctcccgcctccggcctccgtcaccgtctccccacgcgcgtcagtcatggcgggaatggcaccagagggatcccagtttgatgctaagcactatgattctaaaatgcaggagcttctgaaccaaggtgaaaccgaggagttcttcacatcttatgatgaagttcatgagagttttgatgacatgggtctccaagagaaccttctcagaggcatctatgcctatggtttcgagaagccttcagccattcagcaaaggggtattgtccctttctgcaagggtcttgatgtgattcagcaagctcagtcaggaacaggaaagactgccaccttctgttctggaattttgcagcaacttgactatgctgtggttgagtgccaggccttggtccttgctcctactcgtgagcttgcacagcaaattgagaaagtcatgcgcgcacttggtgactatctgggtgtgaaggttcatgcttgtgttggaggtacttctgttcgtgaggaccaaaggattcttgcaagtggagtgcatgttgttgttggaacacctggtcgtgtgtttgacatgctgcgtaggcagtccctccgtcctgattacatcaagatgtttgtccttgatgaagctgatgaaatgctttctcgtggtttcaaggatcagatttatgatatcttccagctcctcccgtcaaagatccaagttggtgtgttctctgctacaatgccccatgaggcccttgagatcacccgtaaattcatgaacaagcctgtgcggatccttgtgaagagggatgagctcactcttgagggtatcaaacagttttatgtcaatgtggagaaggaagaatggaagcttgacacactctgtgacctgtatgagacactggccatcacgcagagtgtcatctttgtgaacacccgccgcaaggtggactggctcactgataagatgaggggcagggatcacacagtttctgctacccatggtgacatggaccagaacactagggacatcatcatgagggagttccgatctggttcttcccgtgtgctcattaccacggaccttcttgcccgtggtattgatgtccagcaggtgtcccttgtcatcaactatgatctgccgacccaacctgagaactacctgcatcgcattggtcgtagtggtcgttttggtaggaaaggtgttgccattaactttgtgacccgtgacgatgagaggatgctgtttgacatccagaggttctacaatgtggtgattgaggagctgccggccaacgtcgctgaccttctgtgatcaagttcagaagagttatgttaaggggcctgataaggattgtttttgtctgaagtatcactgtcttatctggggggggggggagtgataaaggtgggggttctgttttaaaagtcactgtggtcgtagacaatttccaaatttttatgccatgttatgggaatttttgtagttgctaggctgtgctatgtgctggtgaggagggaggagtcttttacttttattatatctattgttaaaactatgtatgaccgaatgatgttatttatttgtgtcatggttgactatttgcc

SEQ ID NO: 14674 - DNA, 1811 bp, Oryza sativa
  ref <308>: DATABASE ACCESSION NUMBER: AK065231
  ref <309>: DATABASE ENTRY DATE: 2001-12-06
gagagcgtaggttcttcccatttggcggttggcagcggaaggaaaggagagaaaagagggggggaaggccaggccaaccggagcgaaggaaagccagggagtaataaatcgagagagaaacggccaaaaaagaaaccaacaacaagaaagaaatcaagcaagcaagaagagacgagacgagggagagaaggagaagagggggccggccgcgggcgtcgtcgtgttcctccccccctctctctcctctcctctcctctcgatctccatccttccttccatccattcctccccgcacccttcgcattgctctcgtcgtctcgattcggtcgaggatctccaggaaaagaggaggaagcgatatgggttgcttttcatgctgcggagcggatgatgtcggcaagaagaagaagcgcgacgatccttacgtcccgatccctgatccaggtggtaactatggacgtagcaagcccgggcccccagccccttcgcgttctccccccaccagcagaaatctgccaattgcagtaccggcaattccccttgatgaaataaagggaataaccaagaacttcagcagtgatgctctcatcggagaaggctcgtacgccagagttttctttggtgtgctgagagatggcaggagatctgcggtgaagaagctcgactccagcaaacagcctgatcaagaattccttgtgcaggtttcagccgtttcacgactgaagcatgagaatattatccaacttatcggatattgcgctggagggagcatccgtgttcttgcttatgagtatgcaccgaggggctccttgcatgacattctccatggtaaaaagggtgtgaagggagctcagccaggaccagctctatcatggatgcagcgagtgaagattgccttgagtgctgcaaaggggcttgagttcctgcacgagaaggcggagcctcgtgtcgtccaccgtgacatcaaatccagcaacattatgctctttgacaacgatgttgcgaaagtaggagacttcgatgtatccaatcagtccccggacatggcggctcgcctccactccactcgtgttcttggcaccttcggttatcatgctcctgagtacgcgatgacagggcagcttagcacgaagagcgatgtctatagcttcggagtcgtgttgctggagcttttaactggtcgcaaaccggtcgatcatacgctgccccgtggccagcagagtcttgtgacatgggctactccaaggctaagtgaagacaaggtgaagcaatgcgtggatccaaggcttgaaggggattatcctcccaaggctgttgccaagatggctgccgtagctgcgctgtgcgtgcagtacgaggcggacttcaggcccaacatgagcatcgtcgtcaaggctctgaacccactcctcaacagccgcccgaacaatcgccccgcctccttcaccgacgccggcgagcgatccggattatgagcacgccatgaccatttttctcatcggactccggtgacaccacgacgacgggagggaaggctcggtttccatggattccaaatgtgtaaaaattcagtggaaatgaagagggtagctctgctgctgcctgtcttgttcttgcctcgatctccagactcctgttgctgtaaattgtcgcaatccctcctgattatgtgttcctctcgacctcttgtagtagtttgagaaatggatgaatatatatacttcttgcttgtccacttttagcttccactgtcaccagacaagttttgttgttctgcgtacaatgggcagattaataattctcatctcatc

SEQ ID NO: 14675 - DNA, 2381 bp, Oryza sativa
  ref <308>: DATABASE ACCESSION NUMBER: AK065232
  ref <309>: DATABASE ENTRY DATE: 2001-12-06
ttgggaccgcagtttcagacgagccccagagctcccggtctcccaccccaagaggccggagacagagctgagagagagagagagagagagagagaggggaggggagggcgtgtgctcgcgcgccaccgcccggatctcgagctcccggatctaccgcaaagatctaaaccgagcaagaggcggcggctgctgctgctgcggccgcggttgttggtggtttgttggtgaggaggaggaggaggaggaggaggaggaggaggcgcggacgacggtaagatgtcgtcgagcacgatccggaaggcgctgggggcggtgaaggaccagaccagcatcggtctggccaaggtcaccagcaacatcgcgccggagctcgacgtgctcatcgtcaaggctaccagccacgacgacgagccggccgaggagcgacacatccgcgagatcctccacctcacctccggctcccgcgcccacgtcgccgccgccgtcgcgggatgctcccggaggctgtcccgcacccgcgactacgtcgtcgcgctcaagtcgctcatgctcgtgcaccgccttctcgccgacggcgacccttccttccaccgcgagctcctgcacgccacgcgcaggggcactcgcctcctcaacctctccgacttccgcgacgaggctcactccggttcatgggaccactctgccttcgtccgtacctatgcgctgtacctcgaccagcgccttgagttcttcctccatgagcgcaagcaaggctccggctccaacgccagttccagtgcaaatggcccgtcaccgcgtgaccgctggggatcacctgacccatatggtcgccggtcaccctcatactcctcaccccctggaaacggaaatgggtatggatatggtggttatgatgattaccgtgagaggaacggcaacaacaacactgatgacaagaagccgccgaccccagtgagagacatgaagccagaacgggtccttgcccgtatgcaccacctgcaacagctgctcgacaggttccttgcttgccgccccacaggtggtgccaagcacagcaggatggtgctggtcgcgctgtatcagattgtgagagagagcttccagctctatgctgatatatgtgaggtgctcgcagtgctgctggataggttctttgacatggagtatgccgagtgcgtgaaggcatttgaggcatatgccagcgccgcaaagcagattgacgagctttgtgcattctatggctggtgtaaggaaactggggtcgctaggtcatcagagtacccagaggtgcagcgtgttaccgataagttgctggagacattggaggaatttatgagggaccgagcaaagcggcccaagagcccacctcgggagcctgagcctgaacctgtaaaggaggaagagcctgagccagatatgaatgaaatcaaggcactgccagcaccagaagactacaaggagcctgaacctgagaaggtggaggaggaagtaaagccagagcccccaccgcaaccccagggtgatttagtggatcttagagaagaaactgtgactgcagatgagcaaggtaaccggcttgctctggccctcttccaagggccacctgcagctggtggaagcaatggctcatgggaggccttcccctcaaatggtggcaatgaggtgacttctgcatggcagaatcctgcagctgagcctgggaaggctgactgggaacttgcccttgtggagacagcgagcaatctgtccaagcagaaggccacaatgacaggtggtatggatccattgctactgaatggtatgtatgatcagggtgccgtgcgccagcatgtcaatgcacaagtgacaactgggagtgccagcagcgttgctctacctccggctggacagaaaacacaagtgctggctctgccagcaccagatggttcaatgcagaatgttggtggagacccgtttgcggcgtcccttagcttcccaccaccgtcctatgttcagatggcagagatggagaagaagcagcagttcttgactcaggaacagatgatgtggcagcagtaccagagggatggcatgcagggccagtcaagcttggccaagctcgatcgggcttacaacaatggcttcgcccccaacccagccatgccttatgggatgcctgcagcatataacacgaaccccatgccaatggcttacactgcaaatactgggtactactaccccacttactgagttattctttgttcatccttacagttgctgtgaattttgttctgtatcgtgatctcatagccttggggttgtccagtatcagttgttgttcccctgcctctggatcaaaccttttggtctcttatatgtaattctatttgtttggaacc

SEQ ID NO: 14676 - DNA, 1239 bp, Oryza sativa
  ref <308>: DATABASE ACCESSION NUMBER: AK065233
  ref <309>: DATABASE ENTRY DATE: 2001-12-06
gactccttcctcaccaaccatgcgccccaccgccgcggccgccaccgccgccttcgcctcaccggtcgtcgcggttcccagtcgcgcggccccgctcgccgcccgccgccgcctccgccgcgcgaggcgcttcgctgtccgctccgtcgcctcccctccaacggtccccaagcccgcggctcccccctccaagactgggaaatggcagtggacatttgaggataagccaataaacatttactatgaggaacatgagcatgagactgctgagaacgtgaagaacattcttatgattcctacaatttctgatgttagcacagtggaggaatggagggtggtagccaaagatattgtggcacgaaaaggagaattaggttaccgtgctacaattgttgattggcctggtctgggttattcagacaggccatcactgaactacaatgctgatgtgatggagaattttctggttcagttaattaattcaccaaatagtcctgtggcaaatacagatggtgaagtggtagtagttggaggaggtcatgcagcaacaattgcagtccgtgcggctgggaagggccttataaggccatctggcattgctgcagttgcacctacttgggctggaccccttcccattgtatttggccgaggttctgatatggagacaaggtatgggcttctacgagggaccctcagggccccggctattggctggatgatgtacaatgttctggtgagcaacgagaagtccatccagtcccagtacaagtctcacgtttatgccaaccctgagaacgtgactccaaatatcgtggaaagtcgctacgagttaaccaaaaggaaaggtgcacggtttgtcccggctgcattcttgacaggccttgaatgcccctgtccaaacaagggaagaattccttcagctgtttgccaagttggaagctctcagaggcgccaaaggcgtgacaaaattcgtggaggttccaggtgcccttctgccgcaggaggaattcccatcaccagtcgcggaggaactctacagctttctgaaggaatcattctcgtcaggtagatgaatgtgcagttacgacaactacggcagggtcaaattcaacaacatcctatactcatactgtactagagcttgtagtaacagaagcagcagcatcaattcctgtctgggtgccacatttccaagcttggcaaaccaaccacaattccatatatacagagagtgtgtgc

SEQ ID NO: 14677 - DNA, 2296 bp, Oryza sativa
  ref <308>: DATABASE ACCESSION NUMBER: AK065234
  ref <309>: DATABASE ENTRY DATE: 2001-12-06
gtggcgcatttgcctttgcatccccttcccttcccgtcttgaagcgcccgctccgctcccccacgattcctccttcctccacacttccacagtctccggcgcgctcccctcgcccactcttcttctctttctccctctcttcctcctccacctccagggctccaggctaaaacgtcttccccgcgggagtgctaggttggctctgcgcgtggggcccgcggggaaagctcagtggcgcgcggcgggtttttggcgggagcgggacttggtggccggtggcggcgctgcctgcgggtgtcgtgccgcgatctgggctccggacacgaattggagcggacatggctgatgtggagggccaacagcctcatcaggtcagtggtgtgtccagggcacaagacggggttgccaaggtgagtttggggaaagagcatgtgccaggaagcgagctctggaccgacgggctcatctgtgcttttgagctcataaagggtcacaagaagctggttcagcacaaatcatggccgacgattgatagcatgcaggagaaagaggtccctatgcatatgaagcggcacatgagtaggaacgggcatcatgtcgcaaccatgaaaccagaagagtgcgatgtggtggagaatccccgccagacagagtttgctaatgatccttctctgttcaaagataggccggtgcatgtcagggcaatcctggatcacaaatgggtgcctatcggatggtctaggattgctgaactggtccagagggttcagtcagatgccagctgggatagtgagccggcggagatgaccgacagtgaggatgattacactgtagctgatgttgcagctccatactggcagcgtccggtaggacctacatggtggtgccatgtcactgcaggccatccctcagttgacgcatggctgaatagtgctcactggatgcatccggctataagaactgcattgagagatgaaagccggctgataagtgatcggatgaagtaccttctctatgaggtcccagttagagttgctgggggactgctatttgaacttcttggtcaatcagtcggagatccaaaccgtgaagaggaagacatacccattgtgcttcggtcttggcaagcacagaactttcttgtgaccgcaatgcatgtcaaaggcccttcatccaatataaatgttttaggagtgactgaagtgcaggagttgcttagtgctggtggaagtcaaacacctagatcagctcatgaagtaattgcacatttgatcggccgtctttcccgatgggatgacaggttattccggaaatatgtctttggtgaagcagatgaaattgaactgaagtttgtgaataggagaaatcatgaagatctaaatctagtcagcatcatattgaatcaagaaatcagaaggttagcaacacaggtaatcagagttaaatggtctctgcatgcaagggaagagatcataattgagctccttagacatttgaggggaaataccacaagagttatcttagatagcattagaaaggacacaagagaaatgttggaggagcaggaagctgtccgtggccgcttgttcactattcaggatgttatgcaaagcactgttcgagcatggttacaagatagaagccttcgtatcacccacaatttggctatttttgggggtggcggcatggttttatccataatcactggcctttttggaatcaatgttgatggcataccgggagcgcagaatactccatacgcttttggcttgtttgcaggacttctcttctttgtaggcttcgtccttattggggtaggaatactctatcttgggttacaaaatccagtgaccaatgagaaggtcaaggtgaggaagctcgagctccaggatcttgtttcagcgttccagcatgaagcagaacagcacggcaaggtgagggaaggtctcagccggcacagctcgtctcctaagtcatcatcggcctctaatgtagactacgttctaatttcttaaggctgtgaaattaatccccttgtgggagggattcactgaacaaggcctaaaagggattggaaaaagaataaagtacaaggagatttgacagaaaaaaaaaaggatttccggatagaagagttcttggtaaggactaaagtataagccatataagtatataactatgtttggtgatctgtatagaggtttagattagagtataatggttaacttgatatgctacggatatacttgtgactgggaaggattatcactgaggaaaatgtgatcgaaatgctaat

SEQ ID NO: 14678 - DNA, 3301 bp, Oryza sativa
  ref <308>: DATABASE ACCESSION NUMBER: AK065235
  ref <309>: DATABASE ENTRY DATE: 2001-12-06
gaaccagatcccgctcacgagttcctcacttcctcctccgcccgcgtcgcccctcctctcctctccctcccggctcccggctaccgccgccgccgccccgaggaaatggctgccctgcaaccctcattctcttcagcaatggctatgaaaagtctgaagttacccaaaactgcagctttacctggatttggtggtattgcacgtcctcaagatgtgcaggacaggagcgctaacttcacttgttcaaggcctagagcagcttcagtgactgaccagtcaacagcagagccagcaaaacccaggcaaaacaagcacactgttgatccttctgctccagaatttctgccactcccatcatttgaagaatgctttccaaggagcacaaaagaatccagagaaattgtgcacgaggaatctggccatgtcctcaagatcccatttaggagaatccatttgaccggagatgagaagcattttgacacatacgacaccagtggtccacaaaacattagtccaaggattggacttccaaagataaggaaggaatggattgacaggagggagaagttaggtggtcctcgatacacacaaatgtattacgctaagcagggaatcataacagaggagatgttgtactgtgccacacgtgagaaccttagtcctgaatttgtccggtcagaggttgcccgtggacgagctataattccttccaacaagaggcacctggaattggaaccaatgattgttggacgaaacttccttgtaaaagtgaatgcaaacattgggaattctgctgttgtgagctccatcgaggaggaagtacacaagctccagtgggctacaatgtggggagctgatactgtcatggacctttcaacagggcgtcatatccatgagacccgggaatggatccttcgtaattcttcagtccctattgggacggtgcctatttaccaagcacttgagaaagttaatggtattgctgaaaatctaagctgggaagtctttagagatactttaatcgaacaagctgagcagggtgttgattacttcacaatccatgctggcgtgcttcttcgttacattcctcttacggcaaagagaatgaccggcatagtttcacgtggtggctctatccatgcaaaatggtgcctaacatatcataaggagaactttgcctatgaccactgggatgaaattcttgatatttgcaatcagtatgatgtggcattatccattggcgatggtttgagaccaggttctatttatgatgcaaatgatagtgctcagtttgcagaattgctgactcaaggggaactcacacgccgagcttgggcaaaagatgtgcaggtaatgaatgaaggcccagggcacattccgatgcataaaattcctgaaaacatggagaagcaactggagtggtgcaatgaagcacctttctacacactggggccactgacaactgatattgcacctggttatgatcacatcacctccgccattggtgctgccaacattggggctcttggcactgcacttctctgttatgtaacaccaaaggagcaccttggattgcctaaccgtgatgatgttaagacaggcgtgatatcctacaaaatttctgctcatgctgctgatttggcaaagggccatccctatgcacaagcatgggacgatacactaagcaaggcaagatttgagtttagatggttggatcaatttgctctatctctggatcctgtgaccgctatgtctttccatgatgaaacattaccatcggagggtgccaaagtggcacatttctgctcaatgtgtggcccaaagttttgttcgatgaaaatcacagaggatattagaaaatatgctgatgaacatggttacgggacagtggaggaagcggtgatacaaggaatgaatgctatgagtgctgagttttcagctgcaaggaaaacaatcagtggggagcaacatggtgaagctggaggggagatatatgttccagaaagctatacagctcgcaaataagatcgtcttggtgtccatctactccgggtggagcgtttatcagcagcactcctcaccatcctatgttaggaggtggggtgcctgtattctcaacgatctgaaggcctcttggcctggattgttgtgaattgggctgagaaagtccctttgaacctgaacaggataatgcctgcgaagggagtgtgcatttctacttttatgtttccagggaactctcaacacaacccctttttggtgggagatcgagctatccaatatgttcctgaacgtgtgagctcagcagctggatatacctgtttcttacaactgaggtaacatggtaataatacttcatttgataagtggcatgctgacatttctccaacaggagaggatttctgcagataccacttcgtaatgtcccagaactgatttagtcatacatttattatccgtgtaaatttgcaaagcgttggccatgtcctatgcaattgattttaaaccatctatctgcacatatctaattaaagtataaaacaatttataaactctacataatggacattttagctgcatgccacttgtcaattgagcacacaatatactgactaaattcaatttaacttgatcatgattcatgtggaaggtgtttattaggaattaatttattgatatggccagagacttgtttatttttagctatttatttgtctttcccatagaaatgatcaaattttgtacttgcaccttgtgtaagtataatagaattatttagtctgttttggagcattcattaatgcaatgatgctcagccgctcagatctttgcgtagcattatccaagaaaacaagtctttttgtatcccctagataatttgaaagcacccatacatgcacaatagcatgtgaaaaagaactttagctaggttctgttgaccgattatgttgtaggataggaatcatctgcctgtagaacataatttgggcattatcttctgatgttataatcatgtttttctcagcaaactattactccgcactccattttgtgtttgcgatgtggaattattttacctgtgatccaatcccattatttgactgacgtgaaacgttaagtgaaatgacgtgtggacaaagttgctcgtggctggagtctttatgctcgtggttaacaatttggagatgaattttgctctgattgtgctcctgcaatgtgtttttaattttcatcataacggatcttgacactattttctatcagattgttacctgttgttcattccgagttcagtactact

SEQ ID NO: 14679 - DNA, 1844 bp, Oryza sativa
  ref <308>: DATABASE ACCESSION NUMBER: AK098911
  ref <309>: DATABASE ENTRY DATE: 2002-08-28
ggtagtgctcggcacgtcggttgttgctgttgctgctgctgctcctcccgttttccgatcgcagccatgggaacccgcagcgtggccttggtgctcctcgcggccgtgctgctccaagccctcctccccgcttcggcggcggagggtttggtgcggatcgcgctgaagaagcgcccgatcgacgagaacagccgcgtcgccgcgcgactctccggcgaggaaggggcgcgccggctgggcctccgcggcgccaactcccttggcggcggcgggggtgagggcgacatcgtggcgctgaagaactacatgaacgcgcagtacttcggggagattggcgtcggcactccgccgcagaaattcaccgtcatcttcgacactggcagctccaacctctgggtgccgtcggccaagtgctacttctcgattgcgtgcttcttccactctcgctacaagtccggacagtcgagcacttatcagaagaatggaaaaccagctgccattcagtatggcactggttcaattgctgggtttttcagcgaggatagtgttacagtaggtgatctggttgtgaaagatcaggaattcattgaagctaccaaggagccaggtcttactttcatggttgcaaaatttgatggcattcttgggcttggatttcaggaaatatccgttggagatgcagtacctgtgtggtataagatggtagagcaaggtcttgtcagtgagcctgttttctccttctggttcaaccgtcattctggtgaaggagaaggtggtgaaattgtgtttggaggaatggatcctagccactacaagggcaaccatgcatatgttccagtctctcagaagggatattggcagtttgagatgggcgatgtcctgattggaggaaagaccacaggattttgtgctagcggttgttcagctatagcagactctggaacatcattgcttgctggccccacagccataatcactgaaatcaatgagaagatcggtgctactggggtagtcagccaagaatgcaagacagttgtttctcaatatggacaacagatcctagatctgttgcttgctgagacacagccatcaaaaatctgctctcaggttggtctgtgtacttttgatgggaagcatggtgttagtgctggaattaagagcgtagtagatgatgaagctggggaatcgaatggtctccaaagtggtcccatgtgcaatgcctgtgagatggctgttgtatggatgcagaaccaacttgcacagaacaagactcaggatctcatcttgaactacattaatcagctctgtgacaagctcccaagtccaatgggagaatcatctgtggactgtggcagccttgcatccatgcctgagatttcattcaccattggaggcaaaaagtttgcactgaagccagaagagtatattctgaaggttggtgaaggagctgctgcccagtgcatcagtggattcacagccatggacatccctcctccccgtggtcctctctggatcctgggtgacgttttcatgggtgcctaccataccgtgttcgactacggcaagatgagggttggcttcgcgaagtcggcctaaacgtgttgttgtcacgttcctaatgacgaggtggacgcatacgccgagagaagaagaccgtagcttttaactagcgtatttatccggcgatgtgtgtatatatgcatgctacataacatgtttatgttttccaaggcctgagatggcgcccgtctattttagcttggcaagaatatctcggaccagtctctgttcgaattctcgtactgatatgtgaacttctgataacatgtgcactgtgttttgtg

SEQ ID NO: 14680 - DNA, 1385 bp, Oryza sativa
  ref <308>: DATABASE ACCESSION NUMBER: AK065236
  ref <309>: DATABASE ENTRY DATE: 2001-12-06
gaccaacacgaagcaaaaggacaccagaaacatagtacacttgagctcactccaaactcaaacactcacaccaatggctctccaagttcaggccgcactcctgccctctgctctctctgtccccaagaagggtaacttgagcgcggtggtgaaggagccggggttccttagcgtgagccagaaggccaagaagccgtcgctggtggtgagggcggtggcgacgccggcggcgccggtggcgagccccggcgcgggcacgtcgaaggcggacgggaagaagacgctgcggcagggggtggtggtgatcaccggcgcgtcgtcggggctcgggctcgcggcggcgaaggcgctggcggagacggggaagtggcacgtggtgatggcgtgccgcgacttcctgaaggcggcgacggcggcgaaggcggcggggatggcggcggggagctacaccgtcatgcacctggacctcgcctccctcgacagcgtccgccagttcgtggacaacttccggcgctccggcatgccgctcgacgcgctggtgtgcaacgccgccatctaccggccgacggcgcggcagccgacgttcaccgccgacgggtacgagatgagcgtcggggtgaaccacctgggccacttcctcctcgcccgcctcatgctcgacgacctcaagaaatccgactacccgtcgcggcggctcatcatcctcggctccatcaccggcaacaccaacaccctcgccggcaacgtccctcccaaggccgggctaggcgacctccgggggctcgccggcgggctccgcgggcagaacgggtcggcgatgatcgacggcgcggagagcttcgacggcgccaaggcgtacaaggacagcaagatctgtaacatgctgacgatgcaggagttccaccggagattccacgaggagaccgggatcacgttcgcgtcgctgtacccggggtgcatcgcgacgacgggcttgttccgcgagcacatcccgctgttccggctgctgttcccgccgttccagcggttcgtgacgaaggggttcgtgtcggaggcggagtccgggaagcggctggcgcaggtggtgggcgacccgagcctgaccaagtccggcgtgtactggagctggaacaaggactcggcgtcgttcgagaaccagctctcgcaggaggccagcgacccggagaaggccaggaagctctgggacctcagcgagaagctcgtcggcctcgtctgagtttattatttacccattcgtttcaactgttaatttcttcggggtttagggggtttcagctttcagtgagagaggcctgtcaagtgatgtacaattagtaatttttttttacccgacaaatcatgcaataaaaccacaggcttacatt

SEQ ID NO: 14681 - DNA, 2465 bp, Oryza sativa
  ref <308>: DATABASE ACCESSION NUMBER: AK065237
  ref <309>: DATABASE ENTRY DATE: 2001-12-06
gaagcgaacccagcggaattcgttgggcagcgggtgcgggagcagtagaggaggagaggtagatggattgagcaatcaagccctgctccggccgccgccgccgccgccgccgctgccgccgggcgatccccttaccctcgctctgtgcacccgcaccccgcacttaccccctccatggcgtgatccgatgatagcaacgagagcggtgcttcccctctccctgacggcgtcggcctccggcctgtacggcgcgcgcaccaagaagaggaggaagctgctgctgctgccgcggctgccatgtcgcccaatctggagagccacatcaagagccaggtgccggcgctgctgctgaggcgcttcttcggcggggcggggcggcggcgggtgttcgtgcagacggagactgggtgcgtgctgggcatggacctcgaccgcagcgacaacgcgcacacggtgaagcgccggctgcagctcgcgctcaacgtgcccaccggcgagacctcgctcaccttcggcgaccgcgtcctggagaatgacctctccttcatccgcccggactcgccgctgctgctcacccgcaacagcatcaaccggagctgctccacgccctgcctctgcccggtgtccaaggacttcgagcacaaggatcgcagcggcctggtcgagatgctcggctgctcgatcagctgcgcccgcgtgaagcgcctcgtcgacgacgtggtcaccgccatcaggagcggcgtggatcgggtccccattggcagtgggcttggtggctcctactactacaggaacatctccggcgacagggttgccatcgtgaagccgacggatgaggagccttttgcacccaacaacccgaaggggttcgtcgggagagcgcttgggcagccgggactgaagaaatctgtcagggtgggagagacagggttcagggaggtggcggcgtacctgttggatcatgataacttcgcaaatgttcctccgacggcgttggtggagatcacacactcaattttccatatcaattgtccggtgaacggcggcagtccagctcatgatcagaagcagcaggtttccagcaagatcgcttcgtttcagcagttcatcgcgcatgacttcgatgccagtgatcatggcacgtcgagcttcccggttgctgctgttcataggatcggcatactggatatcagaattttcaacactgacaggcatgctggtaatgtgctggtgaggaagcttgatggtggcaccggtcgctttggttgtcagacggaattgtttccaattgatcatggcctgtgcttgccagagaatttgtaggacccttatttcgagtggatccactgggctcagtcatcaatcccattctctgaagaggagctcgagtacattaagaatcttgatccaatgagggatgtggcaatgctgcgtagggagcttcctataatccgcgaggcctgccttcgtgtcctggtgctgtgcacaatcttccttaaggaggctgctgcttctggtctttgcttggcagagataggtgagatgatgaccagggagttcagagggttggaggaggaaccgagcaagctggaggttgtctgcatggaagctaggagaaaattagctgagtgggaaccatactcacctgtcatcgaacaaggggaggacatggatttccaattctcactggacatgttaggagagtacaatgatgtgattaggtcaccaagattcaatggcttaggagcaaaggggaatggtttcagaaaccctctttcaaagcttgtggagagcatcgatgaggacaatgatgatgatgatggccgaagtgaatcttccaagcgttcatcggagcgtgtccattctggagggttgaagttccccagtgctgataaatccagcggttctaacggcagtgtgcatgctctgaacaggagtgcagacgaacagcttccatcaagtgtatacttcgtcaggctgtcggacatgaatgcagaagagtggaatatattccttgagaagttccaggagctgctgaaagaagctctgcaggagcgtgcggcggctgcagggcagcggatgaagcagcggctgggcacttcctgcaagttttgagtaggaccatagagcagcagagaagaaaaataatgtaatgcttgctacttgtgttgcttattatggagtgagtacaggaagggatatatgctcatgtgagaaatgcctacagctttgtgcaatgttgccatgtaaacttgttatgttcaggtagacaagatcaggatggtgatgggtgtggagaagggctattatgcatgttgattaactatgttaaacaggtgcttcttaataaatgcttgtcagcttgtgtatattgtgttagatgccaaatatgtcaatggtgtttttcatagctgttggtgaacattctttgtgctgtgagatgtaaatatgctctcttttgatgt

SEQ ID NO: 14682 - DNA, 1820 bp, Oryza sativa
  ref <308>: DATABASE ACCESSION NUMBER: AK065238
  ref <309>: DATABASE ENTRY DATE: 2001-12-06
gagatttcatatctacatataagcacggctcatcactttgccatccaacaatgtgggcaatatagtatatatcgaggtgccacaaataaatggaaggtatccatgcagggacggtgacgatggcctgcagctggcttgttctcacggccgccatggctgtgctagcctcttggttgatccgtttggtttcactaaaatggaacagcagccacccatgcaaagctgatgaaggcagcaggctgccgccagggtcgaggggccttcctcttctcggcgagtcgctcgagttcttcacttcgagcacctctcttgagctgcccgtcttctttaagcgccgtcttaataggtacggtccagttttcaggacgaacatggtcgggcaagacctgatcgtgtgtctcgatccggaggtgaacagcttcgtgttccagcaagaggaaaggctcttccagtgctggtaccctgattcgttcatgcggatcatcggcgccgacaacatcatcacgacgctcgggtcgtcgcacaagtacatcaggaatctgatccttcggttgttcggccctgaaaacctcaggcgtgcgatgctccaggacgtgcacagaacggctcaggccagcctgctctcctggctcgatcgaccgagcatcgaactcaaggatgcagtctcaagcatgatattcagcgtcacagccaagaagttaattagctatgactccttggcctcagatggaaagatgtggaaacaatttgatgctttcattcgaggtctactggcatttccaattggcattcctggcaccgcattctacaaatgtatgcaggggcgaaagaatatcatgaagatgctgaaagaattgattgatgagaggaaggaggcatcagggcgacggggaagcattgacttcattgatgtgctgctcgaggagctgaacgaggagaagcctttaatcagtgagaacgttgcgctggatttgatcttcttgctgctatttgccagcttcgagaccacggcatccgctataaccgcagtggtcagatttctaacggataatcccgaggcattgcaagaattagcagaggagcatgataacattcagaaaagaagggtcgacctgaactctgaaatcacatgggaggaatacaaatctatgaaatttacatctcatgttatacatgaagctttaaggcttgctaacattgctccagtgatgtttagaaaagccacagaggatgttcatataaaaggtttttttatcccaaaaggatctaaaattatgatttgtccttccacggttcacctaaaccctatgatttataaggatccaaatatattcaatccttggagatggaaggatactgctgaaccaaccggtggtgcctccaaggatttcatggcctttggagggggactgcgcttgtgtgttggtgcagatttcgctaagctgcagacggcgatcttcctccactgcttagtcaccaagtatagatggaaagcgatcaagggaggaacaatggtgcttggtccaggactacgattccctgaaggttttcacatccaacttttcccaaaaccttgaagtaccggggccagatacttctagcccctacacaatatatgtagctcagaagcaacgtttgagatctatattgttgatgattggtacttcgatgtaatttccattaattttctgctgttcccattagttcactgctgaatgagctatgcttattcttcactttgccataaatgttgtgtgatgtccaaatatcacaaataaatgtagatatgtttgagtcctcttaagtaaaaataatttgcg

SEQ ID NO: 14683 - DNA, 1856 bp, Oryza sativa
  ref <308>: DATABASE ACCESSION NUMBER: AK065239
  ref <309>: DATABASE ENTRY DATE: 2001-12-06
gacggcctcctcctctcctcctcccctgcacagaccactcgtttcctccacaaagagggagggaacaagggaagggtgtcgcccgccccccaccccgatctgcctccgccgctccgctcctccgcgcctgcgaaatctaccaacgctaactcagcaagatgggtgccggcggcaggatgacggagaaggagcgggaggagcagcagaagctgctcggccgcgccggcaatggcgcggccgtgcagcggtcgccgacggacaagccgccgttcacgctggggcagatcaagaaggccatcccgcctcactgcttccagcgctcggtgatcaagtccttctcctacgtggtccatgacctcgtgatcgtcgccgcgctgctctacttcgcgctggtcatgatccccgtgctgccgagcgggatggagttcgcggcatggccgctctactggatcgcgcagggctgcgtgctcaccggcgtgtgggtcatcgcgcacgagtgcggccaccatgccttctccgactactcggtgctcgacgacatcgtcggcctcgtgctgcactcgtcgctgctcgtcccctacttctcgtggaagtacagccaccggcgccaccactccaacaccgggtcgctggagcgcgacgaggtgttcgtcccgaagcagaagtcggcgatggcgtggtacaccccgtacgtgtaccacaacccgatcggccggctggtgcacatcttcgtgcagctcaccctcgggtggccgctgtacctggcgttcaacgtgtccggccgcccgtacccgcgcttcgcgtgccacttcgacccctacggcccgatctacaacgaccgggagcgcgtccagatcttcatctccgacgtcggcgtcgtgtccgcggggctcgccctgttcaagctgtcgtcggcgttcgggttctggtgggtggtgcgcgtctacggcgtgccgctgctgatcgtgaacgcgtggctggtgctcatcacctacctgcagcacacccacccggcgctgccgcactacgactcgagcgagtgggactggctccgcggcgcgctggccaccgtggaccgcgactacggcatcctcaacaaggtgttccacaacatcacggacacgcacgtcgcgcaccacctctcctccaccatgccgcactaccacgccatggaggccactaaggcgatccgccccatcctcggcgagtactaccagttcgacccgacgcccgtcgccaaggcgacatggcgcgaggccaaggagtgcatctacgtcgagcctgaggacaacaagggcgtcttctggtacaacaacaagttctaactgctgctgctgtgaaatcagcatcacacatccatagccaagcagcaaacaaatttgaagaagaagattacaagggaagagaagatagtgtcttcggaaatcgtcgtagcaagtatccatccatccatccaacccatgaacaatcgtctatctatccatgcatctatctatggttagtctctttagataggagagggcacttgggcacagaggaaggctattgcagtgccattgctagagttgccatcaagtgcaaagtaggcggatcaggcgtgtgtcatgcctgtggatttgtagtctatgtatgtgtcagctgctgagctccggtgtcgcagccttggtccctgtcgtgttatttccatcgtttttttccctccgccattgttcggtttaggtgttgtcatggtcggcgtccgtgtggacgacgtgtcttgtgcggtttgtctgtcattgagttggctccgtccgttgcttgctgttgtaaaacgcttgtggtgttcatggcggaataactaaacgtcgaatggaacg

SEQ ID NO: 14684 - DNA, 2736 bp, Oryza sativa
  ref <308>: DATABASE ACCESSION NUMBER: AK098912
  ref <309>: DATABASE ENTRY DATE: 2002-08-28
gtccttcatttggcaacctccacaactcatcaactccactcctcccctcccctcgcaaaccaaacccaagcaaagcaagcatccaatgcttccccccttcctccctaatcacccccgctaatcgctcccgacgccaccactaatcgaagccggaggagggaggcggcggcgggatggacaccgcgtcgttcgtgacgtcgctgctgacgtcgttcgtgatcttcgtcgtgctggtgctggtgttcacgtggctgtcgagcaggccgggcaatgcgccggtgtactacccgagcgtcctgctgcgggggctcgacccgtgggaggggcgggggcgggggacgaggagccccgtcgggtggctgcgccaggcgatctccgcctcggagggtgacgtcgtcgccgccggcggggtcgacgccgccgtctacctcgtcttcctctcctccgtgttgtccatcttggtgttctctgggattgtgctgcttccagttctgctacctgttgctgctactgacgataacctgaacctggaaagggctattggcctgaagaatggcaaaacaccccagaacttcacagagctcgagaaattagcactgggcaatgttcaagaacatagccgaaggctgtgggcatttctattatcagtctattgggtctcttttgtcacgtacttcgtactatggaagtcctacaagcatgtttctaatatgagagcggctgcaagatcaacaccagatgttaaaccggaggagtttgctgtgttggtgagagatgttcctaagccacctcctgatcaaactataaaggattctgtagactcatatttccgagcacttcatcctgataccttctacagatcaatggttgtgactgaccacacaaaggctgacaaaatttatcaagagattgaaggtcacaaacagaaaattgctcgtgctgaagttgtctatgcggagtctaaaacaacaggcaagcctgagggcaccaagcctacgcatcggattggatttcttggtcttatcggtaaaaaggttgatacaattgagtattgtaatgaccaaatcaaggagttgctgcccaaactggaggccgaacagaagactacccttcgtgagaaacagcaacaggctgcaattgtgtttttcaacagaagatctgctgcagcttctgcatctcagactctccatgctcatatgtttgataaatggactgttgagcaggctcctgaaccacgccagataatatggtctaatctttccaagaaaatatatgagaggcaaatcagacaggttgtggtctataccattgtctttctcacagtggttttctatatgattcctattactgctatctctgctcttacaactttggagaagttgagggagaagcttccctttctgaaggtggtggtggaccaaccgaaaatcaagactgtcctacaggcttacctcccgcagcttgcacttattgttttccttgctttgctgcctagtcttctaatgttcctctcaaagctggaggggattccttcacagggtcatacagttagggcagcagcagggaagtacttctacttcattgtgttcaatgtcttccttggggttactattagttccacattgttcagtgctctgacaaccataatcaataaccctcctgggattgtgaacatgcttgccagcagccttccaggaagtgcaactttcttccttacatttgttgcactgaaattctttgttggttatgggcttgagctctctcgcttggtccctcttatcattttccacctgaagaggaagtacctatgcaagaccgaggatgaagtgagagcagcttgggctccaggcgacctaggatataacaccagggttccgaatgacatgctcatagttacaatagtgctgtgctactctgtcattgcacctctgattattccatttggtgttgcttactttgctcttggatggattatagtgaaaaatcaggttctccgagtttatgttcccagctacgagagcaacgggcgaatgtggccacatatgcacacaaggatcattgcagctctactgatttaccagatcaccatggttggtgtcatcctgctgaagaagttcttgtactcccctgttcttgtgcccctcatcccaataagcttcatcttcgcctacatttgccatatgcggttctacccggcgttcgccaagacccctctcgaggtggttcagcacaacgtgaaagacacgccgaacatggatgccgtctacacctcctacatcccggcttgcctgaagcctgagaagctagaggatgtggatatcttcgaagacgcccagttgcacaccacctccagagccccatccatctaatgcaagtgctggttgcttgtgtcgagaccggagagtattactcatcatcactgcaaacgaatttctgatgaatttccacgttgaaatgaacccctgtgaagtgtgaatctgctattgccaggataggaaaacttatgtcatgtccgtgtacataatatgcactcgggattgcttgccttcttaatgtgtgtgttgaggtttattctttacttcatagttctaggtagctgctgtggatatcgcgcctttttaagtttaagtttctatcatatgttcatgctcgtggtgactgctaaatctagtcctcttatgtgtaacaaaactcagaaatctgttgcctagtgcaccgtaacctgattgataattt

SEQ ID NO: 14685 - DNA, 2285 bp, Oryza sativa
  ref <308>: DATABASE ACCESSION NUMBER: AK065240
  ref <309>: DATABASE ENTRY DATE: 2001-12-06
gacttaacaccaaagcctcggtctgtgtctgtccgccccccaacgcctcgccggcgcccagcttctcttccttccttccttgttgaggtctgaggtcttggatggtggccttatgacacacggcctgcactagtgtttacagctccaagtatggcttccagagaatccttcatgagtaccattttcttcttcttgcttctgttctccctcggctgcaagtgtatagcttcagagttacacttacatgcgacccagactgcggtcctcaaggttgatgcctcaccgcaacttgctcgacagatccctgacacactatttggaatattttttgaggaaatcaaccatgcaggggctggtggaatatgggctgaacttgttagtaacagaggttttgaagctggaggccctcataccccatcaaacattgatccatggtccataattggtgatgactcttccatatttgtggcgactgatcgaacgtcatgttttagtcggaatactgttgctctaaggatggaggttctctgtgataattgcccagctggtggtgttggcatttataacccagggttctggggcatgaacatagaagatggaaagatctacaatttagtgatgtatgttaaatcaccagaaactgtggagttgacagtttccttaacaagttctgatgggtcgcaaaatttggcttcaactaccataccggtttctggtgcatcgaattggacaaaactggagcagaagttggttgctcaaggaacaaatagaacctcaaggcttcaaataacaactaacaagaagggagttgtatggtttgatcaagtatcgctcatgcctgcagacacttacaagggacatggttttcgcacagaacttatatctatgatgttggacttaaaaccacgattcttgagattccctggaggttgctttgtggagggggaatggttaaggaacgcattcaggtggagggaatctattggtccatgggaagagaggcctggacactttggggatgtttggcattactggactgatgatggccttggatattatgaatttctccagctttctgaggatctgggtgctgccccaatctgggtgttcaacaatggaatcagccataatgatgaagttgatactgctgcgattgctccttttgtaaaagacgtattggacagtctagaatttgcaagggggaatgcagattcaacatggggttctgttagagctgcaatggggcaccccgaaccattccctgtcaaatacgtcgcaattggaaatgaagattgtgggaaaaaattttaccgcggtaattacctcaagttttataatgctataagggaggcctatccagacattcaaatgatttcaaattgtgatgcttcatcaagtccacttgaccatcctgctgatttatatgatttccatgtctatactgattctaagactttgttttcaatgaagaatacatttgatagatcatctcgtaatgggcccaaggcttttgtcagtgaatatgctgtttggagaagtgatgcaggtagaggaagtctacttgcttcattggcagaggcagctttccttactggactggagaagaatagtgatgttgttcagatggcaagttatgcaccactcttcgtgaacaacaatgatcaaacgtggaacccagacgccattgtatttaactcctggcaacaatatggaactcctagttactggatgcagactcttttcggtgaatctagcggtgctatgtttcatccagttacaatcacttccagctactctggttctctggcagcatctgcaattacttggcaggattctgaaaatagcttcttaagagtaaagattataaactttgggtctgatccagtgagcctcacgatctctgcaactgggcttcaggcccgtgttaatgcactgggatcaactgccactgttctcacatccagtaatgtgatggatgagaactcttttagtaacccgaataaggttgttcctgtcaaaagccagctttccaatgcagcagagcagatgcaagtcacgcttgctcctcactctttctcctcattcgatcttgcgcttgcccagtccaaactcgtggcagagatgtgaagcagcaacacaaggttagcgacagaaacacaagaaatacacgagatgtgatatgcgaataccagaatgctgtccatatatgtgcatgtatcttgaagcactactgtatagtgtaatacacagggaatgatgaataaaattcactcctggcttacttc

SEQ ID NO: 14686 - DNA, 2736 bp, Oryza sativa; identical to SEQ ID NO: 14684
  ref <308>: DATABASE ACCESSION NUMBER: AK065241
  ref <309>: DATABASE ENTRY DATE: 2001-12-06

SEQ ID NO: 14687 - DNA, 937 bp, Oryza sativa
  ref <308>: DATABASE ACCESSION NUMBER: AK098913
  ref <309>: DATABASE ENTRY DATE: 2002-08-28
ggggaggttcggagatggccgcggctgcggagacctcggcgaaggtgggggcgccgagaagatggtctcttcaagggaagacggcgctcgtcaccggcggcacccgcggaatcgggcgtgcggtggtggaggagctggcggcgctgggggccaccgtgcacacatgctcccggaaggaggaggagctgagcgagcgcctcaaggagtgggaggcccggggattccgcgtcaccacctccgtctgcgatctctcggttcgggaccagcgtgagcgcctcctccgccaagtcgctgacctcttcggcggcaagctcgatatcctcgtaaacaatgtggggacaaacataaggaagccaaccactgaattttctgccgaggaatactcttttatgatggcgactaatcttgaatctgcgtatcatctgtgccaactttcgcatcctcttctgaaagcatctgggtcagggagcattgttttcatatcatcagtctgtggattggtagctgtatttagtggttctctctatgctatgacaaaaggtgcaatcaaccaattaaccaagaacctagcatgcgaatgggcgagagacaacatacgatccaactctattgccccgtgcttttggcaaataaggactttgaaggtgctgtggtgagccgaactccacttaggcgtgttggagaacctgaagaagtatcatcgctggttgcttttctttgcatgcctggttccagttacattactggccagacgatctcggttgatggaggtatgaccattaatggactctatccaagttaagattaatggactatcaagaagacggtatgttcctgctgtccagaaacggccatatatgttgttcttgggctttgcaagcagagcgaatattgtgtaaactgacatcaccatgaatatatatttcttgtgcgtttg

SEQ ID NO: 14688 - DNA, 1226 bp, Oryza sativa
  ref <308>: DATABASE ACCESSION NUMBER: AK065242
  ref <309>: DATABASE ENTRY DATE: 2001-12-06
caacctcgcttccttatccacaccaatccgccactcccctccgcggcaacccccccgcgctccgccacagaagccgacgccgacgccgcgcgcgtacatgccgccgctccacgccgtctcccccgcggcggcggccgccccgccgcgcgcgctctcctccgccgcgcgcgtcccgcagcgcccaggttgtgttccagaacgcccaaacattttaagctcctccacaaacttcatgagtctccgtgctggaccaatgcgcttctatagcaggcctcttattcttcaaaactcggacaagagagcagtattgaggcatgccactattgaagaaattgaggcagaaaaatctgacattgaagaccaagctagagaaaggatggaaaaggcaattgaaacagtccaaaataacttcaatactgtgaggacagggcgggcaaacccagctatgcttgacaggattgaggttgagtattatggaactccagtgaacttgaagagcatcgcacagataaacactccagatgcaacttctctccttattcagccatatgacaaatcctccctcaagctcattgagaaaacaatagttgctgcaaatctgggggttacaccaagcaatgatggagaagtgattcgagtcactgttccaccattgacttctgaccgcagaaaggaattggcaaaaactgttgctaaattagctgaagaaggcaaggttgctataaggaacataagaagagatgccatcatagcttacgataagcttgagaaggaaaagaaactttctgaagataacgtgaaggatttgtccgctgatctacaaaagttactgacgagtacatgaaaaagatcgaagctatccaaaagcagaaggaacaggaactcatgaaaatttagacaccaggttttaatcttgaaattggtgagttcatcttcctgcgaagtagatgaagccgaagaaaacaatgtcctcagctaacacggtgaattatgcggtcacagatttcttgagccttttccatctttctgatggccggcattttgccggatgcatctttttgggctggagtgcaatttcagacaatgttgccgtgtccttcattttcatttttgtaattattgtgtgtactccgtgtaaaagtaggtcttgaccttatccttgttctaccgctacattgtcaatattcctcacgtgaattaaaatgctacagttgtgaatttatcgc

SEQ ID NO: 14689 - DNA, 1465 bp, Oryza sativa
  ref <308>: DATABASE ACCESSION NUMBER: AK065243
  ref <309>: DATABASE ENTRY DATE: 2001-12-06
gatacctgcgaatattccggtgacagcattgggccgtctcgctcccgccacacgcgcgaatgccgctcctccacctctcgccgccgccgcaccgcctcctcctcgccggcggcggccgccgccgcctactcctcccggcggctcgccgccgctccctcgtccgcgtcagggcggcggcgtcggcggccgcggccgcggcggaggcgtacgggctacccttccctcctgagcgcgccgcccaccaccgggagctcgcggcggccgccgcggccgtcgagcgcgcctgccgcctctgcgtagacgtgaagagaacgctgctttcgggtgacaagaagattcttgaaaagaatgaccaaactcctgtcacagttgcagattttggagtacaagctcttattagtttagagctccagcgattgtttccgtcaatacctctggtggcagaagaggattcagcttctctgaggtcatccaatactgatgataacagtagtaatgttcttgttgagtcaatttcaagtgctgttgcagaaaaagtgagtaacgccaattcacttttaactcatgatgatgtgctgagagctattgatagaggaggcaagaatgctgtatcctttgattcaaatcctgctagttattgggtacttgatccaattgatggcacaaaaggtttcttgggaggggacgatgctctgtatgtggtggggctggctcttgtggtaaatgaaaaggtagtagcaggagtgatgggatgtcctaattggtctaatgctaccatagccagcagaaaagaagtcagcgctgctgcccaacctgatcatgggatccttatgattgctcatgtgggctgtggaacttggtctaggcatttgtctgtcgatattggccagttcactacggcacagagtacttggaatagatgcttagtggattcttgttcagttgtgaacatggcacgcttttgcattcctgatagccaaacctggaatatgataccgctatctgttctcttcaactcaacaatggatgaatccaatcctagagatgagaatgaaattctcctcttatctgtttactgtggcagcttgtgcaagtacctaactgtagcttctgggagagcctccgtttttgtacttcgggcacggacgaaaaatctcaagtcttgggatcatgctgtcggagtaatttgtgtacaggaagctggaggtcagattagtgactggagtgggaaaccgttggatcttgcagctgacctaactgggcgcagagacatttacccttcaggtggtgttctcgtcaccaacggtgctctgcacggcaagctggttgaaatgatctcagcaaatcacaagtagcggcaaattttgcataactgcgcacataacacagatttttcttttgttaacattttacctcatcaaccatcaaaatgtatttggtctctcgttcgggagagaaaccttgc

SEQ ID NO: 14690 - DNA, 1142 bp, Oryza sativa
  ref <308>: DATABASE ACCESSION NUMBER: AK065244
  ref <309>: DATABASE ENTRY DATE: 2001-12-06
gtgttgtagcacgcacgctgtcgctgacgctgctgttccgccatggcgttgatgatgagccttcgcttcgcccccccagcgtccgtcgctgctccgccgccgcgacgaccacgagctgttgcctcttcggcgtcctctccggcactccaacgccgccgcccgcagaacgtccccggcgacttcttcgtcgatcaccgatgcatcgattgccagacctgccgctggatggcttcggaggtgttcaagagggtggacggaaaagccgccgtcgccgcgcagcccatctccgacgaacaaaggacattcttcaagtgcaaaacatgttcccgctccccatcgacaatcatcttctccctggtgtttacctctgtggctatcattctcaagattcatatggagcaacttcttatcttttaacccatccagatggaaacatactagttgacagcccaaggtatacaacgaaactggcagagaacatcgaaaaacttggttgagcacgctacatgtttttgacccacatggatgatgtcgcggatcataggaagtgggctgagcggctaaaatgtgagaggatcatccattcgggcgatgtagaggatgttactgcagatgttgagtggaaacttactggaaatggcccatgggacattggagctgatttcgaacttatccataccccaggtcatactgaaggttcagtctgcttattctacaaaccagtaaaggcgcttttcactggagatcatgttgcaaaatcagaagaatctgatgatttagatctctttcttatgtacagcaagcaatcagtgggcttgcagctggacagcatgagaaaattgttgaagttagacttcgagtggtttttacctggtcatggctatcgaatccattataaagacgtacgtgctaaggattcagcaatcgagtccctcatagctaactacacaagctaggagcgtattataattctctctaccttcattgtgtataaataacgaccgattctggaatgaaggggcaagagagaatgcacttgccattttgtcagcgagagtggcacttcatatccttggaagatgatggtactgtttttgcttcacgacatttgcaatatatcaagtcgagaatgtcattgatgc

SEQ ID NO: 14691 - DNA, 1708 bp, Oryza sativa
  ref <308>: DATABASE ACCESSION NUMBER: AK098914
  ref <309>: DATABASE ENTRY DATE: 2002-08-28
ctagggtgaatcgtagcgatagcggatcagattggaggaaaactcgctagtacgcttgttacttgcaactctttctctaatcttgcttcggaaagatatccaaatcgaagaaaaagaaaaaaaaattagaaagcgtgattagccattcctcttctcatctctagccacttcgcttcagcttttcttctttcttgatcgcgagcaaaaagggagagagaaaaaaaaacggtaaaaggacgtgattagcaaggatggtggcgatcgagaaccagagccagggccagcgggcggcggaggcggcggcgcagccacggatccccagggaggcgcggcggctactgcacgagatggcggcgtcgtgggcggacgttgccgactgccgggcgctgcaggtgattccgctcaagggcgccatgaccaacgaggtgtaccaggtgcgctggctcaacggcgccccggccaccgccgacggcggcgaggtggaggcggaggcggccgcaagggagagggaggtgaggaaggtcctcgtgcggatatacggcgacggcgtggagctcttcttcgaccgcgaggacgaggtgcgcaccttcgagtgcatgtctcgccatggccaaggcccccgcctcctcggccggttcaccaacggccgcgtcgaggagttcatccacgcaaggacactatctgcagcagaccttcgtgatcctgaaatttcagctctggtggcgtcaaaactgagggaattccacaaccttgacatgcctggcccgaaatctgtactcatttgggaccgactgaaaaactggctcaaaactgcaaggaacctgtgctcatctgatgaatccaagaaatttcggctgggtagcctggagaacgagattgctgcattggagaaagaattttcaggggattaccacgggattggtttttgccacaacgatcttcagtatggcaacatcatgattgatgaagacaccaacatgttgactatcatcgattatgaatatgccagcttcaatccagttgcgtatgacatcgctaatcatttctgcgagatggcagcagactatcattcagagaagccacatagactggactacagtaaatatccagacactgatgagcagaagcgttttgtgaagacgtacctaagcaattctgtaagtgaagaacctgatgcggaagaggtggagaaccttctccaaagcattgagaaatacacgctcgccagtcatctagtttggggcctctggggaataatatcggatcatgtcaatgatattgacttcgactacaaggagtatgcaaggcagagattcgagcagtattggcagaagaagcaagcacttttaacttcatgaattgcctgaaggcgtcaggtcgtacctgaaggcctgtgctgcacataacttgtgcgatgttactgacacataactccctgtgaaaagaagaaagatgaagatgataatgaagaagaaaccctttcgggatcaggagttctcatcccgaaatttccgtaaggttcagcttcaggaggaagctgtgggctttggttgctttgtttatagtctgaaaggcagcgaagaaaaagcccctggttgcgtgtttgtttgctcgacaaactagaggccgcttgtggggctagtagtgccgtcgtgtttcatgtgtatgtatacctaaatatatgttacataatggatcttgctttcgt

SEQ ID NO: 14692 - DNA, 1327 bp, Oryza sativa
  ref <308>: DATABASE ACCESSION NUMBER: AK065245
  ref <309>: DATABASE ENTRY DATE: 2001-12-06
gacatctcgcgtcgcgtgagacgcactcctcacgcacgggagcagcagcgatgggttctcctcctccccatcgcctgctcctcctcctcgcggtcgccgccgtgctccaccgctcggcggcggcggcggagggggtcatccggctgccgagggggagggcgtgtgcggcgccgacggaccccgcggcgtacgaccggccggtgatcggcatcgtgtcgcacccgggggacggcgcgggcgggagggtcagcaacggcacggccgcctcctacatcgccgcctcctacgtcaagttcgtcgagtccgccggggcgcgcgtcgtcccgctcatctacaacgagcccgaggagcgcctcctcgagaaactgagtttggttaacggtgttctgtttactggtggttcggtgaagagtggcccatattttgagaccataaagaaagtgtttcagtatgtcttggacaagaatgatgcagggattccatttccactttttgcacagtgtcttggttttgagcttgtaagcatgattgtcagcaaggacaataatatcttggagtcattcagtgccacaaatcaagcatctactcttcaatttcccaattactcttcacttgagggatcagtatttgaaagatttgatcctgatctcatcaagaaactaagcaccagttgtcttgtgatgcaaaaccacaaatatggtatatcacccaagacattgcgagagaatgttgccttatcaagtttcttcaagattctgacaacctcacctgatgaaaatggcgaggtctatgtctcaaccgtgcaagcaaacaaatatcctatcacatgcactcagtggcatcctgagaaagctatttttgagtttggtaaacaaatgattccacacagcgaggaggcagtacaagtgacacaaaattttgccaactattttatcagccaagcccgcaagtcccagaacagacctcccgcagacaaggtgttggacaacctgatttacaactacagccctacgtttattgggaaaaaatcgaaatcgttcgacgtggtctacatcttctcctaatggccaacctgatcattgaaagtcttcgctattgtattctacatggagtgcttcactgtgtatgagtatatatgtgtccattgtctaccattgtgctgcattgccgttgccgctgtaatttatcagacgaatcaagagcggatttcgctccctgctttggaaggaggtcccagctgtttgatccgcggtcacattattcgtttcggacccttggaaattaaacagcaaatatagttgttggcccaactgagcccgcttttcat

SEQ ID NO: 14693 - DNA, 1616 bp, Oryza sativa
  ref <308>: DATABASE ACCESSION NUMBER: AK098915
  ref <309>: DATABASE ENTRY DATE: 2002-08-28
gaacctaacgtatcatttacttccattgcactgcacatcctgtgagttcgttgtctgagtgagagctggacgtgctgcaccgagctcctggccgagatgcttgccgtgtcgccggcgatgtgccccgacattgaggaccgcgccgcggtggccggcgatgctggcatggaggtcgtcgggatgtcgtcggacgacatggatcagttcgacttctccgtcgatgacatagacttcggggacttcttcctgaggctggaggacggtgatgtgctcccggacctcgaggtcgacccggccgagatcttcaccgacttcgaggcaatcgcgacgagtggaggcgaaggtgtgcaggaccaggaggtgcccaccgtcgagctcttggcgcctgcggacgacgtcggtgtgctggatccgtgcggcgatggagccgcggcggttgaggccaagtcttcgtcgccgtcatcgacgacgtcgtcgtcgcaggaggctgagagccggcacaagtcatccagcaagagctcccatgggaagaagaaagcgaaggtggactggacgcctgagcttcaccggaggttcgtgcaggcggtggagcagctcggcatcgacaaggccgtgccgtcgaggatacttgagatcatggggatcgactctctcacccggcacaacatagccagccatcttcagaagtaccggtcacacagaaaacacatgattgcgagagaggcggaggcagcgagttggacccaacggcggcagatttacgccgccggtggaggtgctgttgcgaagaggccggagtccaacgcgtggaccgtgccaaccattggcttccctcctcctccgccaccaccaccatcaccggctccgattcaacattttgctcgcccgttgcatgtttggggccacccgacgatggacccgtcccgagttccagtgtggccaccgcggcacctcgttccccgtggcccggcgccaccatgggttccaccgccgccgccgtcggaccccgctttctggcaccacccttacatgagggggccagcacatgtgccaactcaagggacaccttgcatggcgatgcccatgccagctgcgagatttcctgctccaccggtgccaggagttgtcccgtgtccaatgtataggccattgactccaccagcactggcgagcaagaatcagcaggacgcacagcttcaactccaggttcaaccatcaagcgagagcatcgacgcagctatcggtgatgttttatcgaaaccgtggttgcctttgcctcttggactgaagccaccttcagtggacagtgtgatgggcgagctgcagaggcaaggcgtagcaaacgttcctccagcgtgtggatgatatttgcatgatagattgatggttccgttactgactgattgcttatctggtcggttcaccaaaaaatgggaaaattcgccgacatgtccttttatttttcttttggcctagcgtttcttggacatctcgtttaatttttaacttgtgcagagttcgaaagacatctttgtttcgactccgggagaaattaacctgcgtattgtaaatgtaaaatgtattggccgtgagttctcagcagctaagaataaatt

SEQ ID NO: 14694 - DNA, 2109 bp, Oryza sativa
  ref <308>: DATABASE ACCESSION NUMBER: AK065246
  ref <309>: DATABASE ENTRY DATE: 2001-12-06
taaagaaaagaaaaagaaaaaaaaaactcgagctcacgcgcacacgcacgcgacgcgacgcgaccccgaatcggaggcgaggccgccgactccgagcggatcgggccgaggtcgacggcatgggcggcggaggaggcgaggccgggggcggcgacggaggggagtcctctcctgctgcggctgcggcggcggcggtggcgggggccgcggcgctgcacatccggtgcgcgaacgggtccaagttcaccgtgcgggccgacctcgacgccacggtgggggcgttcaaggaggtggtggcggggagctgcgacgtgccggcggcgcagcagcgcctgatctacaagggccggatcctcaaggacgagcaaaccctagaaagctatggtgttgaaacagatcataccattcatatggtgcgtggcgctggtcccccagccggatcagctgcacctgctgcagcaagcccccaagcttcagctgctcctagcagcggcccaacagatggtcttggaagtttgttccctggccttggtggtacaggaactgctggtaccaggccatctggtctttttgggtctggatttccagaattggatcaaatgcagcagcagttaagccaaaaccccaacttaatgagggaaataatgaatatgccaatgatgcagaatctcatgaataaccctgatttaattcgtaacatgatcatgaacaatcctcaaatgcgtgatatcatcgaccggaatccagatcttgctcatgttctcaatgatccaagtgttctccgccagacccttgaagcagccagaaaccctgaaatcatgagggagatgatgcggaacacagacagagcaatgagcaacattgagtcttctcctgaagggtttaatatgctccgacgcatgtatgaaactgtccaggagcctttcctaaatgcgacaacaatgggtggagaaggcaacacagctccaaacccattctcagctcttcttggaaatcagggttctaaccaaccaagggatcctgctacaaatgctccaagtactggctcagagtctacaacaggaacccctgctccaaacactaatccacttccaaatccttggagctccaatgctggaggtgcgcaaggagcaacacgggcaggttctactggcaatgcaagaaccggtgccactgggggccttggagggttggggtcagctgatctgagcagtttatttggtggtcttgccggtaatacaggaactggtgctactggtggtctaggagggttgggttcagcagatttgggaagtttgcttggtggttctcctgattcttcttccttgagccagattttgcaaaaccctgttatgatgcagatgatgcagaatatcatgtctgatccacagtccatgaaccagttgcttaacttcaacccaaatacacgcaacctcatggaatcaaacactcagttgagggaaatgttccaaaatccagaatttattcgccagcttacatccccagaaactatgcagcaattactctcgttccagcagacattattatcacagcttggtcaaaatcaacctaggcaggatggtagccaaggaggcaatgcgacaggcatgcggggaaatgttagcctcgacaccttgatgggcatgcttagtgggcttggtgctggaggtggcataggtgtacccaatacatccaatgttccaccggaagaactgtatgcaacacagctcactcagctccgagagatgggtttcatcgacactgcagagaacatccaggcgctagtcgcaactgctgggaatgtgaatgctgcggtggagcgtcttcttggcaatcttggccagtagctaaagcgtaccagacgctgcccataacgtcaccaactccgctcttttgcaagaggttttttagcccctccaagttcaaacgcagcgtctgtctacagtctcaggagaaaataaaacaaagaaatcccacccccaccattaacttttccatacatggtcgtcatgcctttgtttttaccgtgttgtatttgactatttgggttgatgtacatacatatgaaattatcggatcttaccgcatagaatatgggtctacctttgc

SEQ ID NO: 14695 - DNA, 1982 bp, Oryza sativa
  ref <308>: DATABASE ACCESSION NUMBER: AK065247
  ref <309>: DATABASE ENTRY DATE: 2001-12-06
ggcgggcagcagcagcacgtcgtcgtcgctgcgcgcggtgatcggaagtcgccggcgatcgcggcgccaccaccagcgaccgtgcggatgccgggccgcgtgctctgctgcggcatgaggtcgcgcggggcggatctcgccggcgtcgagatggcggcggggccgcagccgcagggcggcgtctcggggctcttccgcggcccgcgctcgagcccgcgctactcccgcgtgcgcgccaccgccacagttgatcctgaggatattccattggagaaggttcaagctaaatcttctggaagtgttctgccatatgtgggcgttgcttgtttgggggctattttatttggttatcatcttggagtggtcaacggcgctcttgaatatcttgcaaaggaccttggaatttctgagaatgctgtgttacaaggatgggtggttagcacaaccctggctggtgcgacagcaggttcttttactggaggtgctttagctgacaaatttggacgaacacggacgttcatcctggatgcaatccctctcgctgtaggtgcattcctgagtgcaacagctcatgatgttcgcacaatgattattggccgattacttgctgggattggtattggcatatcttctgctcttgtgcccctttacatatctgagatttcacccactgaaatacgtggagcacttggttctgttaatcagctttttatctgcattggaattcttgctgctctggtagctggattacctctggcaggaaaccctgcttggtggaggacaatgttcggaatttcaattgttccatccattttgcttgctcttgggatggctgtttcacctgaaagccctcgttggctattccagcaaggaaaactttctcaggcagaaacagttattaaaaaactatatggaagagaaaaagttgctgaagttatgtatgacctaaaagctgccagccaaggttcttctgagccagatgctggctggttggatcttttcagcaaacgctattggaaagttgttagtgtgggcgcagctatgttcttgttccaacagcttgccggtataaatgctgttgtatattactctacatcggtgttccgcagtgcaggcattgcatctgatgttgcagcgagtgcccttgttggagcagccaatgtttttggtacaatgattgcatcttctctgatggacaagcaaggaaggaagagccttctgataacaagcttttctggcatggctgcctcaatgttacttctatcattgtccttcacgtggaaggctttggcaccttattcaggccctcttgctgttgctggcactgttttgtatgtgctgtcttttgctcttggagctggcccagttccagcattgctccttcctgaaatatttgcctccagaataagggctaaagctgttgcattatctctgggcatgcactgggtttcgaacttctttattggcctctacttcttgagcgtcgtcaacaaattcggaatcagcactgtgtatttgggatttgcatctgtttgcgctcttgctgttgtctacatagctggaaatgtggttgagaccaaggggcgttctctggaagagattgagcgggctctaagttcagcaagctgatctgcaactccagcaggtgactggatgggcattcaagaaaacatcctctggctttccgtccagtagatgttcattctagtcttgaaataaacgagtggctacttggcaagtgaacttcttcttcttcttcttcttcttcttgtttttttttttttttttgaactggagtggcaagtaaagttggtatctgtgaattggttggagcttcgagggttgtgaattctgacatttgtcagaataaaagaagttcatactgtagcaattagatgccagtatgccaccgcttctagtgtatagaggaacttttcttccatctgttggaaataataaaagcagctcgtcgaatttacagc

SEQ ID NO: 14696 - DNA, 1114 bp, Oryza sativa
  ref <308>: DATABASE ACCESSION NUMBER: AK065248
  ref <309>: DATABASE ENTRY DATE: 2001-12-06
ggctatcccgtcgccacctcgccccatcaccctctccctccaccacactacaccccgctccactctcaggcaggcaatcagcggcgaggcaccagcccaccggccggcaatggcgtccacctcctgcttcctccaccagtccacggcccgcgtcgccgcgcgcgtcgcctccccgtccccggcgacacggacccacctcctcgtctgccgcgcccagaagcaggacgacgccgacgtctcccgccgcgcggcgctcgcgctgctggccggagcgacggcggcggtgggggtgaaggtggcgcccgccgccgcggcctacggcgaggcggcgaacgtgttcgggaagcccaagacgaacacggagttcatcgcctacagcggcgaggggttcaagctgctgatcccgtccaagtggaaccccagcaaggagcgcgagttccccggacaggtcctccgctacgaggacaacttcgacgccaacagcaacgtctccgtcataatcaaccccaccaccaagaagaccatcaccgagttcggctcccccgaggagttcctcgcccaggtcgacttcttgcttggcaagcaggcctactccggcaagacagattccgagggtgggtttgagtcggacgcggtggcgacggcgaacatcctggagagctcggcgccggtggtgggagggaagcagtactacagcgtaacggtgctgacgaggacggcggacggcgacgagggcggcaagcaccagctgatcacggccaccgtcaacgacggcaagctgtacatctgcaaggcgcaggccggcgacaagaggtggttcaagggcgccaggaagttcgtcgagagcgcagccagctccttcagcgtcgcatgatcgtcgaaatctctatctcagcttctctttaatccctagcgaatcaaaatcaaatcaatcgagttcgttgctcagagagatgcagtgcacgcatgtgtgtgtgcgtgtgtgtttctttgattgtacatgagaattaagaacaagttaaggagagaggtcgatccatcgatttcccctgcatgcaaggattgattttctgtgatccgtgtgttaagtaatcctagtaattaatcatgttcc

SEQ ID NO: 14697 - DNA, 1525 bp, Oryza sativa
  ref <308>: DATABASE ACCESSION NUMBER: AK065249
  ref <309>: DATABASE ENTRY DATE: 2001-12-06
gtgcggtgggctccccgtaaattctcccccgaaaccgcccgagatggcggctgcggcggcgcggctgttggagagggcgacgagaaccgcggcatcctgctcctccgctcttctccgcagtcctctggattctttctccggacgcttcccaagcttccggtcgcccctcctacggccggctccggcgccgtcgaccgtcttcccccggggcctctccgacacggccttcgacgcgcaggcgctggacacccgcgtacccgccaccgtcatcaccggcttcctcggctccggcaagacaaccctcctgaatcacattttaacttcacagcatgggaagagaatcgctgtaattgagaacgagtttggtgaggtggacattgatagctcactcgttgcaagtcattcatcagttgccgaggacattgtaatggtgaacaatggttgcttgtgttgtactgtccgaggggatcttgtaaagatgcttctgaagttggtaaagcaaaagggggacaagtttgatcatattgttattgaaacaacaggtcttgcaaagcctggtcctgtcattgagacattctgttctgatgaactggtctctagatatgtgaagcttgatggtgtggttactatggttgattgtaagcatgccatgaaacatttgaatgaagtaaaggccaggtgggttgtaaatgaggctgtagagcaagttgcttatgcagacaggattatattgaacaagactgatttggttgataatgcagaactggaggtgttaattaacaaaattaagctcataaatgggatggcacagatgagaaaaacaaagtttggtgatgttgacatggattttgtgctaggaattgggggctatgatcttgataggattgagtctgaagtccagttgcatgaaagaaaagagacaggtcattgccatgctggagaagaacatgggcatcagcaccatcatggacatgtccatgattcagctgtctcaagtgttagcattgtttcggagggagtacttgatcttgatgaggtgaatgactggcttgagagactcgttgaagagaaaggggaggatctttatagattgaagggtgtaatctccgtaaatgagtcaactggacgtttcgtattccagggtgtgcactctatgttggagggatgcccagctaaaccatgggagccggatgagaaaagattcaacaaattagtatttattggaaggaatttggatgaagctgcactgcgaaaagccttcaaaggctgcttactgtgaacactctgatcacgtattgagtcctgggaagccatgcatatatcaaactgtacaagatgtttgccttgtgctcgctgataaaatgcttactgtttgtcaccaacgtattaggccaatctaaatgtgttgcatgtcatacgtgggtggtgggtcatggtttacgtttatttgtggtatcctcatctgtgccaggatcatacctgtgtatcatggacaatcagacaacagagtaaacttttttaaggg

SEQ ID NO: 14698 - DNA, 2251 bp, Oryza sativa
  ref <308>: DATABASE ACCESSION NUMBER: AK065250
  ref <309>: DATABASE ENTRY DATE: 2001-12-06
gtttcccttccccccacccgattcgtctcccccctccggcgcccctcgagttcttggattccctcttctttttcttcttcttcttgcgttggtacaacaatccgtcgagagctccgtggcgtggattggattaattctctctcgccgaggaagaaagaaaaaaaaaaacgagacggaggcatcgaggtggccgtctcccctccgccgctataacaacaagccgccgccgccgccgccgttgtcgccgctttgctctctccgctactccggcgaccggggagagggtagttgcatgatcggcaacatcaatctgaagaatggctctaaaatcaccagtggattttgctggctcaatcacttcaggccagaaggacccgtgttgttttggtgtgcccggctgcaatccgcgatgtgttagatacaataagaaatcaagaacatgccgattggttactagagccatatccgtcgatcgcccgcagctagacttctcagactcagactggaagaagcagttccaggaggatttcgataggcggttcagtttgcctcacttgaaagatgtaatcgacgttgaaccgaggccaacaacgttttccctcaagagcaggacccctctggagaatgttaatggttctatgcaaggatcatggaatggctatgtgaatgacgatgacagagcacttttgaaggttattaagtttgcttcaccaacatctgctggagctgattgcattgaccctgattgcagctgggtcgaacaatgggtgcaccgtgctggcccacgtaaacaaatatattttgaacctcagtatgtaaaggctggaattgtcacctgtggtggactttgccctggtctcaatgatgtcattcggcagattgtgcttacactggaaaaatatggagtgaaaaacattgctggaatacagcatggtttccgtggattttttgaggatcatttagcagaagtgccacttaataggcaagttgtccagaatatcaatcttgctggtggaagtttcttaggagtttctcgtggtggagcaaatatctcagacattgtcgacagcatacaggcccggaggcttgacatgctctttgttctaggtggaaatggaactcatgctggagctaaccttatacatgaggagtgccgcaagagaaaactgaaagtatcaattgtgggcgttccaaaaaccattgataatgacatactactgatggacaagacatttggatttgatacagcagttgaagcagcacagagagctataaactctgcatatattgaggcacattctgcatttcatggcattggattggtcaagctgatgggaagaagcagtggctttatcacaatgcatgcttccctgtctagtggccaagtagatatctgcctgatacctgaggtaccgttcactcttgatgggccaaatggagttcttcaacaccttgagcacttgatagaaaccaagggatttgctctgatttgtgtagccgaaggagcgggacaggaacatctgcaacagtcaaacgcaactgatgcatcagggaacatgatccttggtgatatcggcgtgcaccttcatcagaagatcaaggcccatttcaaggaaataggagtacattctgatgtgaagtacattgatcctacatacatggtccgtgctgtgcgtgccaatgcatccgatgccatcctatgcactgtgcttggtcagaatgctgttcatggtgcatttgcagggttcagtggcatcacaaccggcatatgcaacacgcacaacgtctacttgccaatctcagaagtcatcaagtccacaaggttcgtcgatccaaacagcaggatgtggcaccggtgtttgacatcaacagggcaaccagacttccactgattcaggtattgacagtggaagctcatagcaactgaagctaaaaactataggcggttttgtgctgtatagtaagagtggtgcttgtgccgcatcactcgtttgatgttttttcgtctttcatcagaaagaaacatcatcttccattgatccttgaggtgcaagatggatacaataagcacctcattgaaaagatagcttcttttttatagattagcagtacatggtttattagagaccacatagaagtagagaagatttctaactgcaagggagatggttagctcccgttacaactgcagaaacatatgtacacattacacattcttcacagctgaaataatggagagaacattgccacc

SEQ ID NO: 14699 - DNA, 838 bp, Oryza sativa
  ref <308>: DATABASE ACCESSION NUMBER: AK098916
  ref <309>: DATABASE ENTRY DATE: 2002-08-28
gagccctcgtgtttgtgtcacgttcgattctcccaagctgatcttgtgtcgccggaattgagcagggggggacgtgccgcgacggatcgaggcgatgcggcaggcggtcggcttgtgcaaggcccatcaacttcggccggccgcgctgctgtccccgcggccgttgctccggcgagcgtccccctgcctccctgcagcgggagcgggtggggagctcaggagggccagcgccgcgtcgcggttggtggtcaggaggagatgccaagaagaggagcagcagcaacagcaggaggaggaagagcggagcaatggcggtggtggtgatggggagcaagagcagagaacatttctcagcttggaggaggccgggctggtggagatgtccggcctcagcacacacgagcgattcctctgccgcctcaccatatcgtcgttgaatctcttgagagtgatttcggagcaagaaggcgtccccattgaggagctcaacgcaggccttgtttgcgactggttcgtcaaggacaagctcaagagggagcagaacgtgggctcagctgtcctgcagtgggacgaccctggtttctagctccatcatccgtttatggatgatggtgatttggtggtcttgccggcgtctccaccgagaaacagggttcatcaagtcaacatttttctcggttgatagagctcactgatcgctttctttgaattaaagagggttcctttgtcttgcgacactcgttgtgcctaattgggctttttacatgtcagtacatgacgacctgtatcacttcctttgtatgccagagaccaaagccagaaacacagcttaattacg

SEQ ID NO: 14700 - DNA, 4503 bp, Oryza sativa
  ref <308>: DATABASE ACCESSION NUMBER: AK065251
  ref <309>: DATABASE ENTRY DATE: 2001-12-06
gactacccccaaagcagcagcaagcggcatcagcagcgagcacccaagctaagccagcagcagcagcagcagcagccaagccaattcccccaaatcgcctcctcccaaatgcgactcctcctcctcccctgacgaaaccctccccctccgcctccgcctccgccatgtcgctgcagccgccggcggtggagccgccggagtggctgcggacgctgcccgtggcgccggagtaccacccgacgctggcggagttcgccgaccccatcgcctacatcctcaggatcgagccggaggcgtcccgctacggcatctgcaagatcgtgcccccgctcccgcggccccccgaggacgacaccttccgccgcctccaggccgccttcgccgccgcggcctcctccaatggcgacccctccccgaccttccccacgcggctccagcaggtcggcctctccgccaggaaccgccgcgccgccagccgccgggtgtgggagagcggggagcgctacaccctggaggcgttccgcgccaaggcggccgagttcgagcccccgaggcacgccgcgccgcccaggaaccccacccacctccagctcgaggccctcttctgggccgcctgcgcctccaggcccttcagcgtcgagtacggcaacgacatgcccggctccggcttcgcctcccccgacgagctccccgacgccgccaatgccaccgacgtcggggagacggagtggaacatgcgggtggcgccccgcgcccgggggtcgctgctccgcgccatggcccgcgacgtggcgggcgtcaccaccccgatgctgtacgtggccatgctctacagctggttcgcctggcacgtggaggaccacgagctccacagcctcaacttcctccacttcggcaaggccaagacctggtacggcgtcccccgcgacgccatgctcgccttcgaggagacggtgcgcgtccacggctacgccgacgacctcaacgccatcgtggcctttcaaacgttaaatgagaagacaactgtcttatctcctgaggtgcttctttctggtgttccctgctgcagattggttcaaaaagcgggagaatttgttatcacattccctggagcttatcattcaggctttagccatggatttaattgtggggaagcatcaaatattgcaactccccattggttacaagtggctaaagaagctgcaatccggagggcttcaactaattgtggtccgatggtgtctcattatcagctgctttatgagctagcactctcattgcgtccaagggagcctaagaatttctattctgttccaagaagctcacgtttaagggacaagaataagaatgaaggtgatataatggtcaaagaaaattttgttggaagtgtaaccgaaaacaacaatttgcttagcgcccttctggataagaattcttgtataattgttccaaacgctgatttcttcgttccatcctttcctgttgcactggaatctgaagttactgttaaacaaaggtttacagctggtccctgcagtattagccagcaaggagcagaaaatatggctgctgatcatgtggctgtagacaaggttacagagattcaggacatgagtggatccttatatccttgtgaaaccagtcttgtgggctgtagcaatagaaaactttatgaaacaaaatatggccaacgggatgctgctgctttgtgcttatctacttcagagattcagagcagaggaattgatacagcaagatcacatccagcaggcgggatcttagatcaaggacggttgccatgtgtacagtgcggaatactaagctttgcatgtgtagccatcattcaacctagagaagcagcagtacagtttatcatgtctaaagagtgcatctcatcgagtgcaaaacaaggaggaattggtgcatctgatgatacctcaaactggattgaccagagtcatgagattagtcctccaccaggtccagcatctggaacagatgataatgtaaagcatgccgtaagtttggcccatgtctctgatcggtgtagagaactatatgccagcaatacagatggatgcacctctgctcttgggcttctagcttctgcatatgactcatcagactctgatgatgaaacaactgaggatgtttcaaaacatagcaagaaaaatgattcagtaaaccaaagcacggatcctcaaatcttggaaacatcagctagctgttccagtacagttcagtgtcaaaagacaaattcacacttgcatgaagaggaatgtgaggcaagagccacatcattgatgaaacctgtaagccataatagtaggcccattagtcagtctaacagggatacagatatcgaccattttatagaactgggaaagtcaggaacacagtgttcaggttatcttgatttggttgatgatctaactacatcagttttaaaatcctcttcagatacttgtgtaagtgcagctaaagcctcaatggatccagatgttttgaccatgctcaggtacaataaagactcttgcagaatgcatgtgttttgtcttgaacatgctttggaaacatggacacagcttcaacaaatcggtggtgctaatattatgcttttgtgccatccagaataccctagagcagagtcagcagcaaaagtcatagcagaagaacctggtatcaagcatgattggaaagatatcactttcaaagaagcaactgaagaggacgttaaaaagattcagttggctttacaggatgaagatgctgaacccactggcagtgactgggcagtcaaaatgggtatcaacatatattacagtgccaaacagagcaaatcaccactttacagcaagcagataccatacaaatccatcatttataaggcatttggccaagaaaacccagacagtttgacagattatggatgtcaaaagtcaggctcaacaaagaaaaaggtggctgggtggtggtgtgggaaagtttggatgtcaaatcaagttcatccacttctagctcgtgagcgtgaagaacagaacagtagcgtagtgtacggcaaagcaatgttcactactatttcccatggcaaagtacaagatgaagcgtcaacaagatgcaatacaagcaaccgaaccccatcaagaagaacatcaagaagaaaaaagggggtatctgctgagaaatctaaaccaaaaaacaagagatccactgcttctgatgaagctagtatgctttgcagtggccttggaatgaactctggagttatccatgaccaaactgaaaactctgatgattatgacaaacatggcaatggagatgaaattgaggaaggaacaaatcctcagaaatatcaacaacgtaaattgcaaaacgtgaccaggaaatcaagttctaagaagcggaaggatgagaaaagaacagatagttttcatgaactatatgacgaggataatggtgtggattattggcttaacatgggtagtggagatgatgccacactaggtaactctcgacaacaaagtcctgatccagtgaaagtgaaatctggaggcaaattgcaaggtaagagaaaatctagcaagtacaagtccaatgatgatttgttgaatgaagaaaataagttacaaaagatgaacaaaaaatcaagctctaagaagcaaaagaatgataagataaatagacaacttcaagaagatcaaaccgaagatgaccatatggaccacttagttgacgtagcggttgcagatgaagtcacactagacaatgaggataaaattacagaagacaaaattgatgacgtgaaagtgaaatctagaggaaaatcgcaaaatggtaagagaaaaggcagcaaacatcaggctaccgatggtttgcgcgctggaaataaagtggccaaatttccgtgtgatatagaaggatgtgacatgagcttcagtacccagcaggacttgttattgcataagcgtgacatttgtcctgtcaaaggatgcaagaagaagttcttctgccacaagtacttgcttcagcaccggaaggtgcatatagatgaaaggccacttaagtgtacatggaaggggtgtaagaaggcattcaagtggccatgggcgaggacggagcacatgagagtccatacgggggtaagaccttacgagtgccaggaacctggctgtggtcagacattccgattcgtttcagatttcagccgccacaagagaaagactggccattcctctgataagagaagaaagaacagtacataacttctaaccgctgtgcgcaaagtacaggtttcttctctgacgatgatctgaagagggatgctaattgaataattgcatcagattccatttattgtgggattagcccacattaggagtctaattcatttcattgtttgccggctctgcataacagccaatttttcaattgctttaggtccaactgaccttttgttgactaggatttactcccaagtcaattgtatcaaccggtcttctgttc

SEQ ID NO: 14701 - DNA, 1976 bp, Oryza sativa
  ref <308>: DATABASE ACCESSION NUMBER: AK065252
  ref <309>: DATABASE ENTRY DATE: 2001-12-06
ggcacggcttcttcgtcttcttctcttccctcctctcgcccaccccccctcgcagatctcgccgcgctctcctcctcctcctcctcctcctcctccgccgccgtctccgcgaagtcgttcccgccgccgccgccgcgggcaccgcccacgcgctccgttccggcaggcggcgcgcgctcgctcgctcgctcttggtgtctctggagaagaagcggagagagagagagagagagaggtggagaggagggagggggtttgctggggtagtctctagaggctccccctgctgccgccatcgccgtcgacggctcctcctcccctcccccggtggagatccggggtggtgttcctcgggttcacgcataggaggtggcggctgcgcgcgcagaggctcgggggcgagggcggcggcgcgggcgagatgaaggggtcggccatcccggcggtcgcgatcatgccctcgccgctcttcctctggcggttcaaggttgtattgtttctcctatggggtttatgctgttgcaagataggttgggactctgttatgagaatgagtgctgatctgcgagacttatttctttacgaagctttcttatactacaatccgcttcttcttgtggctctgatgatttggttatggggagtaaacctgtgggtctttgcacaatcatcagtgaattacgcaagggtgtttgatcttgcacaaacacatttatcgcatcgagaaatatggaggtgtgctacttggcttactttgattgttcccacgagtatgacagcttacctatatttgtactcacatggagaagtgtcccttgctgcatctcaaccggttcttttatatgctatccttcttatagtcctcttatctccttttgatatgttttacctgtcgtcacgcttttactttctgaggacagtgtggcgtataatgcttccattgcaagcaattacattccccgacttctttttggctgatatttttacatccatgtcaaaggtcttctcagacttggaacgttcagtttgtcgcatggtcaatcggcaggttgcaacgaccgcttggcttgaagcagattcaatttgtggcagccattctgtagctattcctctagttcttgtgttcccttatttgtgtcgactcttccaatgccttcgacaatacaaagatacaaaggagaagacttgtcttcttaatgcactcaagtactcgacagcggttccggtgattttcctttcagctctcaagtatcatgtattccctgacaagtgggttagcttttatcgacccctctggcttatgtccagtgttataaattcgctgtattccttttactgggatataaagcgagattgggatttgagcatcttaactaggattttcatgttcaaaaacccaagtacatggactaaccttctttatgggcagatctgggtatattactgggtgttagccagcaatcttgtgctccgctgtacatggacgtacaagctttcagcacatcttcggcacaactacctgacagtgtttacaatagcagcgctggaaatattgaggcggtttcagtgggtgttcttccgtgtcgagaacgagtggaacaagatgacagccaagcagagtctggaaatgtcatctgacatgccctctgaaggagacaggcttttggattcaaatagtcatacagtatgaactacgaaccgcaggtctcatattttgtgataccgattcatcattcttttagtgacccttatagcccgattcaagtcgaaaattctgttttgtttgtagaggccaaaaggtcagggttacatgataggtttctataaaaattgatattcttggcacactacatatgcaatccttttggctatatatatatatatatatatatataccatttgtaatcccattgaatccaaagaggtgtttgttgacagttgacacatcaaagaggaatattaataccaaagatttt

SEQ ID NO: 14702 - DNA, 2162 bp, Oryza sativa
  ref <308>: DATABASE ACCESSION NUMBER: AK065253
  ref <309>: DATABASE ENTRY DATE: 2001-12-06
gatactctcactctgtctcctcccccgcgtcggtcgcttcgcttctactggaggagagcagaggtggtggttggtgagagaggatgcgcggcggcggcggcggcggcggcggcggcggcgaggaggccggccagaagctgaagagcatggacgtcgacaagctggagaacggcggcgacaagcccgccctcaagtaccacggctggagggccatgcccttcatcatagggaacgagacgttcgagaagctggggacgctggggacgtcggcgaacctgctggtgtacctgacgcaggtgttccacatgcggagcgtggacgcggcgacgctgctcaacggcctcaacggcaccaccagcctcgcccccatcatcggcgccttcctctccgacgcctacctcggccgctacctcgccctcgccatcgcctccgtcgcctccctcatcggcatgttcttgctgacgatgacggccgccgcggacgggctgcacccggcggagtgcggggtgggggagacgtgctcgaaggcgacgtcggggcagttcgcggtgctgttcatgtcgttcgcgttcctggtgctggggtcggcggggatccggccgtgcagcatgccgttcggcgccgaccagttcgacccccacacggagtccggcaagcgcggcatcaacagcttcttcaactggtactacttcaccttcacctccgccatgctcgtctccgccaccgtcatcatctacgtccagagcaacgtcagctggcccatcggcctcggcatccccaccgcgctcatgctcctcgcctgcgtcctcttcttcatgggcaccaggctctacgtccgcgtcacccccgagggctcccccttcaccagcatcgtccaggtgttcgccgccgcggcgaggaagcggtcgctcaagcagcccaaggaccccaagcaggacctgttcgacccgccgcacaccagcgccatcgtcaccaagctggcgcacacggaccagttccggtgcctcgacaaggcggccatcgtgtccggccccgacgacgtgcgcgccgggggcgccgcgccgtcgaacccgtggaggctgtgcagcgtgcagcaggtggaggaggtgaagtgcctcatccgcatcgtgcccgtctggtccacggggatcatctactacgtcgccgtcgtgcagcagtcgacctacgtggtgttgtccgcgctgcagtccgaccgacacctcggccggagcttccagatccccgcggcgtcgttcacggtgttcgccatgctggcgcagacgctgtggatccccatctacgaccgcctcctcgtgccgcgcctccgcagggtcacgggcaaggacgagggcctcaccctcctgcagcggcaggggatcgggatcgcgctgtcgacggtggcgatggtgatgtcggccgtggtggaggaccggaggcggcacatcgcgctgacgcagccgacgctggggacgaccatcaccgggggcgccatctcggccatgtccagcctgtggatggtgccgcagctcatggtgctggggctctcggaggcgttcaacctcatcagccagatcgagttctactacaaggagatcccggagcacatgcggagcgtggccggcgcgctcgccttctgcaacctggcgctggggaactacctcagtgggttcctcgtcaccatcgtgcaccggaccaccggcgccgggagcaactggctggcgcaggacctcaacaaggggaggctcgacctcttctactggatgatcgccggcatcggcatcttcaacatcatctacttcatgatctgcgccaagtggtacaggttcaagggggcagccgccaactgagatgcaagtgaagtgaagtttgttcgtttgggtggttaattaattatgtcaatggcagataattaattggtggagtgcttttagctgggttttttttttctgcctcatcatttctctcttgtatttttgtatctgtggtgtcttgaattataaaatctataggattaagtgggtgaggaaagagaaggaaagaaacaaaagggttggtttcttgtaagtggttaaaattcaaagataaatgaatcttcaatcctagtaaatcgctacttgctgtttgactgattcacaaggaagtaaatgaaatagttttgaacg

SEQ ID NO: 14703 - DNA, 3100 bp, Oryza sativa
  ref <308>: DATABASE ACCESSION NUMBER: AK065254
  ref <309>: DATABASE ENTRY DATE: 2001-12-06
gcttctcccctccgccgcaggtgtgggggttcaccggtgagcgagcttggacgtggcggagggcggaattgtgggggttctttcagttctccgagcgattcggggaagggggagaggagaggtggtggatgtgagatccgatggctgctgcagcgacggcggcggcctcgccggttgaggggctcaccggcggcggcggcggtggtggtggaggagtggacgggctgttcgtggagctgtggcgcgcgtgcgcggggccgctggtgacggtgcccgccgtcggggagagggtcttctacctcccgcagggccacatcgagcaggtggaggcatcgacgaaccaggtcgccgagcagcagggggctccgctctacaatctgccatggaagatcccgtgcaaggtcatgaacgtcgagctcaaggctgagcctgatacggatgaggtgtatgcgcagctcaccctgcttccggagaagcagcaggatgggaatgggagtggtaacgggaatgtgtccaaagacaaggtggaggaggaagaggtggtgccaccagctgcaactgagcggccccgggtgcactccttctgcaagacgctcactgcgtcggacacgagcacgcatggtggcttctcggtgctgcgccggcacgcggatgagtgcctcccaccactggatatgagtcagcatcccccaacacaagagctggtggccaaggatcttcatggggttgagtggcgcttccgtcacatcttccgaggtcagccacgaagacaccttctccagagtggttggagtgtttttgtgagtgccaaacgccttgttgctggagatgccttcatatttctcagaggtgagaatggggaactacgagttggagttcggcgtgcaatgagacaacaagctaatattccatcttcggtcatatcaagccacagtatgcatcttggtgttcttgcaactgcatggcatgcagtgaacactggaaccatgttcactgtgtactacaagccaaggactagtccatctgaatttgtggtaccacgtgatctgtacaaggaatctctgaaacgaaatcattcaatagggatgagattcaagatgacatttgaaggcgaagaggctgcagagcaaagattcactggcacaattgttggagtaggtgattctgacccatctggttgggctgactcaaaatggcgttcccttaaggtgcgatgggatgaagctgcttctgttcctcgtcctgatagggtttctccttggcaaatagaacctgctaacagcccttcccctgtcaaccctcttccagcaccccgaaccaagcgggctcgtccaaatgttttagcttcctcacctgacttgtctgctgtaaacaaagaagttgcttcaaaagtcatggcaaactcgcagcaaaatggtcttccaagggccttccacagtcaagaaaacatgaatttgagaagtcgttttggtgatagcaatgagctaaatacttcccaaaagcttaccatgtggtcttcaggaagcaatcaagagaaaaataatgtttctgtccagagggagctaggttcacagagttggatgcagatgagaaggcctgatggttcctctgagatattatctggatttcaaccactgaaagatacgcggaaccctctgagttcatttcctagtcagatatctggaaaccgttcaaatacgtggaacacaatcaatgttcattatcccgaccaaaatgccaatcataatatgtaccctggcacatggtctcttatgcctccaaacactggttttggtgtgaatcagcagaactacctaatgacgcctgacatcacactccctcaaaggtctcttaatgccaagtttggtgggaatggagcattcacttcgcttcgggcccatggcatagatcagcgctcctctggttggcttgggcatattgagccaagttctcacattgatgatgcctcatcgagtcttatcaagccacagcctttggttattgatcacaatgttcagaaagctaaaggctcttcatgcatgctatttgggatttctcttgacagccctgcaaaacctgaactattgatatccccaccaagtgttgcatttgatgggaagctccaacaggatgcacttgaagaggatgaatgctctgatccttccaagactgtgaagccacttgatggagctcagcacgattctgctagagagaaacatcagtcatgtccagatggtaccaaaaaacattcagagtaaacagcaaaatggttcctcccgaagttgcaagaaggtccacaagcaaggaatcgcactcgggaggtcaatagatcttacaaagttcacttgctatgatgagttgattgctgaactggaccagatgtttgacttcaatggtgagctgaacagttcaagcaagaactggatggtcgtttacactgataatgagggtgacatgatgttggttggtgatgatccttggaatgaattctgcaacatggttcataaaatcttcatctacacgagggaggaggtccagaagatgaatccgggtgccctaaactcaaggtcagaggatagccggtctacttccgtggaacgagggctagttggcgaagggctccaaggtggtctatccaccccatcactgaattctgagaactgctaattcgttcggtcactgaggtcttttgtggtttgcaagaacagaagacgacatatccatggtaggaaggaatcttttcgtggtgtagtagtagtagctggtgctttatatgtatcgggtaagccccgcagtaccccatttgtagatggtgcttgtcctggtatcagttgcccgctcttcgttttcgacaagttttgggtgtgctttgttgaggttttaagttattgtatgatatgccccgtagtagtgaaaggtgctgaggccaagctgccgcgcccggtgcgcttgcttgcttgcgctcttcctccctcctaagccttgtaaatagctttgcttccccccctttcttcagtcagttctaatatgttgcgaactgcggtaatcggtgtacccctcaagaaggcaaggcaatttgaccctaaaatgttgccatttt

SEQ ID NO: 14704 - DNA, 2668 bp, Oryza sativa
  ref <308>: DATABASE ACCESSION NUMBER: AK065255
  ref <309>: DATABASE ENTRY DATE: 2001-12-06
gacagtcctcctcctcctcctctcttccatcgccgctgctcgcttcctccccctctcccacgaaagatggcgtctcacattgttgggtacccccgcatgggccccaagagggagctcaagtttgccctggagtctttctgggatgggaagagcagcgctgaggatttggagaaggttgcgaccgacctcagggccagcatctggaagcaaatggctgacgctgggatcaagtacatccccagcaacaccttctcgtactatgatcaggttcttgacacggctgccatgcttggtgctgtcccagagcgctactcatggactggtggagagattgggttcagcacctacttctcgatggctaggggcaatgccactgtccctgccatggagatgaccaagtggtttgacaccaactaccactttatcgtccctgaacttggtcccaacaccaagttctcctactcttcccacaaggctgtgaatgaatacaaggaggctaaggcgctcggcgttgacaccgtgccagtacttgttggaccagtttcatacttgttgctctccaaacctgccaagggtgtagagaagtcgttcgctcttctttcccttctgagcagcatccttcctgtctacaaggaggttattgctgagttgaaggcagctggtgctacttggattcagtttgatgaacccacacttgttcttgaccttgactctcaccaattggctgcattctctgctgcatacacagaacttgagtcggcactttctggattgaatgtgcttattgagacatacttcgctgacattcctgctgaatcatacaagaccctcacatccctgaacagcgtgactgcttatggttttgaccttatccgtggagccaagactcttgaccttatcaagagtgctggtttcccctctggaaagtacctctttgccggtgttgtggatggacgcaacatctgggctgatgatctcgctgcatctctcactacccttgagtctcttgaggctattgttggaaaggacaagcttgtggtctcgacttcctgctcactcatgcacaccgctgtggatcttgtaaatgagaccaagctcgatagcgagattaagtcatggctcgcttttgctgcccaaaaggtggttgaggtgaatgcccttgctaaggcattggctggacagaaggatgaggcttactttgcagcaaacgctgctgctcaggcctccaggaggtcatcacctcgtgtgacaaacgaggaagtccaaaaggctgctgctgctctgaaggggtctgaccaccaccgtgctaccaatgttagcgctagactggacgcacagcagaagaagctcaaccttccagtccttcctacaaccacaattggttcattcccacagactgtggagctcaggagagtccgccgtgagtacaaggcaaaaaagatctctgaggaggagtacatcagtgccatcaaggaggaaatcagcaaggttgttaagatccaggaagagcttgacatcgatgtccttgttcacggcgagcctgagagaaacgatatggttgagtacttcggtgagcagctttctggttttgcattcactgccaacggatgggtgcaatcttatggatcacggtgtgtcaagccaccaattatctatggtgatgtgagccgccccaaccccatgactgtgttctggtccaagttggcgcagagcatgacctctcgccccatgaagggaatgttgactggtcccgtcacaatccttaactggtcttttgtcaggaatgaccagccgaggtttgagacatgctaccagattgctcttgccatcaagaaggaggtcgaggaccttgaggctggtggtattcaggtcatccaaatcgatgaggctgctttgagagaaggtctgccactccgcaaggcggagcatgctttctacttggactgggctgttcactccttcagaatcaccaactgcggtgttcaggacaccacccagatccacacccacatgtgctactctaacttcaacgacatcatccactccatcatcaacatggacgctgatgtgatcaccatcgagaactcccggtccgacgagaagctgctctccgtcttccgcgagggtgtgaagtatggtgctggcattggccctggtgtctatgacatccactccccaaggatcccgtccacagaggagattgcggaccgcgtcaacaagatgctcgcggtgctcgacactaacattctctgggtgaaccctgactgcggtctcaagacccgcaagtacaacgaggtcaagcccgcccttaccaacatggtttcggccgccaagctcatccgcacccagctcgccagcgcgaagtgaggatatccatagctgcaagttcccttcggttgcgaggacgatgccgtcatagccatctgtttttgaataatctgggtccagtggatccaattgtctgtggttaggtttagtcagtctcggtgggaagatccctcatacccgttttacttttgaatcaatttggtggtttttgaggcagtttgtcggtgtatttgtattgtgtgtaatctgagtgggaatcagcagtgtttcatctgcatctgaatcgttgcggatcaaattacaaaattttcaaggagagttcttgatgttatggtcttcc

SEQ ID NO: 14705 - DNA, 1243 bp, Oryza sativa
  ref <308>: DATABASE ACCESSION NUMBER: AK065256
  ref <309>: DATABASE ENTRY DATE: 2001-12-06
ggtactactctgcccattgataggctgctggtgatcacaagctacacaacacatcacacaagcaataggcatctctctcttctttctctttctcctccttgcttcatttggagtactagagattaatttcttgaaggagagaaatgacaagtgtctggaagaccaaggttctcactggactcaacaagctctttgacaaggatggaaagaaggctgctgctgctgagttcttgaaatcattcaacaaggaggagattggcaaggagattgatgacaagaagacagagctagagcccaaggttgtggaggttgttgagtcatctcctcctgagattaaggctttgttgaaggacaaaaaaacagccagcaaaatcaagaagaacggtcctgcagtcactaagttccttgaggaattggctaagattgatttccccggagccaagccggtgagcgacgcggtggccaagtccggcacgacgccgctctccccggcgatcgccttcatcctggagaaggtcgcgcctttcgttcccaaggaggagcccaagcccgagccggaggcggaggcggcggcggagaccacctcccgggaagtcgccgtggaggaggagaagaaggaggaggaggcggcccccgccgagcccgccgccgccgccgcggaggcggcggcgccgtcgacggaggtggtggaggagaagaaggaggaggagaagccagcggaggcggcggcgccggcggctgagccggagaagcagtagtgatcactccagaagcaagcaaagctaagctagcttagctaagcttagctgatggtaattaaaatcaagattaaggttaatgtgatcacactactctctctcagtctctgcacaaaaagtaagtaaaaatcaagatacacacacttggcatgcaagaacatttgttattgaattctttcaccctttgatcctttcatctctctcctatatatatatatggtcgcctcatcggttgtaaattaatttatgtggggtttcttgttttttgggggtgattaaacatgtgtaattatattcatatgtttgttggtcatgatcataaggagcttgtgtatattatccatatctttttttttcttttgtttacaaattttcggcttgaggtgtgatgaagatagacatatatatgcaccctctccaattgtaatacaaattaatggctgtggatatatgttcatatggtacagtttgttgttgttgatcct

SEQ ID NO: 14706 - DNA, 2601 bp, Oryza sativa
  ref <308>: DATABASE ACCESSION NUMBER: AK065257
  ref <309>: DATABASE ENTRY DATE: 2001-12-06
gaaggtttcccccaactcaactcccctccccttcgcttcccttcccttctctcctctcctctcctctcctcttctcccccccaaattcgccgccgcctcctctccccctctcctcctacccttccccgcggcggcggcgagaggcggcgcggtgcgtcccctcccctcccccgcactctgctggtgctggtgctgggctgccgttgggggaggcgggagatccgcccgggcccggggttccgtttcctcctcctgctcggtctcaacctgttgtaatactatccatcaccagcaatgaataccccagaaaagaaaccactgtgctatacttctagaagagcactgcaacagaggacagaatcctcttcggaattgatctctgtatcaaaaagagcaacccgccagaatactccacgcaagccggattctcctcccaaacgaacaacaagaagtagcgctaacctggcgaaatgtatagagaacaaacaccatagcagtcctctgaagcggcggcggggttcagatgcggctaccggaaagtctgcaacagggccaacaaggaggaagcataaacagaaaaggaaaaatgatgagagtgatgaggtcagtcgcatggaaaaaagagcaagatatttacttatcaaaataaaacaggagcagaatttgctagatgcatactctggagatggttggaatgggcacagtcgagagaaaataaagccagagaaggagctacagcgtgctaagaaacagatcatgaaatacaaaatcgctatccgtgacgtcattcaccaacttgatttgtgtagttccagtgggagcaaggatgactctgtgattccaccagatgggtgtcacgagtctgtcaatcctgaacatacaatatgttcaaggtgcaaatcccacgagtcatttcctgacaataacattatattctgtgaggggggctgcaaactggcgtgtcatcagaaatgtttggagcctccttttgataaaattcttccaactacccgccatgggcggctttgcaaacactgttcttccaagatgaaaattttagacgccattaatgcccatctggggacaagttttacagtgaagtgtccctccagtgatattttcaaggaagcagctgaacatttcaactctgatgatggactgggccaagattggctatctgagtattcaggtgatgaggactatgaccctgaagaaaatgaggccagcagcagtggtgaagagaataaatctgccgattccaattgttcagggagtccactttattctccaaatgatgatattccagacttcatatcagcagatttcaatgatgctgaaggattctgtcgtgaaagttcaaatctaggaatcgattttggtgaagatggtttggctgagattcttacccaccaaaggccaagaagagatgttgactatacacaacttaatgagcaaatgtttggagagcctattggcaatgacgaacagagtgaagatgaagattggggtcttaacaagagaaagaaaagaagaactggttcaactggtgttgggactaattccgtagagggtcgatcagatgtcaaatccaataagaaagcccaacctcggagaaaacttttcaggattcctcctgcggcagttgaggtgctccgtaaagcttttgctgaaaatgagcttcctgcccggagtgtcaaagaaaatctctcaacagagctgggtatttcttttgaaaagattgataagtggttcaaaaatacacggtgtgctgctctcagggataggaagggtgaaagtcgttattctggtcccagcaaaaggtcaagaacaagcatagaaaaggctgaaacttcagctaaagtggatcaaatggacaactcatgctttcttcccttatctgaaataatcaacgtgcccacacgtctgcagaaaggtcttgataagaagccaaaatcaattaacagccctccaagacctcaggacaatgaaacttgcttgtcgccaactgataaaaccaaggagggtacaccgcctacgatcaagccttccatcacagattctagtcaactgatgaataacaacatcggcactgaggagactgctgtttcttgggtggacacttgggcctctgacgctctgcatttcttggacgtgagcgatgatgaacatttcttcgatgtgatcgagaaggtgtgcggtctcgagaatcggctgcagcggttgaaggagaacatgctatcatcgtcatcgtcaactgacaacaatgtggctgctgagagtggcttgcaaaacgaagttgtgcttgtaccagctgctgagctcaaggataaagcatcttaaccttgcatctgggtcccaatgctttgcttcagttgaccatttgctcataggattttatacatcagaaaatagtacaggaggggctggagtgtagcttgccccgtttatctttgaacttatataccggtgaactggtaccattctatatagggagggacagataattcggattaggttcgtgaggatttgcaaagagttagtttaactgtaatctttcagctggaactttgttcagcgagtaataggtcatggacaattacc

SEQ ID NO: 14707 - DNA, 1419 bp, Oryza sativa
  ref <308>: DATABASE ACCESSION NUMBER: AK065258
  ref <309>: DATABASE ENTRY DATE: 2001-12-06
gctttttctctttttctcgctcgcctccgtacgccacacgggagaagacggcggcggggagcccgcggcggctagggttttgattgatttgtcgccggcgacgcgccgcccgccatggagggagctgctggagacgttcgaggccgccaagaaggcggccgacgcggcggccggggcggacgactccccggaggccgaccgctgcctcgacgcgatgcggcggctgcgcggtctccgcgtcaccaccgacgtcctcgtctccacgcaggttggaaaacgtcttcgttaccttactaagcaccctcactcagacatacaatccatggctacagatcttctggggtactggaaaaaggttgttatcgaagaaggaaagaaaaatggtaccacagaaaatgttggatcaaccaactcagccgccagagctgaaaaggctcagcccatgaaggttgataagagttctgcatcaggaagtgtgaagcctgagaaaagagaagtcaatgttaggggccagaagcctgagagcatcaaggttgagaagatcaccaataatgattccaaaaaccaacaagtcgaggtagagagggctccaaaggaagccactagaactcctgatacaaagaagccatcttctgttccaaatggccccccaaagctgacatctcttgtcaaatgcaatgatccaactagagataaaatccgggaactacttgcagatgccttctccagggttcatggagagactagcaaagatgacagggaggaagtgagaaacatcttagatgaagtggatgcacgagatccattcagagttgctgtgaccgttgaatctgcgttatttgagaggctgggacgttcaactggggctcacaaggcaaaatacaggtcaataatgttcaatcttagagctgacaacaacactgatttccgaagaagggttctccttggccaagtgaggcctgagaggcttgttgacatatctccagaagagatggctagtgacgcgaggaagcttgagaataagcagatcaaggagaaggctttgttcgattgtgagcgtggaggagccccaaaggcgactactgatcagttcaagtgtggcaggtgtggccagcggaagacgacttactaccagctgcagactcggagtgctgatgagccaatgacaacatttgtgacatgcgtgaactgcaacaaccactggaagttctgctgagcgccaatctgctgaaaatgttctcccggctagcggtgtcatttgaatttgacaggcaggttggcttcaattttccataaactaggagcctgtttcctttttattttacctttcttttctctttcggaacctgatttattcagattgtactagttgaccgcaactgttgttgactatattaccattacctgttgtacctgttt

SEQ ID NO: 14708 - DNA, 3707 bp, Oryza sativa
  ref <308>: DATABASE ACCESSION NUMBER: AK065259
  ref <309>: DATABASE ENTRY DATE: 2001-12-06
ggcctccaaaaaaaaccatttgggtctctctccctttgagagccccctaccgacacttgtttgcccttaatttctatatatcccccacgtactttacgacccatttctcacacccctcttctcctcctcctcttcttctccaccacctccattgctgctcgcctctctcacctcctcctcctcctcttgtgtggagctcgtcggcgtcgaggtgtagctagctagctaagcttgttttgccattgttgtgttcttggtgttcggagagggagcttgcctttgccttgaggggagaggcaaaggcattagcaatggcgccagcggtggccggcggcggagggaggaggaacaatgagggggtgaacgggaacgcggcggcgccggcgtgcgtgtgcgggttcccggtgtgcgcgtgcgcgggggcggcggcggtggcgtcggcggcgtcgtcggcggacatggacatcgtggcggcggggcagatcggcgccgtcaacgacgagagctgggtcgccgtcgacctcagcgacagcgacgacgcccccgccgccggcgacgtccagggcgccctcgacgaccgccccgtcttccgtaccgagaagatcaagggcgtcctcctccacccctaccgggtgctgatctttgtgaggctgatcgcgttcacactgttcgtgatatggcgtatcgagcacaagaacccggacgcgatgtggctgtgggtgacgtcgatcgccggcgagttctggttcgggttctcgtggctgctcgaccagctccccaagctgaacccgatcaaccgcgtccccgacctcgccgtcctccgccgccgcttcgaccacgccgacgggacctcctccctcccggggctggacatcttcgtcaccaccgccgacccgatcaaggagcccatcctgtcgacggcgaactccatcctctccatcctcgccgccgactaccccgtcgaccgcaacacctgctacctctccgacgactctgggatgctcctcacctacgaggccatggcggaggcggccaagttcgcgacgctgtgggtgcccttctgccggaagcacgccatcgagccgcgcgggcctgagagctacttcgagctcaagtcccacccctacatggggagggcgcaggaggagttcgtcaacgaccgccgccgcgtccgcaaggagtacgacgacttcaaggccaggatcaacggcctcgagcacgacatcaagcagaggtccgactcctacaacgccgccgccggcgtcaaggacggcgagccccgcgccacctggatggccgacgggtcgcagtgggagggcacctggatcgagcagtcggagaaccaccgcaagggcgaccacgccggcatcgtcctggtgttgctgaaccacccgagccacgcacggcagctggggccgccggcgagcgccgacaacccgctggacttcagcggcgtggacgtgcggctgccgatgctggtgtacgtcgcacgtgagaagcgccccgggtgcaaccaccagaagaaggccggcgccatgaacgcgctgacccgcgcctccgccgtgctctccaactcccccttcatcctcaacctcgactgcgaccactacatcaacaactcccaggcgctccgcgccggcatctgcttcatgctcggccgcgacagcgacaccgtcgcgttcgtccagttcccgcagcgcttcgagggcgtcgaccccaccgacctctatgctaaccacaaccgtatcttcttcgacggcacgctccgtgccctcgacgggctgcaggggcctatctacgtcggcaccgggtgtctcttccgccgcatcacgctgtacgggttcgagccgccgaggatcaacgtcggcggaccgtgcttcccgaggctcggtgggatgttcgccaagaacaggtaccagaagcctgggttcgagatgaccaagcctggtgccaagccggtggcgccgccgccggcggcgacggtggcgaaggggaagcacgggttcctgccgatgcccaagaaggcgtacggcaagtcggacgcgttcgccgacaccatcccgcgcgcgtcgcacccgtcgccgtacgcggcggaggcggcggtggcggccgacgaggcggcgatcgcggaggccgtgatggtgacggcggcggcgtacgagaagaagaccgggtgggggagcgacatcgggtgggtgtacggcacggtgacggaggacgtggtgaccggctaccggatgcacatcaaggggtggaggtcgcgctactgctccatctacccgcacgcgttcatcgggacggcgccgatcaacctgacggagaggctgttccaggtgctccggtggtcgacgggttcgctggagatcttcttctcgaggaacaacccgctgttcgggagcacgttcctgcacccgctgcagcgcgtggcgtacatcaacatcaccacctacccgttcacggcgctgttcctcatcttctacaccaccgtgccggcgctgtcgttcgtgacggggcacttcatcgtgcagaggccgaccaccatgttctacgtctacctcgccatcgtgctcgggacgctgctcatcctcgccgtgctggaggtgaagtgggcgggggtcaccgtgttcgagtggttcaggaacgggcagttctggatgacggccagctgctccgcctacctcgccgccgtgctgcaggtggtcaccaaggtggtgttccggcgggacatctcgttcaagctcacctccaagctccccgccggcgacgagaagaaggacccctacgccgacctgtacgtggtgcggtggacgtggctcatgatcacccccatcatcatcatcctcgtcaacatcatcggctccgccgtcgccttcgccaaggtgctcgacggcgagtggacgcactggctcaaggtcgccggcggcgtgttcttcaacttctgggtcctcttccacctctaccccttcgccaagggcatcctcgggaagcacggcaagacgccggtggtggtgctcgtctggtgggccttcaccttcgtcatcaccgtcgtgctctacatcaacatcccccacatccatggccccggccgccacggcgccgcctcaccatcccacggccaccacagcgcccatggcaccaagaagtacgacttcacctacgcctggccatgaggacgccgtcgccggagacgaagaagaaaacacaaacaagaacaagacgacaccaacaacaccaacaacaacaaacacgagatgagtacgttctactacacgctgctgcaacaacacatactactgaacactgtgcatgcatttgatcgagcgacccgccaaaatttgaaagttttttttcttcttttcttttaacctttttttttcctctttttgccccctcctctctctccttttctttctttttagttttgtccagaaaaaagatggtgtttatttgatttagttttttaattacctgtggtaattaattatgtattatacattactgcaaggaagagaggggggcttacaggtggggcccggggggtggggtgtggtgtatgattgtactgtacatgctgggagatgtatgtatacggagacaaaaagacaagagtcacagagagtgagagaaagagaggctggaagtgggcccggccaggtggtggtggtattcttttagtacatggaaacaataaatttaatttcattatt

SEQ ID NO: 14709 - DNA, 895 bp, Oryza sativa
  ref <308>: DATABASE ACCESSION NUMBER: AK065260
  ref <309>: DATABASE ENTRY DATE: 2001-12-06
gagtttgccaaaaccaccaacccggaagcacaaaaaccgccctctcctcctctcgtcgccactgctccccaatccacccgactccggcgatctcccatggcggcagcggcgacggccacgaggcggccgagcgggcacgtcctctccgccgcgcactaccgctccgcctccccgacgcgcgtcaagctcgccggcggcggagcacgcgcgtccgtcagcgtctcgtccgtgagccgccgctcctgcatgtgctcgccgaccaaccacccggggtcgttccggtgcagcctccacaaggagcagaagcggagcgttcaccacaaggcggcggcggcgccatcctccccgccgtcgccgaccagcccgccggcctcgggcggcgccgtcaggcttggcggcgcgaggcggatgggcggcagcgcgctggtgcggatcggcgccgtggagagcggccagtgggcgcggagggctctcgccgccaccatccgcccctcccccgccgcgcagcaggcgcagcaccggagacgcgtcgccgggctccgcccccgccccagccgcctctccgccgtctccatggccggcgaccgcgccggcgacaaccaccaccaccaccgataaaccccaattcgccgacatctcaaccaattgagacacatactagtagcatagtagtagtacataggaattattacatatagaaattttttttttctgtagtgtatagtgatgtgagaagtgagattaagctgaacatggagttttggatccgtgtgctgcttgtacattcattctgaaatctgcccatggttttggattaaatccattaatccttatgcctttcatgataagaagagaagaaaaaattggagatagtacgtgtctccggattacgcac

SEQ ID NO: 14710 - DNA, 1430 bp, Oryza sativa
  ref <308>: DATABASE ACCESSION NUMBER: AK065261
  ref <309>: DATABASE ENTRY DATE: 2001-12-06
ggccatttcccacaaattaatttggtaggctagctagcttggatatatagaatgatgaagaacatgatgagcagcgctactgttcgtccgtggctgatgatgatgatgatatccatagtaacattattattccaagtgcagcagctggccggcgctcagctgcagcggcaggtggcggcaaggatgtgttcagggccaacaagccgtacaacggcatcgactaccctgcctccaagcctaccggtcgcttcagcaatggctacaacgtcgccgacttcatagcaatgaagctggggttcaagaagagccctccggcttacctgtcgctgctgcaggggcctgcagctgcagccaatctcactctcgccatcaaagctctcaccggaggcgtcagctttgcttccggaggagccggcgttctcgactccacttacgcagggaaatgcatcccgctgtcgacgcagctgcggagcatggaggcgacgagggcggccatggtgtccaaggtcggcacccgcgccgtcgccgcccacctcgcccgctccttcttcctcctcggcgtcgtcaacaacgacatgttcgtcttcgccaccgcccagcagcagcagaaccgctccgccacgccggccgaagtcgccgccttctacaccaccctcatcaccaaattctccgccgccctcacggagctgtacgagatgggggcgaggaagtttggcatcatcaacgtggggctggtcggttgcgtgccgctggtgcgagcgcagagccccaccggcgcctgcagcgacgacctcaacggcctcgccgccggcttcaacgacgccctcgcctccctcctctccgacctcgccgcgcgccttcccggcttcgcctactccatcgccgacgcccacgccgccggccagctcgcgttcgccgaccccgcggcgtccgggtacaccagcgttgacgccgcgtgctgcgggagcgggaggctgggcgcggaggaggactgccaggtgggctccacgctctgcgccgaccgcgacaagtgggccttctgggaccgcgtccacccctcgcagagggccaccatgctcagcgccgcggcctaccacgacggcccggcccaattaaccaagcccatcaacttcaaacagctcgcccgcaccactgcttaattacggactactacgtactcttattttatttgttagtgtatattcagctagcaaattcaattcactcaatatgagagcatcgtaatgtaatatatatttgttcatgtatgcatatgcgttgatttttcttttggggcgaagcagtgtgtaccaggaatgaacgtacacacaaattttgattttttttctaaagaaattgtgatgtaattttttttagaatttgtgatgtatttggagatgatcgatttgaggattcggagatatcctatt

SEQ ID NO: 14711 - DNA, 1265 bp, Oryza sativa
  ref <308>: DATABASE ACCESSION NUMBER: AK065262
  ref <309>: DATABASE ENTRY DATE: 2001-12-06
ggacccctcgtctgtctctcttccccaaaccctccacccaacccgcctcctcgagcgacggcgcagccatggcggaagcagcagcagcacctcccgccgccgccgccaccaactacgaggtggacctcggcaacctcatggcctacgacccgtcgcatcacctccccgccgcatcctcctccagggaggagctgagggaggagtgcctgcggaaggggacggagctggcgcaggcggtcgccgacgccctcttcgcgctgccggccaccgaggaccgcgacggccccatggtccgcctcccgccgcccaccacccgcttcccccgcgagaagcatctaccaaggccgaagcccgctactaaatgggagcagtttgcgaagatgaaagggatcacaaagcacaagaagaacaaacgtgaatgggacgagcaaactcaaacctggaagcggacttatggctatgaccgtgttaatgatgataaagacattccaatcattgaagccaaggcgacagatgagcctggtgttgatccttttgctcaaagaagggaagataagaagaagcatgttgaaaagcaagaaaagaacagactagaaaacttgaaaaaagcagccaaagttggtgctttgcctagtcatatacaacttgctgcaacagcgttgcctatcacgggaactaaagcagacatacccaaaaaatctagaaagaaagatctcgaggatgttgctggcatggcttcatcagcaacagctagtggtgggaagttcgatgaaaaattgcctggcgagaaacctccaaaaaatcctggcaaacatagaaagttcctccctgttgttgaaggaaaaggaatgggcaaccaggagaaacagcaaaatgacaaaatcttgaatgctctgctggccaaaagttctgaggatcaaatggatgttggcagggcaattacgatgtacaaggtgaagaaggagaaacaaaggaggaaagataaggaaaagtcttcttcatcgaacaagctgaagccccagaagaaaacactcaagaaatcttcgaagaaaaaggcttaggttaattacattcttcggacctgctgtaggaggtgagcatagttttcgagactcaaggagaattggcaaattttgctgtctgtttgtccaatttgaacacatcggagaaatcttgttattgcaattgttggttatgatgtaagaacctgaatgctattataacatggttgtcatgaatatgcaatacatatgcattataattcc

SEQ ID NO: 14712 - DNA, 1940 bp, Oryza sativa
  ref <308>: DATABASE ACCESSION NUMBER: AK065263
  ref <309>: DATABASE ENTRY DATE: 2001-12-06
gggtggccggcagaaagcgccattgcccacctgcccacctcaggtctagccgggtagggtagggtagggtaggctcgtcgtcggcgaggcattccgccattgttgctgcttgcttgctttgccgggatggagatgaggcggtttcttggtgggctatgcttcttggctctgctgcggctgggcggcgccgcggaggccgtggtcggggtcgccggcgttgacgggcggcgcgccattgccgccaccgacgaggacttcgtgtgcgcgacgatggactggtggccgccggacaagtgcgactacggcacctgcagctggggcctcgcctccctcctcaacctggatctctccaacaaaatcttgctcaatgccattcgaggtaccttctcgccgttgaagctgcggctgggcgggtcgctgcaggacaagctggtgtacggcaccggcgacggcggagggccgtgcgcgccgttcgtcaagaacacgtcggagatgttcggcttcacgcagggatgcctgcctctccaccggtgggacgagctcaacgccttcttccaaaaatccggcgcgagaatcgtgttcgggctgaacgctctcaacggccgggttccgttgccggatgggtcgatgggagggccatgggattacaccaatgctgcatcgctgattcgttacaccgcgagcaagggttacaaaattcatggatgggagcttggaaatgaactcagtggcagtggagttggaacaaaagttggggctgaccaatatgctgcagatgtgattgcactgaaatcactagttgacactatctaccaaggcaatccatcaaagccacttgttcttgctcctggaggtttctttgatgcaggctggtttactgaagttatagtcaaaaccaggccaaacctactgaatgtggtcacccatcacatctacaacttagggccaggagtggacacacatctgattgagaagatcctgaatccatcttatcttgatggaatggtgagcacattcagcaatcttcaggggatactgaaatctgccgggacttcggctgtcgcatgggtcggagagtccggaggcgcgtacaacagcggccgccatcttgttaccgattcatttgtgttcagtttctggtttttggatcagcttgggatgtcagcaaagtatgacacgaagagttactgcagacaaagtttgattggtggcaactatggcctgctaaacaaagaaacattccaaccaaatcctgactattacagcgctctactatggcatcgcctcatgggaaccaaagttctatctgcaacattcaatggcaccaacatgattcgcacttatgcgcattgcgcaaaagattctccaggaataacactactgctgatcaacctcagtggcaacaccacaagccaagtttcagtgacaagtgaaggtgctcatgcaaacactgtgaagaagcatagcagaaagaccaggcatcttgcagctggatcaatgagagaagaataccatcttactgccaaagatggcagcttgcagagccaagtgatgctgctgaatggcagggcattggttgctgatgaaaatggggaaatccctaggctggagcctgtcaaagtggatgcagcacagccaatagctgtggctccttactccattgtgtttgctcacatacacaatttccctgcccctgcatgtagttagattagggcaagattgtttttatttttgggtgatttggtgtgattgttattgttgttataggaaaggtgaagttaggatgggtagctaagcttgcccatctcaagatgaagtaaagctgcaaggctgaaaagtttgtgattttttttttttggggttgttcaattgtgtaagattgggaaaaaaatgatatgatgaagaaaaggaaagggaaaagctctttcccattgaagacc

SEQ ID NO: 14713 - DNA, 1688 bp, Oryza sativa
  ref <308>: DATABASE ACCESSION NUMBER: AK065264
  ref <309>: DATABASE ENTRY DATE: 2001-12-06
gggcctcgccggaaggcttggaagcccgcgttgactagtggcggttggattggcggcggcggcggcgactcgacgatgggcggcggcatgagggtggtggtgacgggcgcgacggggtacctcggcggccgcctgtgcgcggcgctggcggccgccggccacgccgtgcgcgcgttcgcccgccgctccagcgacgcctccgggctcccggcatccgtcgagctggcctacggggacgtcaccgacgaggggtccctcgccaccgccttcgacgggtgcgacgcggtcttccacgtcgccgccgccgtcgagccgtggctccccgacccctcggttttcaccaccgtacgcgtgctgattcatttctgatgttttcctgtggcaagtagagggtaactatattcattcaaatcaaagtggggagtactatagaacgctagatgaacctagacattctgcctattgtgcgatgctgtttagggtctttgaaaattatggctccaagtccaacaataattgattttccgtttgctgttctgttcatgaaactaaaatgcatgcaaattcggtttggcttggtgtaagaaatggcacttgagcatgcgcgttctgtgctatgattacaggtcaatgtgagaggactcgagaatgtgttgaaggctgctaagagaacaccgaccgtaaagaagataatttacacatcttcattctttgcaattggcccaactgatggttatgttgcagatgagacacagagacatcaagagaaaacattttgctcagagtacgagaaatccaaggttcttgcagaccgaattgcattgcaggcagcagcagaaggggtgccaatcaccattctctaccctggagttatctacgggcctggaaaactaactactggaaatattgtttcccgtattgtgagagaatttcttactcatggctatgtcaaatatgtagttatttattatcgtatatttgtttcaattttaaaatataacatttcctgaaagatagccatgaccagaagaaattaaactgttgtgattcttgcagttaattgaacggtttaattggcgcctacctggttacataggagatgggtatgatagggaatcgttttgccatgttgacgacgttgttaatgggcacatagcagcaatggagaagggcagaccgggggaaagatatctccttactggagaaaacttatcattcaaacagattttcgatatggctgctaacattacaaatacgaaggcacccctattccatgtacctctctggttgattgaaatatgggtggatttcagtttttatttctcacatcactggaaatctcacacttatcagttaccctacagtacgtgttcttagacatcaatgggcatattcatgtgataaagccaagagggagctgggctacagtccaagaaacttaactgaaggtctatcagagatgctcttatggctcaaggatgaaaaattgatcaagttttagcactcaccccttgtgctaacttgtgctgcattccacaccatgtaaactgagatctgatttaaacctattaactgtaagatgtacatgtttggtgtggtgttaatgttgtatcatatcagtaataacttgagatgtaacatggtagtactggttccatggaagaaaggaaaaacatgttcttcgatgg

SEQ ID NO: 14714 - DNA, 1714 bp, Oryza sativa
  ref <308>: DATABASE ACCESSION NUMBER: AK065265
  ref <309>: DATABASE ENTRY DATE: 2001-12-06
gtcctctccaatccccttcttcttcttcttcttcttcttcttcttcttctacctctcgatcccctcctcccctcctctttataagctcgagctcccctcgcagctgcgcctcactccacatgcactctcgccatctcgatctttttacccaattcttgatcactcttcttggtcgttcttgccattcttgtaccgcgaagcgagcttagctgcaacctgcaagatcgagctagctagctagcaatttatctaggttggtgagagcaggaagagatcgatcaagggttgaggggtgatggagagcatggagggcaatggaggagggcggctggtggtgacggagctgagccacatcaaggagctcgtgaggcagctggagggacacctgggtggctccggctcccccgacctctgcaagcacctggcctcgcagatcttctccgtcaccgagcgctccatcggcatgatcaggtccggccacttcgacggccaccgcaagcgctccgccgccgctgtcgccgccggtgacctcgactcggcgactcccagccccctcagcgacgtctccgacttgcctttcaaggccaccaagaagaggaagacgtcgacggagaagaagaggcatcagattagggtgagctcgacgggaggggtggagaatccaccggtagatgatggccatagctggagaaagtatgggcagaaagagattcttggagccaagcacccaaggggttactaccgttgcacccaccgccactcgcagggatgcatggcgacgaagcaggtgcagcgcaccgacgaggacgcgacggtgttcgacgtgttctaccacggcgagcacacgtgcgtccacaaggcggtggccgccggcgccggcaagccggagacggagacggacacgaacgccgccgccgagagccgcctccacgacctgagctccggcctgacggtgaagatcgaggggctgacggcgccgccgcagcaacagcagggcggcggcggctggaacgccatgccgccgttctgcctgtcgtcgccggtgagcggcctggcgccgccggatcagcacaacccgttctccgcgccgtcgacgccggagaaccgcctcgccgccgccgcgtcgtcggcggcctcgccggcgacctccgactcgatggccgccgcgccgttccaccaggcggcggccggcggcggcgatgaggcgtggcgggacgccgagctccaggaggtggtgtccgcgctcgtcgccgcgacgacgacgacggcgaccgcgcagccggcgcccgccaccgccatggtcgacgccgacctctccgccctcgacgccttcgagttcgaccccggattcaccattgatatcaccagcttcttcgcatgagattatgaacagaaccagatcaatggtgaccaaactcaacccaatccaatccaatccaatccaacccgatccgatcctcacatagctgatgaacactagagaagcagttcatggtgaccaccctctgttctttagctgttgccatgaaagaacagaggagggaagaagagcagaagctttcttcctaggtcaatagagatgagaaatagtagtactagtacttaatttttctctcttttttttccccaaatgagagtgtttctttgtattattattagtattattattattgatttgtgtcaaggaaaataagatcttgatcatgttctgagc

SEQ ID NO: 14715 - DNA, 1169 bp, Oryza sativa
  ref <308>: DATABASE ACCESSION NUMBER: AK065266
  ref <309>: DATABASE ENTRY DATE: 2001-12-06
gtccgaacaaaaagcattcgcatccacgagaccagtcgaacccgacccgcctcgccgccgtcgccaccgaagtaatcccttaattggtcaaaatgtctagggaggagaatgtctacatggccaagctggccgagcaggctgaaaggtatgaggagatggttgagtacatggagaaggttgcaaagactgtagatgtggaagagctcactgttgaggagcgcaacctcttgtctgttgcttacaagaatgtgattggtgcccgccgtgcctcctggcgtattgtctcatccattgaacagaaggaggagggtcgtggcaatgaggaacatgttactctgatcaaggagtaccgtggcaagattgaagctgagctgagcaagatttgcgatggtatcctgaagttgcttgactcacaccttgtgccctcatctactgctgcagaatctaaggtgttttacctcaagatgaagggtgattaccacaggtaccttgcggaatttaagactggtgccgagagaaaggaagctgctgagagcacaatggtggcttacaaggctgctcaggatattgctctggcggatcttgctcccacccatcccataaggcttggactggcacttaacttctctgtgttctactacgagattctaaactctccagacaaggcttgcaaccttgctaagcaggcgtttgacgaagccatctccgagttggataccctcggggaggagtcttacaaggacagcactttgatcatgcagctcctgagggacaacttgaccctctggacctctgacctcacggaggacggtggtgatgaggtgaaagaagcctccaagggcgacgcctgcgagggccagtaaaatgggaagatcgatcgatcgatggctccgcatgttattggagaccatcgatttagatgcctcatgctgctgtcaccatgatggatggattcttctcctgttctactagaatgtttttcttcctgtctccccttcctctctcttctctggtttttactagggtggtagcggtcgaattagttcttcccattgctttgcatttggtgctagtggtccgtctgggctgattgttttcctctggatatgactctcgtgtgtgttgtctgcagatagtgttttattgagcaatatttaaagttgtcgtcc

SEQ ID NO: 14716 - DNA, 1041 bp, Oryza sativa
  ref <308>: DATABASE ACCESSION NUMBER: AK065267
  ref <309>: DATABASE ENTRY DATE: 2001-12-06
gatttccatccttcccaaaatccaccggagaagaagacgattagccggggaccacgccggagaaaaaaaaatgctgtcctccaccgctctccggccgctggcgcagcccgccacggccacggccacggccaccgccttctcggcctcccgcacggccgccgcggctgggcggcgcgggtcggcggcgggggtagtggttcgcgcggtgcggaactacgactcgatcccgaagcgggagcccttcagctcgagccgcagcgtcctcgacgagttcctcaggcaggagaagcctctcgtccagcgcaccaaagaccagatcacagattattgcacaaccctagaaggtgatgagtgctgcagctgttgggatgcttactttgaactcaataaacttgagcaagagctacccaaagaggcaattgcaaggatggtgaaggactccgagggagatccgaggtacctgatcaatagcatccatcaccgttcagatctaagaaagaagatggctgagaaatctcataattcactatcatcaaactccctggggcaagctgcgaagccaaggcctttccctgtgcctgacggattgccgaaaacacaggaagagcttgctgaagaacaggaggccctaatgccggagtcctcctatacgaggctactgagaagaatggggagatttcctgattggtatacgcctcgcccagatcatgaaaccgactgaatcaagtcaccaagcatccatataccgctccttgtgaaaattttgtattggttgccggataattatgatgcctgaagttctgtggtttgggtaatgcactaaggttcagcagcgtggtagctatccaggttagattgctgttgcttgctttactgaatgtataatggcgtgtgttttatgctgttcaggtcttcccctcaggattcagatagctccttccctgtaaactcaagcaatgtcccatgagatagcttgcacaaatttgtctttctgtatatatatgttctggaatagagtttctgaatctgtttcctggagtt

SEQ ID NO: 14717 - DNA, 1219 bp, Oryza sativa
  ref <308>: DATABASE ACCESSION NUMBER: AK065268
  ref <309>: DATABASE ENTRY DATE: 2001-12-06
gaactattccttctcccacctctcccctctcctcgctcctccacgcgccgccgccgccgcagcggagcagccacagcaggcgagcgacatgggagggtttgtcaagacccagaagaccaatgcctaccacaagcgtttccaagtcaagttcaagagacggaggcagggcaagactgactacagggccaggattaggctcaccaaccaagataagaacaagtacaacacaccgaagtaccgcttcgttgtgagatttacaaacaaagatatcacagctcaaattgtctatgctaccattgctggtgatatcgtgatggctgctgcctactcccatgagctgcctcgctatggtcttgaagttggtctcaccaactatgcggcagcttattgcactggcttgcttttggctcgccgtgtgctcaagctccgtggtttggaccaggagtacgagggcaatattgaggccactggggaggactactatgttgaaccagctgatgaaaggcggcctttccgtgctctcttggatgttggcctcattaggacaaccactggaaaccgtgtctttggtgccctcaagggagctttggatggtggtcttgacattcctcacagtgacaagaggtttgctgggttcaagaaggacgagaagcagcttgattctggtattcaccgcaagtacatctacggtgggcacgtggctgactacatgaggtctatggcggaggaggaacctgagaaattccaagcccacttcagtgagtacctcaagaagggaattgatgctgatggcatggaagcactgtacaagaaggtccatgctgccatccgtgctgatcctaccatggccaaatcaaccaagaaggaaccggcgacccacaagagatacaacctcaagaagctaacctacgaacagaggaaggccagtctgtcgaaagattgaatgctctcaactcctctgctggtgctgatgatgatgacgaggaagaggatgatgagtgaaagagtttagccttatcacagtagttccatctttatgctgccaaacaaactccatatggcatttaagttcacctgtatagtcttgcaagttgcaacaggcatttttgtttatgttctgaactccgctcaaagaacctatttctttcggtttttggttctcaacctggagctatcggttatcttatttatgtgagaagctgccgtttggatattgacc

SEQ ID NO: 14718 - DNA, 1415 bp, Oryza sativa
  ref <308>: DATABASE ACCESSION NUMBER: AK065269
  ref <309>: DATABASE ENTRY DATE: 2001-12-06
gaggcgcaccaccccgccgccgagcgccgccgctgccactggactgtgctggccaccccagctcaccgcccccaccgccgagcgccggcccaccaccccgccgccgagtgccaccaccgccccaggtcaacgcccccacagccgaatggcaggtcaagttcctgagtcctgacgaacgaagagagagttgggaggccctggctgagaccaacaccaccagatttcaccagagttgggaggtcctgactgagagttgggcggagatgtccttcttcttccgggcggcgtcgcggccggcgcgcccgtcgccgcaggagctcgtccgctccatcaaggagtccctcctcgccctcgacaccaggaccggcgccaaggctcttgaagatgttgagaaaaatgtatctactttgaggcagacactttctggcgatggagaagttgaaccaaatcaggaacaggttctacagatagcccttgaaatttgcaaggaggatgtcctttcgctctttgttcagaatatgccttccttgggttgggagggtagaaaggaccttgcccactgctggagcattttgttgaggcagaaggttgatgaagcctattgctgcgtgcagtatattgaaaatcattttgatcttctagatttccttgtagtttgctacaagaacttggaagttgcattgaactgtgggaatatgttgcgagaatgcataaaatatcctacacttgcaaaatatatattggagtcaagtagcttcgagttgtttttccagtatgttgaattatcgaactttgatattgcttctgatgctctgaacaccttcaaggatttgctcaccaaacatgaagccgcagtttctgagtttctgtgctcccattatgaacagttctttgagctctacacaagacttctaacttcaactaattatgttacaagaagacaatcagtgaagtttctttcagagtttttgttagaggccccaaatgctcaaataatgaagcggtacattgtggaagtcagttatttaaatatcatgattggcctgctgaaggatacaagcaaaaatatcaggatatgtgccttccacattttcaaggtatttgttgccaatccaaacaagcctcgtgatattattcaagttttggtagacaatcacagagaactgttgaagctactaggcaatcttcccacaagcaaaggtgaagacgagcaacttgaagaggagagagatttaatcatcaaggaaatcgagaagcttgtgcattcatcggtatagaccctcaagaaattcaaatccatccgttcaagtttcgctggtcaagaaatgtgatccctttcttcccttcttgtttttaagacctgtgtaatgtgatccctgtatagagggtgtttatcatagggaaatagtttgacc

SEQ ID NO: 14719 - DNA, 1203 bp, Oryza sativa
  ref <308>: DATABASE ACCESSION NUMBER: AK065270
  ref <309>: DATABASE ENTRY DATE: 2001-12-06
ggtcttgctgttctagaagatttctcttcgcgtcgccggcgctgacaccgccgccgccaccgccatctccggcgaaaaccctacctgcacccgtccagcgagcgccaggaggtaggctctagccgggcggaggatggtgttcgggcaggtggtgatcgggccgccgggctccggcaagacgacctactgcaacgggatgtcccagttcctctccctcgtcggcaggaaagttgcggttatcaatctcgatcctgcgaatgatgtgttgccatatgaatgcgccataaacattgaggacctcataaaactgagtgatgtcatgtctgagcattcgcttggtccaaatggaggccttgtgtattgcatggattacttggagaagaatatcgactggcttgaggaaaagttgaaacctcttattgaagatcactatctgttatttgatttcccgggtcaagtggaacttttctttctacactcaaatgcgaggagtattatttacaaacttatcaaaaagctaaacttgcggctgactgccgtgcaccttattgatgctcatttgtgctgtgatcctgggaagtatgtgagtgcattgcttctttcactgtcaacaatgctacacatggagctgccacacatcaatgttttgtcaaagattgacctcattgagaactatggaaacttagcattcaacctcaacttctacactgatgtcgaggatctgtcttatttgcaacgccatctagatcaagatcctcgttctgccaagtacaggaaacttactaaggagctgtgcgatgtgattgacgattttggcttggtcaattttacaactttggacatccaggacaaggaaagcgtcggcaatcttgtgaaattgattgacaaaagcaatggctatatattttcatctatagacagcagtgtcgttgagttcagtaaaattgcagcagcgccacgtgactgggattactacagaacagcagaggtgcaggagaagtacatgaaagacgacgaattcgtgcagaagacaagcaagacgcgatgaaactgaatttgtttgtaatgcttgacatgtgaccttgctatgcttgaatgagagctccatttgcccccatgccgctcaggtagggatgtaacatgttgtgacatgcaaactggaactgagaaatgtactctctccattttaaaatgtttgacacc

SEQ ID NO: 14720 - DNA, 3698 bp, Oryza sativa
  ref <308>: DATABASE ACCESSION NUMBER: AK065271
  ref <309>: DATABASE ENTRY DATE: 2001-12-06
tgtatttgaaactggaaagaaaaaaaaaatctgcatatcttgttgtgcaaaactcattatatttgctttgtttcattggtttgaataagacccctatcccatttccttgaattggggttggacttcacttttctaagtagttaaattggaatgcagaaattacagcatttagcattcttttgtctcattgttaatggagttagaaacatttgctgttggttctactagagtacttggtgctgattaaaagaaagttggtgcagatgaacggacagaaaatactgagaatattagttccttaaaaccctcaacagagattctgaatggagcaactaatgctgaatctgctccgagcacaaattctgcaagctcaattgatgattcccgtgaagggtaaggttggtttctggaaagaagcttaaaactatatcatagaatcttagcttcacttctatcttgtatgtactaaactgccagcttattccaaatcagattccaagaactcgcagcttacactaaaccttcattgttaaaaaaaaagctacaagagttattcacatataatgcccaaaagaatgcaatgctgttggtctaatatgtggattattatgtagttcggtatgacacagttgattgacatccagaaaagaaattctgcaggctggtaggttctcgtcggaacatattaagatatggaagtcttggaatagctgtttcttgtcttatctatacaaccaggaattggaaggccatgcagtttgtatctcccaaagggctgcttaattatttcacgggtggaaatagttcgatatttgctagtaatgaaggagaacaactcacatcaagggttcaacaaataaagaagtatttagctgattttgaaactggaggttctgctacttgtgtacctgagttcccaagaaagcttgattggttgaatacagcgccacttcagtttggaagagatttaaaaggaagagtggtcctgttggatttttggacctattgctgcatcaattgcatgcatgtcttgcccgacctggaatttatagagaagaagtacaaggataaacctttcactgttgtcggtgtgcactctgccaaatttgataatgaaaaagatcttgaagccatcagaaatgctgttctgcgctacaacattactcatccggttgtaaatgatggggacatgtacttgtggagagaactgggggtgaactcttggcctacatttgttgtgattgggcccaacgggaaggttttagcacaaatatcaggtgaaggtcacagaaaggaccttgatgatgtggttggtgcagctcttgaattttatgaagaaaataaattattacaaaacagttctcttcccttggcattggagaaggacaaggatagtcgtttactagcttcaccgcttaaatttcctgggaaacttgcaatagatgtactgaacaatcggttgtttatatcagacagtaatcataatcgaattgtagttaccaacctggaaggggaatttatatgtcaaattggaagttctgaagaaggactacttgatggcacatttgatactgcttcatttaatcgccctcaaggtcttgcttacaactccaaaaagaatatcctgtatgttgcagatactgagaaccatgcactgcgagagattaattttgtgagcgagactgtcaaaacactggcgggaaatggaacgaaaggctctgattacagaggaggaggtcagggaactaatcaggttctaaattcaccatgggatgtctgctatgatccctcaaaggagaccctatacatcgcaatggctggacaacatcagatctggaaacacaacacattggacggtgtaacagaagttctcagtggtgatggctacgagagaaatttgaatggatcgagtttggagatcatgattggactggctcggatgtgctactccagcatccattgggtgttgtctatgctagtgataatcaaatatatgttgcggactcttacaatcacaagataaaaaggttagatcctgtcacacggaaagttacgacgattgctggtacgggacgtgcaggatacaaggatggtccagccttgtcagctcaactgtctgagccagcaggacttgttgaagtgggagatggtaatctttttccatgtgctgtgttgcttgtctagtttaactgacacatgagatagtaattagaacaatcacgctatctaatggtgttctagagttaatttcctgaatacaccgattaggtgatggacctagcaattcactggatcaccttgcctgtaatcgtctaaccttgcctattttatgtatttcaccatttgcacttgttttatgaacaaccctatgttatgtgtaagctgcttacatttttcctggtcagtgacagaataggcaaacagtagttgttgtgctgcaagatgaataatatggtgcaaactattgcttttctgatatatcgtaggaaggcttcttgtagcagatacaaacaatagcacaatcaggtatatagttttgaatgagaaaggcgctgaggtgcgcacgctagatttgattggagttcagccaccatcaccaaaaccaaagacattgaaacgcctaagaagacgtctatcagcagacacggatgttattaacattgatggtggttcttcaattgaaggatatttgtctctagcaatctctgtccctgatggttaccatttctccaaggtccaaaatcatcacagaattttagctataatgtttttgcatcatatatggtagccttatatagttactgacgagcattttcccgttatattgtgaatgttattgtatggtacactttttaaatagaaatatcatttcattcgatggtttgtcagcactcttcacaggactatactatttttgttttgtttttatgctataaggtctttctggttgcttttacctactatgaaatatatggcataacatccatgcaatcatacttcatgcatatcaattcttccttccttttggacactctttttctgagaaaaaaagagaacagttaacttgttaaaggcctgaatgatctggtcacaccaccgaagtggatggtgcttactttcatagtgtcatggagtcttctgggttcaatgtcagcttagtgcaaaacgttttttatggctgtcagcatgatttacttgtgatgatatacgttctcatttgcaggaagctcgaagtaaatttgatgtggacatagaaccagctgatgcaattgagatagagccagttaatggttttctaaactcaggacaggcatcactcaagtacagaaggaaatcttcatcgtcatcaacgggaaggatcaattgcaaggtttactactgcaaagaagacgaagtttgtctttaccaatctgttgccttcgatgtcaaattccgggaagaggcagtccccagtccagcgcagattactctttcctattctgtggtaccaagagatacttcaagtagcgcacaattaatagccgctggaaagaacggcaaggtatagttagatctagggtgattgttttactgttaattcctgtgctgattgtgaatttggctttagtgccagaaaggtaagctcttttttggagggtgtctaaagttccaactgcctttggatgatgtatatgttgtaatataatgctgtatgcttg

SEQ ID NO: 14721 - DNA, 1227 bp, Oryza sativa
  ref <308>: DATABASE ACCESSION NUMBER: AK065272
  ref <309>: DATABASE ENTRY DATE: 2001-12-06
gagccttcccctcctccgccgccgccatctgccgtcgagagccccggttgcccacccccgcggcgacgatggcgggccaggagtcgctcaccctggcgggcgtcctgcgcggccacaacgacatggtgacggcgatcgcggcgccgattgacaactcgcccttcatcgtctcctcctcccgcgacaagtcgctgctggtgtgggacatcaccaacccgtccaccgccgtggccacggatcccgaggcggccccgccggagtacggcgtctcgtaccgccgcctcaccggccactcccacttcgtccaggacgtcgtcctcagctccgacggccagttcgcgctctcgggatcctgggacggcgagctccgcctctgggacctagccaccggccgcaccacccgccgcttcgtcggccacaccaaggacgtcctctccgtcgccttctccgtcgacaaccgccagatcgtctccgcggcgcgcgacaacaccatcaagctctggaacaccctcggcgagtgcaagtacaccatcggcggcgaccatggcgccggcgagggccacaccgggtgggtctcctgcgtcagattctcccccaaccccatggcccccaccatcgtctccggctcgtgggatcgcagcgtcaaggtctggaacctcacgaactgcaagctgcgcaccaagctcgagggccacaacggctacgtcaacgccgtcgccgtgagcccagacggctccttgtgtgcctccggtgggaaggacggaaccaccctgctctgggatctcaccgaggggaagatgctgtacaagctcgacgccggcgccatcatccactccctctgcttctcgcccaaccgctactggctctgcgccgcgacagaggactccgtcaagatctgggacctcgagtccaagctcgtcatgcaggacctcaagccagaagtccaggccttcaagagccagatgctgtactgcacaagtttgagctggagcgctgatggcagcaccctcttcgctggctacactgatggaactatcagggtttggaaggtctcagggtttggcggctatgcaatctaggtggtgaatttgttgaaaggcttaggaatcttaatttaaacatcgtgatgcctatcaagtttttgacagttctgaggcataacatttgcctggtactttctacttcattttcattaattaatgattagatttgccaatgaaaaaaaac

SEQ ID NO: 14722 - DNA, 3326 bp, Oryza sativa
  ref <308>: DATABASE ACCESSION NUMBER: AK065273
  ref <309>: DATABASE ENTRY DATE: 2001-12-06
gtcttgctccttctcctctccttttcctcctcttccttcccttcccttggcttcgcctccactcctccgctcactcctctccccctccacgatctcgccgggatctccacggcggcggcggcggcatggcgggcaacgacaactggataaacagttacctcgacgccatcctcgacgccggcaaggcggcaatcggcggcgaccgcccctcgctcctcctccgggagcgcggccacttctccccggcgcgctacttcgtcgaggaggtcatcaccgggtacgacgagaccgacctctacaagacatggctccgcgcgaacgcgatgcggagcccgcaggagaggaacacgcggctggagaacatgacgtggaggatctggaacctcgcgaggaagaagaaggagttcgagaaagaagaagcctgtcgtctgttgaaacgccaaccagaagctgagaaattacgaactgatactaatgcagatatgtctgaagatctatttgaaggagaaaagggagaagatgctggtgatccctcagttgcgtatggtgacagcaccacagggagctcacctaagacgagttcaattgacaagctatacatagtactgataagcctacatggtctggtccgtggtgagaacatggagctaggacgagattcagatactggtggccaggtcaaatatgtggttgaacttgctaaagcgttgagttcatctcctggagtttacagggttgatttgctgacaagacaaatcttggcaccaaatttcgatcgtagttatggtgaacctacagaaatgttggtttcaacaagctttaaaaattctaaacaggaaaagggtgagaacagtggtgcatacatcattcggataccatttggaccaaaagacaaatacctagctaaagaacatctatggcctttcattcaagaatttgttgatggtgcacttggccatatcgtgcggatgtcaaaaaccattggtgaagaaattggctgtgggcatccagtatggcctgctgtgattcatggacactatgccagtgcaggaatagctgctgctctgttgtctgggtctcttaatattcctatggcatttacaggccattttcttggtaaggacaaattggaagggcttctcaagcaagggcgacattcaagggaacaaataaatatgacatacaaaataatgtgccgaattgaggcagaggaattatctcttgatgcatctgaaattgttattgctagcactagacaggagatagaagagcagtggaacttgtatgatggttttgaggttatacttgcaaggaagcttcgggcaagagttaagcgtggtgctaactgctatggccgttatatgcctcgtatggttataatacctcctggtgttgaatttggtcatatcattcacgattttgaaatggatggtgaagaagaaaatccatgtccagcctctgaggacccacccatttggtctcagataatgcgcttctttacaaatcctaggaagcctatgattctggctgttgctcgtccatatcctgaaaagaatattacatcacttgtaaaggcatttggtgaatgtcgccctctaagggagctagcaaatctgacactgataatgggtaaccgtgaggccatttctaagatgaacaacatgagtgctgctgtcttgacctcagtgcttacattgattgatgaatatgacttgtatggtcaagtggcttatcccaagcatcataagcactctgaagttccagacatttatcgtttagctgccaggacaaagggtgcttttgtgaatgtggcttattttgaacaatttggtgttaccctaatagaggctgctatgaatggtttgcctattattgcaacaaaaaatggagctcctgtagaaattaatcaggtgctgaacaatggtctccttgttgatccacatgatcagaatgccattgcagatgcactgtataagcttctttctgacaaacaactttggtcgagatgtagagagaatgggctaaaaaatattcaccagttctcatggcctgaacattgcaagaattacttgtcaaggatattgacacttggtccgagatcacctgctattggtggcaaacaggaacagaaggcacccatatcaggaaggaagcatatcattgttatatctgtagactctgttaacaaggaagatctagtccggataatcagaaacactattgaagtcacacgcacagaaaaaatgtctggttcaactggttttgtgctgtcaacttcacttacaatatcagagatacgctcgctgctagtgtctgcaggcatgttgcctactgtttttgatgctttcatctgcaatagtggaagtaatatctattatcctttgtattcgggagatacgccaagcagttcccaggttactcctgcaatagatcaaaatcaccaagcacatattgagtatcgatggggaggagaaggcctaagaaagtatctagtgaaatgggctacttcagtggtagaaagaaagggaagaatcgaaagacaaattatttttgaagaccctgaacactcttcaacctattgtcttgcatttagagtggtcaatccaaatcatctaccccctttaaaggagttgaggaaattgatgagaatccaatcactccgttgcaatgccttgtataaccacagtgccaccagactctctgtagttcccattcacgcatcacgttcccaggcactaaggtacttgtgtatacgctggggaatagagctgccaaatgttgcagtccttgttggtgaaagtggcgattcggattatgaagaactgctaggtggtctccacaggaccgtcatcctgaagggcgagttcaacatccccgcgaacagaatccatactgtcaggagatatccgttacaagatgtcgtcgccctggacagctcaaatatcattggcattgagggttacagtacagatgacatgaagtcagctctgcagcagattggtgtgctggcacaataacaccttctagcttgcataccacacaaagaaaacgaaaagggaaagtaaagaaccaaaccaagaaccactatttccatacttgatggaaatgccgattttgttttgtaggatgcagagtttgtgtgtgtgttccattcctgagctgtgaataactctccctccttttgtttgtgctaagttcttttttgaagtgaaccatgtggatacatcaaaaaccagacacaaagatggtttaaacatccatgattacgggaaaaaaaaccatacataaagaatagaatggttcagagcgagagagctctaaaatgc

SEQ ID NO: 14723 - DNA, 3178 bp, Oryza sativa
  ref <308>: DATABASE ACCESSION NUMBER: AK065274
  ref <309>: DATABASE ENTRY DATE: 2001-12-06
gaagtatctccccattcctcctcgcgtaaaagaaaatctcccgtctcgtcgtctccgttccttgcgccatctcgcggctgaacaggggtcgcgagcagagcaggggatcctgctcatagaatggacgctcatgatggtgaggccgatgagttgccgccgcctcctcccgtacctgcaaatgtggtgcctattaaagctgatgacgttgagagcgaggtgccagcaaacaaaccagcaaaacctaagcggtttccaatggccaggcctggtttagggagaaaaggacagccaatccagctcttggcgaatcattacagagtttctgtgaagagtagtgaagaatatttcttccactacaatgttattctgaagtatgaggatgatcgaccggttgatgggaaaggggtaggtcgaaaggtgattgataaactgcagcaaacctaccgttctgagctttcaagcaaggactttgcctatgatggtgaaaagagcctgtttacaattggtgctcttccacaagtaactaatgagttcacagtggtgttggaggatgtttcaactggaaagactgctgccaatggaagccctggaggtaatgacagccctggaggtagtgacaggaagagagttaggagaccataccagaccaagactttcaaagtggagctgtgctttgcagcaaagatccctatgaatgcaattgctcaggccataaaaggtcaagaatcagagaactcccaagaagctctcagagttcttgatataatattaaggcagcactctgctaaacagggctgccttttagtacgccagtcatttttccacaacaatcctaataactttgttgacctgggtggtggtgtgatgggctgtcgaggattccattcaagtttccgtggcacacagagtggactttctctgaatatcgatgtttcgacaactatgattgttaaacctggtcctgttatcgattttcttcttgccaaccagaaagttgatcaccctgacagaattgattggcaaaaggccaagcgtgctctcaagaacttgaggataagaaccacccctgtgaattcagaattcaagatcattggtttgagtgacagaaattgcaacgaacagatgttttcgttgaggcagaggaatgggaacaatggggatgttgatgaagttgaagttacagtctatgattactttgtgaaaaacaaaggcatagagctgcgctattctggcaatcttccttgcataaatgtggggaaaccaaagcgtccaacttattttccaatagagctatgctctcttattccactacaaagatacaccaaagctttgtcaacactgcaaaggtcctcccttgttgagaaatccagacagaagccccaggaaagaatgtcagtccttaatgatgcacttcgacatagtaattatgattctgatcccatgttgagggcatctggcatttcaattgcccaaaattttactcaagttgaaggaagggtcctgcaacccccaaagctgaaagctggcaatggtgaagatatattcccacgcaatggtcggtggaacttcaacaataagaaactgattcagacctgttctgtcgataagtgggcagtagttaatttctctgcacgctgtgatgtgcgaaatcttatccgggacctcataagaaatgcatctgcgaaggggattcaaatggccgaaccttttgatgtgtttgaagagagcccctcattgaggcgagcacctgtatcaagaagagtagatgatatgtttgaacagataaaatcgaaacttcctggagctccgaaattcctcttgtgccttcttcctgagaggaaaaattgtgaagtttatggtccttggaagaggaagtgtcttgctgaattcggtattgtcacacaatgccttgctccacaaagagtcaatgatcagtacctactcaatttgctattgaagataaatgccaagcttggtggaataaactcattgctgcaaattgaagcatccccttcaatacctcttgtatcgaagacacctaccatcatcttaggtatggatgtgtcacacggtcaaccaggacaatctgatagaccttccattgctgcggtggttagctctcgccaatggcctctcatctctaaatacagagcatcggtgcacactcagtcacctaagctagaaatgatgtcttccttgtttaagccacgaggaactgaagatgatggcctcattcgggaatcgctgattgacttctacactagttctggaaaacggaaaccggatcatgttatcgttttagggatggagttagtgaaagccagtttactcaggtcattaacattgagcttgatcagatcattgaggcatgcaaatttctcgatgagaagtggtcaccaaagttcacagtgattgttgctcagaagaatcatcataccaaattttttcagtctggatctccagataatgttccgccaggtactgttgtggacaaacaagtgtgccatccaaggaattatgacttctacatgtgtgctcatgctggaatgattggaacgacgaggccaacacattatcatgttctgcacgatgagataggtttctcccctgatgatctgcaggagctagtgcactcactctcttatgtgtatcagagaagcacaacagccatatcagttgttgctccgatttgctatgcccatcttgctgctgctcaggtgggcacattcctcaagttcgaagatatgtcggacgcgtcgtccagccaaggaggtcatacgtctgtcggaagtgtaccggtgcctgagctgcctcgcctccatgagaaagtgaggagctccatgtttttctgctgatcgtgccgcctctcgatcaaatgctcgccgacgttgagaaatccggtgatcggcctgggggaactactagtacttttgcttctcataattaggaacatgtatggaacctatgtacctgcccttggcatgctgcctgtgtcatggattatctgctggtaggagtatcctttaaccaaacccttttagcttttaagttaggtttaatggactgctgtttagtatgtggtgtggtgttagtaagtttccagacttcgacattgtgcagctatgcctattgctggttatggtcccttcccttctatgtagcatgtgccgtttccctt

SEQ ID NO: 14724 - DNA, 2082 bp, Oryza sativa
  ref <308>: DATABASE ACCESSION NUMBER: AK065275
  ref <309>: DATABASE ENTRY DATE: 2001-12-06
gatttggacgcccactcgcatcgccgacgaatttctcgctagggtttcgcggatcaaggcggcggcggcggctagggtttcgaggcgggccacatggcctcgccggcggcggagggggacgcggtgagcgcggggttcgcggagctggagcggcagcagcagctgctggcgagctgcacgaggctgtacaagcagctggaggagcacttcgcgtcgctggagcgcgggctggcggcgaggtcggactcgctccgccacaagcgccgcgcggcggaggcgcgggcctcggccgccatggactcgctccgccgccgcgaggcctccatcgatggctccgtctcccgcgcgctcgaccacctcgacgacctcgcctccgcctcgtcggtgccgtccgacgccgccgcggcggcggagggggtggccgagagcctgagggcgatgtgcgccaggatggactccgcggggttcttcgggttcgtggtcgcgcggcggaaggaggtggacgcgctgcgcgccgagatgccgcccgcgctcaagtgctgcgtggatccagccaaattcgtcatggacgcggtcgccgacgtgttccccgtggaccgccgcgaggcgaagaaccccaccgacctggcctgggcgtgcgtgctcatcctggaggcggcggtgccggcgctggccgatcctgacccggagattggggcggcaaggctactggtgccgcgtgcggcgcgcgagcgcgcgcgggggatggcgagggagtggaaggaggcggcggagcgcaagggcggggtggagtggaccaagccgcccgacgcgcacgccttcctgcagcacgtggcgacgttcgccgtggcggagagggaggaccgggggatttaccgcaggattgtggtcagcttctcgtggcgccgacaaatgccccgcctcgcgctcaccctcggccttgaagaagacatggctgatattatcgaggaactaattgctaaggggcagcagcttgatgctgtgaattttgcgtacgaggctggtcttcaggagaagttccccccagttcctctcttgaagtcctacctggcggactcgaagaagacttcatgcaccgtttcagataattcaagcaccagcagtggtcaatctgggagcaatgcaaacaagaaagagcaatccgtgctgagggctgttataaagtgcattgaggatcgcaaactggaagctgagtttccactggaggaccttcagaggcagcttgaagaactggagaaggccaagactgagaagaaaaaggcaacttcaagtgcgtccagcggcggtagcagtggccctgccactaagcgcatccgggcaagcaatggaggcccgatgcctcctgcgaaggcaggtcgtctcactaacaatgcttgtgtgtcttctaccccagctgccaccacctttgtccgctccccctcgcacacatcgtacgccatggcctccccctacccttacgataggccggttggtcatggcctctactgcaaccaaagcccaccggcgatcagggagccatatgtctacccagccaaggaggtaactaattttgcgccaggtttgccgtactcttcccctcccataagctatccccacgcctatggcgggtacaacaatggaatgggagcttacaacaatggaatggcacctgccttccaccaggcttactaccggtaggatcagtcaggaaagtcgctgatgaatgacatgacaaataactgatgatgtcgacgacaactcaatctgcacaatggctcatattttgtagtgactgactacaaacggtaggttgggtatctcatcttatctgtgcttactaagttaccactactactagatgcactctactctgcattgtgttaggttatctcatgcctagatcactactttgtactaccactaagaaacctggatgtaaattatgtacgctaccattgagactgtactgcattatgtaattctgttcagaaacaatgaaaaaaacacccaaaaaaataaactatcatgtaatccttcggcaccttgatggaccacttaatcaaagacaattcttagtttagc

SEQ ID NO: 14725 - DNA, 3142 bp, Oryza sativa
  ref <308>: DATABASE ACCESSION NUMBER: AK065276
  ref <309>: DATABASE ENTRY DATE: 2001-12-06
ggcggggtagtacatactacagactacagagggatggcgtttcgtctgtagcgatcggttggagcttgtggatgaaatgggccccaatttctgttgccctccaccatttttgaccccttaaaattcagacagatggacagtctacttacattctctccctcatcttcttctcccttgagatgttcttgctgttcttgctccaatctcctcttgttttcttgctgggagttgtggtggctgctgctgctgagctaggagtagttcacatgtgtgtgagctgaagctgaggttggttgcttgcttgcttggccatctggaacagtcagtgtctctgcttttttcctcccatttttttagtttatttttttggctgcagagagagagagagagagagagaactctgctttcttctccaactccctcccttttgctttcccacctctttgcctcaataatgatggggtggtggagatggtggtgggtttggtcctgaagctccatgcccactctctccagctctctcctctccctgtccaaatccaccaccagcttctttctttccattttgcttctccctttctcttttcctgttctagttggggagcagcagcagcagcaggagcagtagtagtaggttgttggttttgtacctttgggctctttgcctttgctttcttgctggggattgggaggcctgccttgaagctgaatcccaatcttcccctgcccacatctgcttcccagcatcctgcaactttggttataaggtggttggtttttgttcttgatttgcttcatcgattgggaggtttcttgctgttcttgggttttgtgctgtgaattggattgggaggttttttgttgccatgagggcggcggaggagaggaagggtgtggtgccggcggcgaggaggagggaccagttccccgtcggtatgcgtgtcctcgccgtcgacgacgacccggtgtgtctcaaggtgctcgagaccctgctgctgcgctgccagtatcatgtgacgacaacaaatcaggctgctatcgcgctgaaaatgctgcgggaaaacagggacatgtttgatctagttatcagcgacgtccatatgccagacatggacggctttaagcttcttgagcttgtggggcttgaaatggacctccctgtcatcatgttatctgtgaatggagagaccaaaactgtattgaaggggataacccatggtgcctgcgactatctcctaaaacctgttcgaatcgaagagctcaggaatatctggcagcatgttatcaggaggaaattcagtactcgcgaccgtgctaatctcgatttctatgaagagtgcaacaagccaccaaatgcggattcagaccatgtgcatggccatgttacatgtggatcacctgatcaaagtgggaggcccagcaagaagaggaaggagtactgtagtgaagaggaggatgagggtgaggtcaatactcaagatattgatgatccctcggctccaaagaagccgagagttgtttggtcagttgaactacaccggaaatttgtcgctgctgtcaaccagcttggaattgacaaggctgtgccaaaaaggatacttgagctcatgaatgttgagaaactcacaagggaaaatgttgcaagtcacctacagaagtacaggctctatctcaaacggctaagcgctgtggcgtcgcaacaagttagcatcgttgctgctttgggaggtagagacccctttctgcacatgggtggatttgaaggactacagggttatcaagcttttacctcttccgcagctctatcatcttttactccacatggattgttaaacagtcctagaaacaatccagcagctcttggaactcagggggtacctgcttcaaaatcgattcagactatgagcggaagccatacattgagccattccattaatgatgcaaataagtaccaccttagcttaccaggaaaccagaaaggaaacttgggacaaggtttggcaacatcgcttgggcagacccaaatgcaacagaagtggatccatgaagaaaccgatgatctgtccaccatcctttctgggaatggcctatctaatggtatgtctggcacactccaaagtgtcacaagcagtcctttgctgcctcaagaactagccgagtgcacacaagccaaaattgtcagtcagccatcaattcgaacttcctctgtaagttcagaacatattgaaggcgccgttggagtttcatctggtctgcttgaatctcgtgtatcccagcagagtactattcctttatcaggattttccgccaacgggttgctaatccatggttcgtttaacaatacctgtgcaaacaaattgggtggtacatcttcatcgtgtgcacctgctcgctcttcaaatgaccttatggtagcaagagacacaaaaggtggagctagctcttttggtggcgcgatgcttttacctccagatacagagcaaaagtacttgaattttggaggtggaaacggtttgaaacagaagttcgatgataggactgcagacagtctgtttgatctcaagttcgtatggagttctgtaccgagctctcaattggcaagcaacattggggctcatcatgctatgagccaaagatggaacaatagcagtagtaacagtaccaatattggtgccagaatgattgggcaagcaacctcaagtggttcaacagttatcccacaaatgaagacagatttcctcgtttcgggagatatggcgatgccgaagaacgcctccgatttgagcatcccgaaacttcagagcgaacttagctctagcagctgcagcttcgacggccttctcaattccatagtcaaagtggagaaggatgatgttaccttcagcgacgcactggggtggtgcgacttctactcccttggagcttgcatatgacagatctctcgtctgcatctgtgtacatgtccccccattgtatgctgtgtactagctagcagtgttagtttgtgatgtaatctagtttaggcctgtgtatttaagtaaaaatatgtattgtagtagtaatttggaggacgagatgggttgtcaactcgacctaaaaaaaaagacattgactggcttgtataaacctgagcttactgctt

SEQ ID NO: 14726 - DNA, 1067 bp, Oryza sativa
  ref <308>: DATABASE ACCESSION NUMBER: AK065277
  ref <309>: DATABASE ENTRY DATE: 2001-12-06
gctccgggccttgaccgccgcctccgctgtgcccgcagcagccgccgtcgcagccgtcgcactctccaccaactcctcctcttcctccagactccggctcccctcgcccgcctcgctcccctccctctcctccgcgtacgccgctgccccggcctccggctccgcccgcaagccgaacgccgtgcctccgatggccgccgccgccgccacggccgatctctctgccgccgccgataagggcgccgcgcttccggagctcatgacggaattcatggtggatatgaaatgtgatggttgtgtgacagcagtgaaaaacaagttccaaactcttgaaggaattaaaaacattgaggtggaccttaataatcaagttgttagggttcttggatctctcccagtgaacacaatgctggatactctgcaccaaacaggccgagatgctcgtctaattgggcaagggaacccaaatgattttttagtatctgctgctgtagctgagttcaaagggcctgttatatttggtgttgttcgtctggctcaagttaatatggaattggctatagttgaagccacttttagtggtctatcacctggtaaacacggatggtcaataaatgaatttggggatttgacaagaggtgcagaaagtactggcaaagtctataacccatcggattatagatccaataagcctcttggtgacctgggaacactacaagctggaaaaaagggtgaagcccaattttcagcttcaaaagagaaactgaaagttgttgacttgattggccgctctattgcgttgtatgccactgaggacagatcagatcctggcattgcagctgccgtgattgcaaaaagcgctggggttggcgagaactacaagaagctgtgcacctgtgatggtgtcaccatttgggagtcaagctaatttgtgttactagtgaggtttccattttactgtttgctccaatgtgttgtacacgaagtaatgtagaaacaatcaaccaactactgaacaattggaataagcatggatacagtgaggaataaagcttgttttggagtgc

SEQ ID NO: 14727 - DNA, 3426 bp, Oryza sativa
  ref <308>: DATABASE ACCESSION NUMBER: AK065278
  ref <309>: DATABASE ENTRY DATE: 2001-12-06
gagtccaccctccgctccgcctcgcgcctccaaaaacccttcccatcctcctcctcctccccctagggttcccgtcgccgccccgcgccgccgcggccgccatgggctcctcgctcccggccaaggaggccaacctcttcaaagtcatcgtcaaatcctatgagacaaagcaatataagaagggcctgaaggcagcagattccattttaaagaagttccctgagcatggcgaaaccttatcaatgaaaggtttgacgctaaattgcatggatcggaaatctgaagcatatgaacttgttcgccgtggattgaagaatgatctgaagagtcatgtgtgctggcatgtctatggcttgctttatcgatcagacagagaatacagagaagccataaaatgttacagaaatgctctgaggattgatccagataacatagaaattctacgtgacctgtcacttctccaggcacaaatgagggacttgtctggctttgttgagactaggcaacaacttttaacactgaagccaaatcaccgcatgaactggattggttttgctgtagctcaccatttaagttccaattcttccaaggcaatagaagtattggaggcatatgaggggacactggaagatgattatcccccagagaatgagcgatatgaacacagtgaaatgcttctgtataagatttcattgttcgaggaatgtgggatgctggacagagctcttgaggagatgcagaagaaggagagcaaaattgttgacaagctatcgttcaaagaacaaatggcctgcattttgttgaaacttggccgctttgaggaggctgagaaaacatataggtccctgcttttcatgaatcctgataactacaagtatttcatagctgttcaaaagtgccttggtctatactcagagaatggtcagtattccactgatgatgttgaccgattatgcgaattgtatagctcacttaaagaagaatatggttggtcatctgctgttaagcgcataccccttgatttcctggaaggagagaaatttcaggaggcagcagataattatgtcagacccctattaaccaagggagtaccatcactattttctgatcttagcccattgtacgagcaacctggcaaggcaaacatattggaggaattgtttcttaagctagaacgttcaattaggacttcaggatgcttcccaggaagttcgcatacggaacctccatccacactcctgtggactctgtttttgatctctcagcactatgacagaagaggccagtatgatattgctctagataaaattgatgaggctatttcacacacgccaactgtaattgatttatactcaataaaggggaagatattgcagcatgctggcaatttctcagcggctgcagcattggcggatgaagctaggtcaatggatctcgctgatcgttatttaaacagcgagtgtgttatgcagatgctccaagctgaccaggttggtctagctgaaaagacagctgttttgtttactaaggacggcgatcagcacaataatctccatgacatgcagtgcatgtggtatgagcttgcttctggtgagagttactatcgtcaaggtgatctcggcagggctctcaaaaatttcttggctgttgagaagcattatgctgacatgactgaagatcaatttgacttccattcgtattgcttacggaaaatgacactaagggcatatgtttctatgctgaagtttcaagatcgcttgcatgctcatgaatatttccacaaggctgcagcaggagctatcaggtgttatatgaaattgcatgattcaccatcaaaatcatccactgaggagaatgatgaaatgtcgaaattgccacctgctcagaggaagaaactgagacaaaaacagaaaaaggcagaagctcgtgccaaaagggaggctgaagagaaacaggaggatgagacaacttcatctcacacttcaaaatctgggaagaaacaaaacgcaagaccagttgatttggatccacatggtgaaaagttagtgcagattgaaaacccacttgctgaaggaacaaggtatttgaagcttctgcagaataactcatcagactcgttggaaactcatacactttcatttgaactcaacatgagaaaacaaaagattttacttgcttttcaggcagtcaagcagctcattaagttggatgaaaatagccctgacagtcatcgttgtttgataaggtttttccacaagataaacaatcttccctctccagggacagattctgaaaagctaatttggaatgttttggaagctgagcgtccagatttaaggcagttgcatgggaagtctcttgttgaagtaaatagaagtttccttgaaaagcacagtgcttctttgacgcacagagcagcagcagctgaaatgatgtacctcttggaaccagataagaagcttgaggcaatcaaattaattgaagattcagtaaacagcacagcatcaggaaacagtgtgcttggtcctgtgaatgaatggaaaattctagactgtattgatgttcacaaattgctggagacaatctttggtgaccaggatgtggcaaacagttggaaggcacgatgcgctgaatatttcccatactcaacctactttgaaggcattaagagtgctagtgctgcctattgttctgttgccaatagtcttgaggattcatcagaaaatggaattgtagcaaatgcgcaaatgaaatcagcagacggagaaacatgcactttgaatggaactgtgcatattgtggatgaactgagcaatctaagcattaggtaatgcgccataagcagggtacctggttacagctggaacagaacacattttagagccagtgcttaattaaccaagagtgcacacagaagacgagagagatctagaggcgaagtgctagactgcaaagaggaacttcttgatgattttcatttggaatatattattgattgggagctgagatctcttcggtctctggtgattttctgagttccagcttgtacctttcgttgtcatcttgtacatggtgaaaggataacctttcatctccagttcccatgaggctttgccggggtttgctgcctggctacatcagggcgtgacattcttttgaagcagcggaccttgaatttgttgcacggttggttttttcagtcgctctccttggactgcaaaaattttggcataaaacaggtataatctcaaaaacttttttttttgtgatatcatgaatatgttctttgcaatagttggatgtacttggggttgccctacccctcattttgcaacttttgatccttggcgctgtaaaatagttaactcgtgtgggacattgatattgtattccccttgtcctgacaaataatggccattgttaacc

SEQ ID NO: 14728 - DNA, 3394 bp, Oryza sativa
  ref <308>: DATABASE ACCESSION NUMBER: AK065279
  ref <309>: DATABASE ENTRY DATE: 2001-12-06
ggggggaaattctcggcttgcggcggcttcggcggcggcggcgccgccgccgcggcgcggggctaccgccggttcgtatctccgcgaaccggagacgtggaagggggaggagagatatagcgagtgtgtgtgtggagcgaatctacaacgcgtccttcgttttttttggctagaataggtttgagtatgatgttcacagccagccttatctattatatttagacaaaagaaactagagaaggcaattaattcataccctttttgttgagttgctaagaagcttttagcataatcttctccttatgctcctatctggcatggcactatcatcgtcaatctctatgatggctatatgagatattttaggccaatcttctccactgttttcttgacacctctctgccagaaatgggcactctttgatgtataattcttctaaggacagtggaagtccatgtgctggcaagcattttatgctaacacaatttaagatagtcatagtttttagacaagaggcttcttgtaaacaagcaggcaaggaggccagattactgcaattgaagatctccaattttttgagggtagccggtaacttttctggaaaagtattaaggctaacgcaatccgcaatgacaagattcttgagagcaaagagctcattaagttcatcaagaagaggattgattatgttggagcatgaggtgatgcgtagatcttcaatcatgcgaggtagtaagccacgatgttctgctgttgccagccttggacaatcataaatgtgaagactctgaagagcagttaaagttcgtaatccttcagttggggggtgaattagttctggacagttagtgatggttagttgctggagggctgataattgctgactaagcaatccttgctgcaaggatgtgagattggggcatttgtgaatctgtaggcgtgtcaatgatggtagaaatcttggagcatgaacttcaggaagtacagaaaagcctgcctcagaaattttcagttccactagtgttgatgggagaagtggcaattctgttactttgggacagtcaagcacttgaagttctctaaggaatggaagaaactcaccatcttgtgtggaagtccacctttcgagattaggcgtgtcttcaaatacaagttctttcagtgacggaaaccccttaacttcactactacctgaaaactcatctccaattttaataatggtaggaaaacccccaatgattataaccttgagtagaggcagctgtccaagtgctggcagaattgaacaatttgtacagtcagacagatggatagtttgcaaatgtgagagcctatccaatgtggaaattcgaatcctgcaaatgccttgactgtcagctccttgagttcatcatgtggttcgagggatgtgagtgtttctatgtcctggtttgcttcttctgaagtaaaatccctgctactggaccatataaggtctagaatgctgatgtgtgccttctcacttagcaatgcttcatctgcttcttccgcactagacacgctctctagatttttaatgcagatatgtcctccgatcttattcatagccttcaattcactaaccttgtatcctttgtccttatggacaacaaattcctccaacttttgaaggcaagtcaatttccctattctggctatgccagtgatcagttcagttcttgcttcgagggataggagatttacaagattatgcgaggcagtttcgtaacttaagtgtttgcaagcaatagagcttaccaattgatgaaggcagctttcttacaacagtgcctgataggttcaagtatcggagcatctttaattttccaacagattctggcaattctgtaatttcttgtcggttcaaatcaaggacatggaggtaccttaaattgaggaacagatcactggggatagagcttgtctttgatttatatccattcagcagtagaaggctccgtgctctattaaatccacgaaaagcttcaaatgtagtttgacttttattgtcacaagagaatgataggtgcctggcatttctttctgtggtgctattgtttggaagattatccagtctcatgcattcgtcaatggagacagactgcgctaggtcatgcatggcatcatgcatcacgtatccatccttgtgtttttggaagaaggatctgctcagtaattcatcaaaatagttattcccaatctcttccatccttctccgcccttgaggctggatgtacccaactgccatccagatctggaccaatatgtctttctcaaacacatagtctttgtgaaagaccgagcagaatgcaaagcatcgcttcaatatgggtggaagatgattgtaactcagtctcagagctgcagaagcagattctaaccttcagatggggatagttggatgggcctgcaagtttggatcggaggacttcagcagcatgctcatcaagcaggtcatccatctcataggcgacgtccttcagcctggaaagccagcttcttgccgcctgatctttcagctgccgctcctctgcatcttcaacgtgagccagaagtgtcgacagactgcttgatagattctgcagctccacagctatgttttgagggaatttcagctcgctggaagcagcggccaccgctttctcgaaaagcgcctgcatgaacgcggacagcacagcttctccgattggcatagtctattagtgtacaatctgttatgctttcagtataaagctgggcagcaatgcctcttctctaaaattagtgtacaatctgccgggatgtgaatcggaacagcagttaaattagcacaggaaagtacgagacaagttgtcaagagtcaagcttgatgaaccccaagtgacgagtcaagtctgcaatttcctggttaggccggtgaaaggagcatgttggacttttagaaggaaaagacactgctgcaggctgcaacttggccacaacttcagtgtaagacagctgatgtaacaacttctatcaagggcgttgcctcgccgttgtttcttccttaaggaatcgctggtgattatccattcccgtatcactgcaaacagctgctactgtcccttcctgtatctcattccctgaattgaaggtggtacatacagaagagccctaactataggcaaaggaggaaagaggcatctgtcgcaccgcgcgcctctgctgctcaaaaggctaaaatcatgcgattttgtgcttagtccagtaaacattgggaagttagaaggtggtcgtattgagcggattcaccgacaagttcttccttgtcattatatggctattggtttgtataatagtatgtattttcaagacttgaagtgcacattttcaaaattgttcagaagtccttttgagg

SEQ ID NO: 14729 - DNA, 1533 bp, Oryza sativa
  ref <308>: DATABASE ACCESSION NUMBER: AK098917
  ref <309>: DATABASE ENTRY DATE: 2002-08-28
ccttttttcccaccaaaaaccctagcctccccctcctcttccagattcatcgccgccgcgccgccccgagcccagagtagccggcgacgatgccgcccaaggcgtccaagaaggacgccgcccccgccgagcgccccatcctcggccgcttctcctcccacctcaagatcgggatcgttgggttaccaaatgttggcaaatccactttctttaacatagtaacaaagctgtctatcccagctgagaacttccctttctgtaccatcgacccaaatgaggcacgggtatatgttccagatgagagatttgattggctttgtcaactttacaagccaaagagtgaggtgtctgcatatctagaaatcaatgacatagccgggcttgttagaggagcccatgctggggagggtttgggcaatgccttcctatcccatatacgcgctgttgatggaatttttcatgtattgagagcatttgaagacaaagaagttactcatattgatgattcagtggatcctgttagagatttggaaactattggtgaagagctgagactcaaggacattgagtttgtgcagaacaaaattgatgaccttgagaaatcaatgaagagaagcaatgataagcagctgaaactcgagcatgaattatgtgagaaggtcaaagcccatcttgaagatggaaaggatgtccgctttggagattggaaaagtgctgacattgagatcttgaataccttccagctacttacagctaagccagttgtctatttggtgaacatgagtgagaaggactaccagaggaaaaagaacaagttcctacctaagatacatgcctgggttcaggaacatggtggtgaaactattattccttttagctgtgcttttgaaaggttgctagcggatatgcccccggatgaagctgctaaatattgtgctgaaaaccagattgcaagtgtgatcccaaaaattatcaagactggttttgcagcaatccatcttatatactttttcactgctggccctgacgaggtaaagtgttggcagatcagacgtcaaactaaagcacctcaagctgctggtacaattcacactgattttgagagaggcttcatatgcgctgaggtaatgaagttcgacgatctaaaagaactgggtagtgaatctgctgtgaaggctgctggaaaatacaggcaggaagggaagacctacgtggtacaggacggggatatcatcttctttaaatttaacgtgtctggaggtggaaagaagtgagtcaatgtttgaaggtgatagcgttccgacagagtggtgcattttactttaaacttctacacttagctctgtagcaataaacaagttatgattcgatattttgtaccatgaggctataaaattatccaaggattgtatgatgaggctttaaatcattgaagaaaaagtgtacggttttgcaatacaagcattcttggcatgtttgtcttgcctgggtctacatctgtaatattaatggataactgccgtgcatgtttgg

SEQ ID NO: 14730 - DNA, 1096 bp, Oryza sativa
  ref <308>: DATABASE ACCESSION NUMBER: AK065280
  ref <309>: DATABASE ENTRY DATE: 2001-12-06
gaagcaaacccaacccaccgctaccctcttctcgccgcaagcgaggcgagccaagcaaacgcgaggccgacgacgacgacgaggaggaggaagcgcagccactagtcgcggcggcggcggcggcggcggcggcgggtgatcggaggagggatggtggggcttgtgggaggaggaggttggagggtcggggatgatgcggcgggtgggggtgggggaggagcggtggcggcgggggctgcggcggcggcggaggcggagcacatgcggaggctccacagccacgcccccggcgagcaccagtgcagctccgcgctcgtcaagcacatcaaggctcctgttcacctcgtgtggtcgctggtgcggagcttcgaccagccgcagaggtacaagccgttcgtcagccgctgcgtcgtgcgcggcggcgacctcgagatcggcagcgtgcgcgaggtcaacgtcaagaccggcctcccggcgaccaccagcacggagaggctcgagctgctcgacgacgacgagcacatcctcagcgtcaagttcgtcggcggcgaccaccgcctcaggaactactcatccatcgtaactgtccatccggagagcatcgatggaagaccagggacgcttgtgattgaatcatttgtggtggacgtgcctgatggaaatacaaaggacgagacatgctactttgtcgaggccgtgatcaagtgcaacttaacatctctcgccgaggtatcagagcggctagcagttcagtcacccacctcgccacttgaacagtagggtcatcactggcacgggacatgcgaaccggcatgaataagaagcttcaaatggttgctagagatttaaatctttttgagatggtagttcctccattgtcttcgatatatatgcctcttgtaaggattagtatgtagggttaattatctttagttgctggctagtgatgggcttaggtctttttagggactgcacctagctaccttgtagttatgtatgcatactgctagtagtatgtgtataaatagggaagcatggagtggtttttgcctctttggtgcacatgtgaaacaacctcaagagttctttttcctgc

SEQ ID NO: 14731 - DNA, 789 bp, Oryza sativa
  ref <308>: DATABASE ACCESSION NUMBER: AK065281
  ref <309>: DATABASE ENTRY DATE: 2001-12-06
gtacctttcttcctcctccctctctctctttatctctctcttttcttatcctcttcggctatggcaacgacgggtgggacaacgggtactggagcagcgacggcggcgaggggacgagggctagagtagtggcggcggggagcggcgtttgccgattcccctcctcttccttggctccccaaaatcctcctcgcacacaacctccgcatcgcacgccgccggccgccggcgtcgcatcgctcatagattaccggctgcgccagccatggaccatgtcaggaactcggcgttggccgcactcgagggcggggtagcgggtaataaatccgtcgccggagccggcgctgccccagggtcatcctgcaaacgaggggagcacaagcaccaagagaggagcgcgtcctgctcagggaggagacccgcggcgtggtagcgtgtgagggggcgaagctggtggagcggcacgagcgggcgcggcattgggcggcgtggatggaagcggacgacatggagcaggtggggctgagctacagcggcgccatgcatggaggcgaggaagctgctacagagctgcaggtgggcggggccgtacggccatggcttcttattctgctggcacatgaggctgctctacgccgtctccgcgtggcggccggcgccgtcgcgccgccaccacgctcggtcataggtgagccagctagctgctcgatcgattgaggtgcacgcgcatgtgttctctgatcattggagtagagtggagaactgcattaatcaacttgtgttgttttc

SEQ ID NO: 14732 - DNA, 2733 bp, Oryza sativa
  ref <308>: DATABASE ACCESSION NUMBER: AK065282
  ref <309>: DATABASE ENTRY DATE: 2001-12-06
gacctcaactgctccaccttccaacgccattaaggcgaggcgaaccaccggagcagcagcagagcgcggccgatcccctcccctcccctcccccatctcgacgccggcggcgagcgagcccccacaggttccgtgagatccgggccatggcgcacgcggatgcggacgccggggacctccccccgccccccgcgaagaagaagaagtctcccaccgaggaggaggcggagaagaggaggaagaagcttactccggggagcttgatgaaggggcttattcggtctggtgggggtgacgcgacccctgcggagggagatcaggttatagttcattgcacgactcggacaatagatggcatcattgtcaattctacaagaagggagcatggaggtaaaggggtcccgctcaggtttgtcttggggaagagcaaaatgatccttggctttgctgaaggctttccaacaatgctgatgggtgaaattgcgatgttcaaaatgaagcctcagatacactatgcagaggaggattgtccagttacagctcctgacggctttccaaaagatgatgaacttcaatttgagattgagatgttggatttcttcaaagccaaaattgtggctgaggacttaggggttgtaaagaagataattgatgaaggcaaggggtgggaaacaccgagggagccatatgaagtgacagcacggataactgcaagaacaggagatggcaaagaacttcttcccagtaaagaagaaccctatttctttactattggtaaatctgagtttaggtacctaaagggcttgaaatgggaattgggtcaatggcacgtgaggaaaaagcaattatttatgttacaagtgcctatttgacaaactcttcactaattccgcaacttgaaggtattgaagaagttcaatttgaagttgaactggttcagtttgttcaggtgagggatatgcttggcgatggccgcctcataaaacggcgtgtagttgatggaaaaggtgaatttcctatggactgtcctcttcatgatagcttgctaagagtgcattataaagggatgctccttgatgaaccaaagtcaatattttacgatacccgagttgataatcatggtgaaccattggagttctgttctggagaaggcctggtacctgaaggatttgaaatgtgcgttcgactaatgcttcctggtgaaaaatctattgtgacctgccctccagattttgcatacgataaatttccaaggccagcgaatgttcctgaaggagctcatgttcaatgggaaattgaattacttggatttgaaatgcccaaggattggactggtttcaccttccaagaaatcatggatgacgaagaaaaaataaaaaccacgggtaatcgactgtttaaagaagggaagtttgagctagctaaggcgaagtatgaaaaggtgcttagagagtacaaccatgtgcatcctcaagatgatgatgaggggaaaatctttgctaattcaagaagttctctacatctaaatgtagctgcttgctaccagaagatgggtgagtatagaaaatctattgacacatgtaacaaggtatgtttccaaaaagaactttgtactctcaaagaattttcctagggtgtctatatcaaagagggtggtgcatgcttgtatgggggctgtcattggacctcttccgcacatgccactggatgagccttgtaatggatagatctggggatccaatcatccatccaaggggaagatagatgtaaacttttgcttaccactcttggatcaaaatttcgaggagggacatcacatttttagtttctcctagtctgatctgctgaagttcacgcaataacctcgtgaaatcttgatgatagatagtactcacatatgagtttgcacaaggcaaccatataaccatgaatgtgctggctggcttgttttgtacacattatggtacttggcattgatatcattgtgaagtgagcaattattccatttactctttgagcaggtgctagaagcaaaccctgtgcatgtgaaggctctttatcgccgaggtatgtcctacatgttattgggggactttgatgatgcaaagaaggattttgagaagatgatagctgtcgacaagtcctcagagcctgatgctacagctgcccttaataaacttaaacaaacaattcaggaaactgaaaagaaagcgaggaagcagttcaaagggctgttcgacaagaagccaggcgagatttccgaagtaggtgtaggagagccagagggcaacaagactgacacgacaggctcaggcgaggcagcgtcaactgctgacagagacacggatgcaaaggaggctattccccgtgcagattcagggttggccttcgaggaagagaggcccggacttctcgcccgcatctggccttcagcgagtcggatcttctcctcgcttgggctcaacaggtgcacaatcctctgatgcaccaccagtattcaaaccactacaaacagcagccagaaaagtcgcccagcaaagccctggaacgcattacacacgcaaaattatcacccttggatatatatctctaaaaattatactccattacatggtgtaggctgatgacctataaatgaggtaggcgtagtagtaacgagttagttaaggacatacggagtattactgtggaaatgcatttgtgcctgccatgataagaatcactaccactgcc

SEQ ID NO: 14733 - DNA, 3038 bp, Oryza sativa
  ref <308>: DATABASE ACCESSION NUMBER: AK065283
  ref <309>: DATABASE ENTRY DATE: 2001-12-06
gaccttctcttcctccctcgacacctctccccacgttacgctgcctcctcctcctcctcgcctccctctcgtgggcgtcgtccccctccgccaccgccgccgcccgccgcagcagccgcagaaggggactccacctcctcccggatctgctcgatcgcccccgattctgtagcttctcctctgctcagatccgcccccttgcttttcatccagctcgtggcacccgagatccgctgccgccgccgccgtctctgcggtcctcctcccccctcgccggtggggaaccccgccgccccgaagcgcgttgcagcgtgtactactgccggactgccaaagtacgcttgctgctagccatttcggtagcttttgtggtttctacttaactatcgtgtttggcaatacaacaccttggaccaaaggatgcttgaaagatagactggataattaagactggatgccaaagtacgcttgctgctagccatttcggtagcttttgtggtttctacttaactatcgtgtttggcaatacaacaccttggaccaaaggatgcttgaaagatagactggataattaagaactatattggactgtacattcgcctatagacttagtcatgctgctggttgttctctgtcgctgctacaaggtgttcgtgctattgccttctgcttctgtgtgctatggtaattgtaactctgtggttattgcgcatgatgctctttgaatttgagccatggagcatgcaaggagatttccaacagatcccaaagaatataaattatgtgaggaagttggagatggtgtagtgctacggtgtacaaagctctttgtatcccacttaatattgaagttgccattaaagttcttgaccttgagaagtgcagtaatgacctggatgggataagacgagaagtacaaaccatgagcttgattgatcatccaaatcttcttcgagcatattgctcgtttacaaatggtcatcagctttgggttattatgccttacatggccgctggatctgctctgcacattatgaaaacttcttttccagatgggtttgaggagccagtcattgcaactcttttgcgggaggttcttaaagctcttgtctacctacactcccaagggcatattcacagagatgtaaaggctggaaatatcctaatagatacaaatggagctgtcaagctaggagactttggagtgtcagcctgcatgtttgatactgggaataggcaaagagcacgaaacacttttgtagggaccccttgctggatggctccagaagttatgcaacaactgcatggttatgattacaaagctgacatttggtcctttggtataacggcattggaactagcatatggtcatgctccattttcaaagtaccctccaatgaaggtattgcttatgaccttgcaaaatgcaccaccaggtctagactatgagagggacaagcgattttcaaagtctttcaaggatttggttgcaacttgcttagtcaaggatccacgcaagcgtccatcttcagaaaagctcttgaagcattctttttttaagcatgcacgtacagctgaatttcttgcacgaagtattcttgacggcctccccccgctgggtgaacgctttaggacattgaagggaaaagaggctgacttgcttcttagtaataagcttggttcagagagcaaggagcaactatcacagaaagagtacatacgaggaatcagtggttggaacttcaatctggaggacttgaaaaatgcagccgcccttatagacaatacaaacggaacgtgccatttagatggtgttaacagcaaattcaaggatggtttacaagaagctaatgaaccagaaaatatttaccagggacgggctaaccttgttgcttctgcaaggcctgaggatgagatacaagaggtcgaagatctggatggtgctctcgcctcttctttccccagccgcccccttgaggcactaaaatcttgctttgatgtttgtggggatgatgatccccctactgctactgatttgagggagcaaccaaatatggaatctacatcacctatgcagcagttccaacaaattgagaatcataaaagtgccaactgtaatggtgaaagtttggaaagaagtgcctctgtaccatcaaatttggtcaatagtgggtcccacaagttcttaagtggttccctgatacctgaacatgttctttctccttacaggaatgttggcaatgacccagcaaggaatgagtgtcatcagaaaaatacatgcaacaggaaccgcagtgggcctttattccgccaaatgaaagatccacgcgcacatctgcctgttgaacctgaggagcaatccgaaggaaaagttatccagcgaagggggcgttttcaggttacatcagatagtattgctcaaaaggtagcttcatccgcaagcagcagtaggtgctcaaatttaccaatcggagtaacacgatcaactgtccatccatcgacaattcttccaacactacaattcatgatacagcaaaatactatgcaaaaggaagtgataagtagactgatttcttcaattgaggaaatatctgatgctgctgatgcaagtacaactggttcatctcagccatctggagtgcatttcagagagaaggaactgcagtcgtacatcgccaacttgcagcaaagtgtcaccgaacttgctgaggaagttcagagattaaagctcaaaaacactcagctcgaggagcagatcaatgcattgcccaaaaaagatgaaaggttacgaagagaggatacccgacaacaatgatatgcacaatgcacttgtaacccccgctgtaaaatcagttccccaattttgaatttggttagcaaaattatttgtattttgttcgaagtcaggcctggtgtatctttgtaatttgtaattattttagcaaggtgaaattatagttattttcatttgtacaggatatttcaatctataccaaagttaaaagcttggtactagaaaataccaaatcatctttcct

SEQ ID NO: 14734 - DNA, 994 bp, Oryza sativa
  ref <308>: DATABASE ACCESSION NUMBER: AK065284
  ref <309>: DATABASE ENTRY DATE: 2001-12-06
ggtgtactacgcaacacacacataggcacagttagtgcacgtacatcttgctgaatttgcttgagctcgtacgtgcgtagtgtggtagccatggccaaggcagtgatgatgctccccgtcctcctctccttcctcctgctgccattctcgtccatggcgctgacgcaggatttctgcgtcgccgacctgacctgcagcgacacgccggcggggtacccgtgcaaggccagcgtcggcgccggcgacttcgcctaccacggcctcgcggcggcgggcaacaccagcaacctcatcaaggccgccgtgacgccggccttcgtcggccagttccccggcgtgaacgggctcggtatctccgcggcgaggctggacatcgccgtcggcggcgtcgtgccgctccacacccacccggccgcctccgagctcctgttcgtcacccagggcaccgtcgccgccgggttcatcacctcctcctccaacaccgtctacaccaggacgctgtacgccggcgacatcatggtgttcccccagggcctcctgcactaccagtacaacgccggccagtcggcggcggtggcgctcgtcgccttcagcggccccaaccccggcctccagatcaccgactacgccctcttcgccaacaacctgccgtccgccatcgtcgagaaggtcaccttcttggacgacgcgcaggtgaagaagctcaagtccgtcctcggcggtagcggttaagttcgtcgtacgtctctctccggtcgagttggtcgccgccgccgccgtcgtcgtcgtcgtggtggtcactccgtgtgattgattaatttgcatgcatgcacttctgtcatgggaatgtgtctgatttcttttttcatgttatgcttaatttgttcatgtcaatttctttcagattaattaagtggtggttcaaataatctctaggtgtgtcactgtaatttgttggaacgaaagactaaactgtgcatcgatccaattggtc

SEQ ID NO: 14735 - DNA, 1136 bp, Oryza sativa
  ref <308>: DATABASE ACCESSION NUMBER: AK065285
  ref <309>: DATABASE ENTRY DATE: 2001-12-06
gtcctctcctccccctcctcctgtctcaacagaaaacccaagtaagtcgtcgccgccgccgccgccgccgcaatcgtgggtgatgggtcgtgctcgtcggagcgccggcggcggcctccactgctgcctggccttcctcttcaagttcctcgccttcctccaggccttcgccgctgtctccgccctactctacgccgcatggatcctctcccgttgggcacgccaccaccatctccacctccaagacctactccccgacctctggttcgtctgcgccctcatggctgccggcctcttctactgcctgcttctcctcgccggatgcgttgctgccgagatcaacagcccctgcttcctctgcttctacaccatcttggctgtcgttatgatgctcctcgaagctgctctcgccgctgatttattctttaacaaacactggatccaggatttgccatatgaccgcactggagaactcgataatctactttccttcatccaaactaatctcgacctctgcaagtgggctgctcttgctattgttgctacacaggcactttcacttctcctggcaaccatcttacgatccatgctttctaccccgagtgccgactatgacagtgatgaagattttgtggtcataaggaggccacttctggttgcccaaggtgctcccgcttatcttcctaccaccgccgatactagaggtttccatccagacctatggagctcaagaatgagacacaagtatggattgaactcaagcaactacacctacaacacactggatccaaatgcaccaccacctcagtaagcagcgtgtgactgatgatgatgttagagatgatgaagaagcatgcctttgtcccaaacacctagtatatacaaacaccatttcttctaatattgtactatcattgtttgcatggttagtaatttttcattttatgccctctggattgtacatagttgcatatttcattgcattttagtactttcatcagttgatatctgcacatttgtgtttatgtgggtggtacatgttggagctctgcatctgtacaagtgtatttgtgcatgaaggtgcaacattgtttaatagttgggagtatctcttctttctacaagataagctgtcc

SEQ ID NO: 14736 - DNA, 1618 bp, Oryza sativa
  ref <308>: DATABASE ACCESSION NUMBER: AK065286
  ref <309>: DATABASE ENTRY DATE: 2001-12-06
ggctcaaaatcctttccgctcagataagagaggccggagactgagagagagggaaactcgtacacagagagagtatggacgtggagaaggtggagaggaaggaggtggccgtcgacgacgatggccgcgtcagaacaggaacggtatggacggcgacgacgcacgccatcaccgccgtgatcgggtcaggcgtgctggcgctgccgtggagcgtggcccagatggggtgggtgctcggccccatcgccctcgtcgtctgcgcctacatcacctactacaccgccgtcctcctctgcgactgctaccgcacgccggaccccgtccacggcaagcggaactacacctacatggacgtcgtccgctcatgcctcgggcctcgagacgtggtcgtgtgtggcattgcgcagtacgcgattctctggggcgcaatggtgggttacaccatcacgaccgctacgagcatcatgtcagtggtgcgcacgaactgccaccactacaaggggccggacgcgacctgcggctcgtccgggacgatgtacatggtgctgttcggcctcgcggaggtcgtcctgtcccagtgcccgagcctggagggggtgacgctcatctccgtcgtcgccgccgtcatgtcgttcacctactccttcgtcgggctcttcctcagcgccgctaaggtcgcgtcgcacggcgcggcgcacggcaccctcctcggcgtcagggtcggcgccggaggcgtcaccgcgtcgaccaaggcgtggcacttcctgcaggcgctcgggaacatcgccttcgcgtacacctactccatgctgctcatcgagatccaggacacggtgaagtcgccgccgtcggagaacgtgacgatgaagagggcgagcctgtacggcatcggcgtcacgaccgtcttctacgtgtcgatcgggtgcgtcgggtacgcggcgttcggcaacgccgcgcccgggaacgtcctcaccggcttcctcgagccgttctggctcgtcgacatcgccaacgttgccgtcgtcatccacctggtcggagcgtaccaggtgtacgcgcagccggtgttcgcgtgctacgagaagtggctggcgagccgttggccggagtcggcgttcttccaccgggagtacgcggtgccgctgggcggcgggcgcgcggtgcggttcacgctgtgcaagctggtgctgcgcacggcgttcgtggccgtgacgacggtggtgtcgctggtgctgccgttcttcaacgccgtgctcgggctgctcggcgccgtcgcgttctggccgctcacggtgtacttcccggtgaccatgtacatggcgcaggcgaaggtgcagagaggcagccggaagtgggtggcgctgcaggcgctcaacgtcggcgcgctcgtcgtgtcgctgctcgcggcggtgggctcggtggccgacatggcgcagcgcctgcgccacgtcaccatcttccaaacgcagctctgaacccggatggacgcatgcagccgatgagattatgcatgtagtactactcctactacttttgttgctgtactcgtactagttgctggtgtaatttggctgtcgtgttacaagctactactactagtacaagcccctctgttttt

SEQ ID NO: 14737 - DNA, 2526 bp, Oryza sativa
  ref <308>: DATABASE ACCESSION NUMBER: AK065287
  ref <309>: DATABASE ENTRY DATE: 2001-12-06
ggcttatccacaccacacgtcctcctctcgtctcatcgtcttcccccccaatctcctcctccaggctccaggggccaagcaagatccttcctatgcaacacgagaggggagcagctcccccagagctgagtgagtgagtgagagagagagatcctcttgtgctctgaccaggcggaggccatggctatgggggccgtgctctccagcagaaccttcgcctctccactctcctcctcaggaaagcagcatccaccacaaaacaacaagtgcacctgttcctcacctcccacccgagataaattcagtcgactcactactaggaccaccattttccaagtctctaactattccaggagcacttcaatggaaagatttcaactttctgcccgattccaccagcctgtggttgactcttctacaaactacctcaccaggtggttttacaatgcaaacctcaagaggcggcggattgaatgctttctcacttcggatccaataaacactggttggctaaaaccaagaagatgggacaacttcactagtttggacactgcttgtgtccagccagactacaaaattccggtcagaacacgcgccgactgtaaagccgagcagtatgagataacgggatcaccgttgagcccttctgatgttcccgccgaggcagttctcattggagatacaaatgagatttctccctggtggcagcagttccctaagcgatggacagtcgttctcttgtgcttcttttccttccttctgtgcaacatggaccgtgttaatatgagtatcgcgatccttccaatgtcatcagaattcggctggagtccagcaactgtaggcctaatccagtcctccttcttttggggttaccttcttactcagatccttggaggtatatgggccgacaggtttggtggtaaggtggtgctaggatttggggttgtctggtggtcaattgcgacagttcttacaccccttgctgcaaagattggacttcctttcctacttgtcatgcgggctttcatggggataggagagggtgttgccatgccagccatgaacaacatactctccaaatgggttccagtttcagagagaagcagatctcttgcattagtgtacagtggaatgtaccttggttcagtgactggcctagccttttcacctctcttgatcagcagattcggttggccatctgttttttacgcattcgggtcccttggaagcgtctggtttgcactttggcaaagaaaagcacacagctccccgagtgaagatcccgaactaagcaaagccgaaaagaggtacattctaggtggaagcaccttgaaggagcccgtcacctccataccttggaagctaattctatcaaagcctccagtatgggctctaatagtatcacatttttgccataattggggaaccttcattcttctaacatggatgcctacatactacaaccaggttcttaagttcaatcttactgaatctgggcttttgtgtgtcttgccgtggctgacaatggctatatttgcgaatattggtggctggattgctgacactcttgttgggaggggggtttccataacgaatgttcgtaagatcatgcaatcgattggtttccttggaccagccctcttcttgacactgctgagcaaagtccgaactccagccatggctgtattgtgtatggcatgcagtcaggggagtgatgccttttcacagtctgggctatattcgaatcaccaggacataggcccacgttatgcaggtgtacttcttggactgtcaaacactgctggcgtgcttgcaggagtttttggtactgctgccactggctacattcttcagaaaggttcttgggatagtgtgtttcaggtggctgtggtattgtacatagtagggacagtggtgtggaatgtcttctcaactggagagaaagttcttgaatgagctgtagatgctcttatacgcacaaaaagtatagctgattttgctgatgtcttattgtggtacgagaagaaaagctctcgtttagacagagagatatagctgattgaaaaccttcattttagcaagagaaatatagctgcgtttgacggttgggacactgaaaacaatgaagagcaaactgaagagttgcaatggattagtctgtgaactgaaacttggagccagtgaattaccttacgctgcctgaaagcatctgcaccaagaagtgtcagtctttgcagtaagcttgtcgctgaacaagctcctgcccaacttgcttaacatcttcttttgttttgaaatattgatccactagtgaaccagctaccttgcttgctcgaggaaggagctagagctactgccaaactcgtgtattatgagagcattttgggagattaagcttttttttttgttaatttgtgatgctgctcctgttattttgcatatcctgcgggatcgtatcgcatgactatctatgcttgtgctgaatcatcctatgcttcttgttactgttgctagcaaaaactactg

SEQ ID NO: 14738 - DNA, 2059 bp, Oryza sativa
  ref <308>: DATABASE ACCESSION NUMBER: AK098918
  ref <309>: DATABASE ENTRY DATE: 2002-08-28
gagccgcaccgcacgctttcttgcataagaactcccccccctcctcgctccccgccgccgccgccgttttcttggagaggagaaatccgtaggctcagaggatttttggtagtcttgtttcgtgatattcgtgaagagggggggagctaaggggggattcgtaagatcagaattggatcacgcgggggcgcgctcgggatcgggggttccaaacacagcttcttcgttgaatttaagtggatgtactaatggagtcaaagggtggcaaaaagaagtctagcagtagtcgttccttgatgtatgaagctccccttggctacagcattgaggacgttcgacctgccggaggcgtgaagaagttccagtctgctgcttactccaactgcgcgaagaagccatcctgatagccctttcggcttctccatcctagtagtttaggatttcttgcaattccattttggcacttttcttctgacctatttctctggctgctgcttcctgataatcgaccagttctctagtcttgctccctgcactcctccctcctccatctccggcacagtgttctgaccaacctgctccaatgggtgtcttgtctgctgctgaccctcccccagtctcagcaattgggtttgagggctatgagaagcgccttgagatcactttctctgaggcacctgtctttgctgaccctgatggtcggggtttgcgcgccctctccagggcccagattgactctgttctggatcttgcacggtgcaccattgtgtccgagctgtccaacaaggactttgactcctatgtcctctctgagtccagcctgtttatctattctgataagattgtgattaagacctgtgggactacaaagctcctgctcacaattccaaggattcttgagcttgctgaagggctttctatgccacttgctgctgtgaagtactcccgcgggatgttcatcttccccagtgcacagcctgctccccacaggagcttctctgaggaagttgctgtcctcaaccgctactttggccatctgaaatctggtggtaatgcttatgtgattggagatccagcaaagcctggccagaagtggcatatctactatgctactcagcacccggagcaacctatggttacccttgaaatgtgcatgaccggactggacaaggagaaagcttcagtctttttcaagacttctgctgatggtcacacatcatgtgctaaggaaatgacaaaactctcgggcatctctgacattatcccagagatggagatctgtgactttgacttcgaaccctgcggctactccatgaatgcaatccatggctcagcgttttctaccattcatgtgacccctgaggatggcttcagctacgccagttatgaggtcgtgggcttcgacgcctctactcttgcttatggcgacctggtgaagagggtcctcaggtgctttggcccttcggagttctctgttgctgttaccatctttggtgggcatggtcatgctggaacatgggcaaaggagctcaatgctgatgcttacaaatgcaacaacatggtagagcaggagctgccctgtggtggcctcctcatctaccagagcttcgacgctactgaagacgtacctgttgctgttgggtcgcccaaatctgttctgcactgcttcgaggctgagaatatggtgaaccctgctcctgttaaggaaggtaaactgggcaatcttctcccctggggagaggatgcgttggaggagaatgatggagtgtttgatgagtaagatgggacttctggtgacgattcgctgctttgttttcattccgtggcatttttatctgttgaggttgtcgtttggttattctgtgaagcagccagccaggctattagtattttcgcttgtaagcatgtgttctgatcttgggacgtatgcttggtctaaataataatggtgaactaaaagctctaggtggtcagctgcgtctgccacaatgagcatgcgtcgggagaaatgttgtcaaaacatatgaataagtatttgcgggaaatttcctttgccttc

SEQ ID NO: 14739 - DNA, 1957 bp, Oryza sativa
  ref <308>: DATABASE ACCESSION NUMBER: AK065288
  ref <309>: DATABASE ENTRY DATE: 2001-12-06
ggatcgattcccctcttcgagcccgtaccaattattagctagtttaactcgtacgatgaatcacgccgaaacacaatataaatggtggagtcggctcgctgtcaaacgcgcgggagctcgcgccacttgtaatttttcgcgtctcctctcgtccggcacagcacaggagcgcggacttgaagacctcaagtagcgattcgtccgtgcggcgcggcgcaagaagggaagggaaggggactaggggagggcgagatggcggcggcgggggcgtactcggcgagcctaccggcggtgccggactggctgaacaagggggacaacgcgtggcagctgacggcgtcgacgctggtggggatccagtcgatgcccgggctggtggtgctgtacggcagcatcgtgaagaagaagtgggcggtgaactcggcgttcatggcgctctacgcctacgcgtcgtcgctgctggtgtgggtgctggtcggcttccgcatggcgttcggcgaccagctgctgccgttctggggcaaggccggcgtggcgctgacccagagctacctcgtcggccgcgccacgctgccggccaccgcgcacggcgccatcccgcgcaccgagcccttctacccggaggccacgctggtgctcttccagttcgagttcgccgccatcacgctcgtcctcctcgccggctccgtcctcggccgcatgaacatcaaggcctggatggccttcaccccgctctggctcctcctctcctacaccgtcggcgccttcagcctctggggcggcggcttcctctaccgctggggcgtcatcgactactccggcggctacgtcatccacctctcctccggcatcgccggcttcaccgccgcctactgggtggggccaaggctgaagagcgaccgtgagcggttctcaccgaacaacatcctgctgatgatcgcgggcggcgggctgctgtggatggggtgggccgggttcaacggcggcgcgccgtacgccgccaacatcgcggcgtcggtcgccgtgctcaacaccaacgtctgcgccgccaccagcctcctcatgtggacttgcctcgacgtcatcttcttccgcaagccgtccgtcatcggcgccgtgcagggcatgatgaccggcctcgtctgcatcacccccggcgcagggctggtgcagacctgggcggccgtggtaatgggcatcttcgccggcagcgtgccgtggttcaccatgatgatcctgcacaagaagtcagcgctgctgatgaaggtggacgacacgctcgccgtgttccacacccacgccgtggcggggctcctcggcggcatcctcacgggcctcctggccaccccggagctcttctccctcgagtccacggtgccgggactccgcggcgcgttctacggcggcggtatcaagcagatcggcaagcagctcggcggcgccgcgttcgtgatcgcgtggaacctcgtggtcaccacggccatcctcctcggcatcggcctgttcatcccgctgcggatgcccgacgagcagctcatgatcggcgacgacgcggcgcacggcgaggaggcctacgcgctgtggggcgacggcgagaagttcgacgcgacgcggcacgacctgtcgaggggcggcggaggcggcgacagggacggccccgccggcgagcgcctctccgccctaggcgccaggggcgtcaccatccagctctaggcacgccacgccacgccacgccgcgccgcgccgcggcctggcctctaattacacgcgcgtttgtactgtttttggacgtgttattgtttaggagtagtgaagtgaaccaacgattgactgcaaggtgaagggtgagaacgcgagagaccagaccactatagtctatagtacatatggatgctgtaatgatgttgatccgagttcgtttttccaccacgataaaggccgacatgcctattaaatt

SEQ ID NO: 14740 - DNA, 2774 bp, Oryza sativa
  ref <308>: DATABASE ACCESSION NUMBER: AK065289
  ref <309>: DATABASE ENTRY DATE: 2001-12-06
gattctcatcatcctcaccctcccccgcgccgaccccccgccgctgccgccgccgccgctaaaaccctaaaacctccaacctcacccatggcggcgagcagcgccgatctcgccgacgacggcttcccggcgccgcgcctcttctcgcagggcgtctcctacacctacgacgacgtcatcttcctcccgggctacatcgggttcccggccgacgccgtggacctctccacccgcctctcccgccgcatccccctctccatcccctgcgtggcctcccccatggacaccgtctccgaggccgccatggccgccgccatggcatccctcggcgccgccgccgtcgtccactgcaacaccgagccccacctccaggcctccatcgtccgcgccgccaagtcccgccgcctcccgttcgtctcctccgtccccttattctcccccgcctccaccccatccctctccgacttcgctggccacgactacggcctggtcacggagcgcggcgattcgctctccaagctcgtcggcgtcgctgttgcagccgagacctcctctcgtcaggctcccctccctgtctccgagtacatgcgccccgccccgcgctcggtgtccgcctcttttgatttcgagcaggcggccgcctttctagcggacgagggtttggattatgcccctcttgtatccgatgatagcgaggtaatcgacctcatcactgtcaatgatgtggagcgcatccggagctatccgaagctaggcaagccgtctcttggagcggacgggaagtttgttgttgcggcttccattgggacccgtgaggatgacaagcgaaggctggagcagctagttaaggcaggggcaaatgcgattgttgtagatagctcgcaggggaactctatctaccagattgatatgatcaagtatgcaaagaagatgtacccggaagtggacttgattggaggtaatgtggtgacgattgcgcaggcacagaatttagttgcttctggggtggatggattgcgtgttgggatgggctctggctcaatttgcactacccaggaggtttgtgccgtgggccgaggacaggctacagcagtgtataaggttgcatcttatgccaaagatcacaatgtgccagtcattgcggatggtggaatttcaaactctggacatattgtgaaggctttgtctctgggggcatccactgttatgatgggtagcttcttggctggcagccatgaagctcctggtacttacgagtacaaggatggccaccgtgttaaaaaataccgaggcatgggctctctcgaagcaatgacaaaggggagtgacgccaggtacctaggcgataccctcaagcttaaagtcgcccagggagttgttggagcagttgctgataaaggttctgtgctgaggttcattccttatacaatgcaagctgttaagcaagggttccaagatcttggtgcgtcatctttgcagtcagctcatgagctgctgcgatcggagactatcaaattagaggtatctccatgctggacaacatttttaaattatgaaatggaataataatgttaagaatgttagattggataaaatgctttttaacagtacaatttttagaagataatgaacacattccctgtttctaggactacacatgcttgcaggctacagtataaacgctgcctttctgcctctaaattgaaaaaaaaaaggtttagtatcagaagtaaacagctaagatatggtgaataagctgttccactccctattttatagagtatgaatcttatttcccgtgcagtactggctgcttttgagcttattctctgccagctaaaacatagtaaaaattccaagggattagagatcgataaattttaatgttgtgataaggcttcaaggcatatgattttcacccccaagtgaaattcagattgcaatgctcgaggaatgttctattgttgttatgcttgacctttgttttcaagattaagggacgatttacctcatctcgcgaccaaactgtccctgccaagtataatcggtcgtttgttcataccaccaaatgaagtctcctttttagtaaaaaccaaaacggcatactagtagctaactgaacattgtggtcgaataaaactgaaaatgcacaagacgccttgctcgtggatgatgtatagtccataaagtacatgaactgatttaaaattccccaaattatttatgttcatagcattgttaccatgtgtgtttctcttgaaatgctatactgattttgtttaacccccctcccctcccccccaaaaaagaacagagaactgatagaacttttaccatcttccttttcaggtgaggactggcgccgcgcaagttgaaggggggatacatgggctagtgtcgtacgagaagaaggcattctagttccagatttaatcaagcatcaggacaaagcggctattgcatcctaaggaaacaactgttccctatctttacctgatcaatgattttcaagaacagctcgtctgcttgatgaacctggcatgctgtttcatcggtcggtagcatcaccatccgtttaccatcgcaacgacatgatcgattgtgctttaacttcagttttgctagaggggaagctatcccatgatttgcctcaaccggttgatgctgatgtactttgcctttttgtgcaaacttccaaccgcaaactcatcctgttgtagcgaattcggcttatgtttttttttcatgaataagaataaataagtttggtttgt

SEQ ID NO: 14741 - DNA, 2114 bp, Oryza sativa
  ref <308>: DATABASE ACCESSION NUMBER: AK065290
  ref <309>: DATABASE ENTRY DATE: 2001-12-06
ggagaggaggagatgacggcggggtccaagggcggcggcggcggcgtggcagcggcaagggcggcggcggcggggccgaggacggtgctcatcacgggggtcagcagggggctgggccgcgcgctcgcgctggagctcgcgcggcggggccacgccgtcgtcggctgcggccgctccgccgaccacgtccgctccctcgaggccgagatcgccaccccggcccgccacttcctcaccgtcgccgacgtgaggtctgacagcaacatggccgagttggcaaaggcagttgtggaaaagaaacaagttcctgatatcatagtaaacaacgctggtacaataaacaagaataacaagacatggagcgttccagcggaagagtttgatacagtggttgatacaaatattaagggaaccgcaaatgtactccgtcatttcataccccttatgatagagaagaaacatgggattatagtcaatttgtcctctggttggggtaggtctgctgctgcagaggttgccccatattgtgcttcaaagtgggcaattgaaggtttaacacgctccttagcaaaggagctgcctcctggattggcagcaattgcccttagccctggtgttgtgaatactgacatgcttaattcatgcttcggaagctcggcctcattataccaatcaactgaacaatggtaattgctaaacctgtttggctttgcgctttccctcaagtctcaaccatgcttgaaatgaataaaacctgaaaaaacaataagtggttacaaacttacaatagatgtagccatatagcagtagacatgtgatggcccatatgagaccctaggaaaaccagggaatgttatatacagtgttaatacttttagcatggttcactggtgcatgaatctttctattgaatcaacttcctgagaaaattctttctattactacaccatacaacaactccatcatgcggtctgtactctgtggccatttcaatgatatctcaaatatgcctattcttctggtcctgtcgttccatgtacaccagtaagtcaaaatgagatattcttttggtacactgtttttatagaaaagccaatagttatacttaccctgatgttgcactcattcaatccaaaatagaaacctggacatccagtgcaaaccacagttggtgaatagatgccgtgcacttggatgttctgaattgcataacaagtatacaggaggttgtgcttagcccatctagtgagtagtgagatgatgaggtgtaagaaagtggctttcaatgacctgtcaggctgcgcatagcaaatgtttccagatgatcctatattcctacaccatacagatattatccttccacagccattactcatatactggtttagagtattcttgacttgtcttcctcctccagaggatatgattgttcagggttagcggcgttgcttgtacattgtcccaaatttgaggtattatacacggcacaggtattattgaagatttgcatgacaaggaaatttgaagagtatccagttgaccacatctaaaagctgtcttacatgtgatctttttctttagtgctacattgatacatttttattgcttcttaatgcaaccgacatgaacagggaaccttgaataagtgccatagctgtggctcactaatataactgtcatatgatccatgacagcttgaaatataagtgtgaagttgttggcaacactagcttttgtatgcaataactttcaggatatgcgacattgatcccattaaccagatgatgccttctctttcttctctttattttttttcagggcacccaaggcagctacgatgatactaagccttggcctagacgacaatggctcatcgctcaccgtatgatgctgtagcaaatctatatgccgaactaatctctgatgtattgagttgtagtccttaactttgaactgttgtgcaacattatgttgtagttagatcgaatcgacagtgcgctaatggctgtagctgtgcgtactgctggttcgctatctcacagtgattctgtaccgtatattgatgatgatgatgaaactgtgaatgagtatggatggcacgcgttatttctctc

SEQ ID NO: 14742 - DNA, 2815 bp, Oryza sativa
  ref <308>: DATABASE ACCESSION NUMBER: AK065291
  ref <309>: DATABASE ENTRY DATE: 2001-12-06
gggttggtctctctctccctcgccgcgtcctgctgggaaatccggcgatggctgcgggcgctatctccgccggcgggcgcgcggcgcgggcgtccgcggcggcgctgtggtcccggcgccggcagtggttgcttctgcgcgtggagtccctgccgcccatactctccgcccgcgcgatccccgccgcggacctgcatgccgagccggtttgcgccgccggccccgtcctcctccccgccgcctgacttccacgccgccgtgatgggtaaatagcatagctagttcttggtgatcttatcagcagatccatatccttcctcattgatacttgatactactggaagcaacagggtgtggacgagaatctgcattggctgcagtgcgcgcgtctgttgatccaaaccgttgttgaggaggccgataggagacacatcacaagctaagcaatgatccttcaacttcaaatgatgagaaaagcgatgtacaaaggctactacatgtctgaatctttcagttaccaaatcatcacaggtaaatcccaaggtgagttggttgacctcttgatcgctttctcccatttagttcagcaaagtggttttatttatccactggaacaacggaaatactctgtaaggggaagagataaaagagatgcaaaagatggttggtatcttgaaaaaacatagaatagagcagtcttttctactacaaatgagcataggtagtatgaagtagaggattattgataacctatgttaattggttgagtctgaatcgagttgatgtttgctaattgtaaggtatgagtcgtgttctgaaaatcaccttctcagccttctgaatggcccactgtgtaaggaaaagaaaaaaaagaagccaaagcattgaaatgttttgaaggtgtgactcgttctctgaaccttctcagtcctcacgaaccttctgttggcgacgggccacctgtcgacatgactaattgtgcagtcaacagctgaatgtctgaaacggacaatcatatgtcaatgagtgatccactgtgtaaaacaagccaaagcattgctcctagcagcggtcttgcaatgcaattttgtttttgaagacacttgcaatgagttcaacagcaacaggacaacttgtttaaattgccagcctgattgctctccctcttcctatcacaaaaatctcaccatggacaccatcttttctgctgttcttggtgatctttttagcaggtccatatccttcgtgattgatatataccatcaccatcaccagggcggtgtggaggagaatctacagcagttacaccgcatgctgttgcgaatcaaagccgtcgttgaggaggcagacagtaggtgcatcacaaaccaagcgatgctgctgcaactcaggatgttgagagatgtcatgttcagaggctactatttcgttgataatttcaggtacagaatctttcaagctcaagctaaagacgaggtgggtgatcactctctcgacctgccccctttcaatccattagaacgattttttatcttcactagagcaagtaaaatcgcatctgaaatcttggagaaaaaagagctgcaaaaagatgcttggtcacctggaaaccattgtttcagacacgcaagagtttgttgtgcttgcgagcagctaccctcgtataactcgccaaccctattgcagctatgtgttgctggaaaactgcatgtttggtcgtcatgcagaactggaaagggtcatcaagttcttgctagaacaacatcctctttgtggtgcaaaaggtattgatgtgcttccgataattggaccaggcaaagttgggaagagcactcttgttgagcatgtctgccgtgatgaaagagtacgtaaatgcttctctacaattgttttctatggcccggatagcattgataatggagacatggtgcttcttccagacaccagggcaatcaaatatcgaaatcctgcctcaggcgaacagtcattagctatcattgaacttgtcgatgagatggatgatgaaacatggagaagaatattacacagcttgagaggagaccacataacatctgtgagtaagatcataataacgagtcgatcaagaaagatagcaacttttggaacaacaaaagcactccaattagattttctcccaaaagaagccttttggtatctgttcaagacggttgcatttgggagcacaaatcctgaggaggagccgaagctagcatccatttgtatggagatcgcagacttggtgaatggatcattcatggaatcaaatgttgttgggagcatactcagatctaatattactgctcaattctggtacaattttctcaaacgcttgaaatatttcactgacagacatttccgtctgctaggtgaacacccaagagactcatacaagtctaaccgtgggcgtacttacatatggatgcataaaaactactatggtgacggtgacgcagcgacatacaatctttaccatgcaaattctgcaggactaaataatctaccaatgatacgaatgagcgatatgcttatcggaaatgttaagcctcagaagaaatgtgaagccctggaatggcaatccagcatacctccatactatagctatatcgtgcaatacgggatacttgcacggcagccgcttatgctacctaaaaggaagcgatcccgggcgctcttagaggagttagtttgatccaaaataatgttggttgtcaaactagtttagctccatccatatggcacatcaaacaaatatggattctataacagcaacagtttataaaatatgtttgactcc

SEQ ID NO: 14743 - DNA, 885 bp, Oryza sativa
  ref <308>: DATABASE ACCESSION NUMBER: AK098919
  ref <309>: DATABASE ENTRY DATE: 2002-08-28
ggcagcgatctgaagtgaaacagcaaaaaaaatcaaacaaaaagaaaaaatattccccatctgtgaaattcgcaaaaccctagcgcggcggcgatgtcgaacacgagggtgttcttcgacatgaccgtcggcggagctccggcggggcggatcgtgatggagctgtacgcgaaggacgtgccgcggacggcggagaacttccgcgcgctctgcaccggcgagaagggcgtgggcaagagcggcaagccgctgcactacaaggggagcaccttccaccgcgtgatcccggagttcatgtgccagggcggcgacttcacccgcggcaacggcacgggaggggagtcgatctacggcgagaagttcgccgacgaggtgttcaagttcaagcacgacagccccggcatcctgtccatggcgaacgccgggcccaacactaacgggtcccagttcttcatctgcaccgtgccctgcagctggctggacgggaagcacgtcgtgttcggccgcgtcgtcgagggcatggacgtcgtcaaggccatcgagaaggtgggatcccgcggcgggagcaccgccaagccggtcgtcatcgccgactgcggccagctctcctagatctgtgctgttccccttcgcctttcgccagtatcagtcgtcttgagtcgtcgagtccctaaataaggaggaggtggtggtggtgttagtctttttatgagttcgtgtcgtgttggtgagatgagatcgcccatggtttggttggattaggcggagttcttggatcgattcggtggagttggatctgcgatccttcttggggttggttttaaatcttaattcgtgtcgctgcttctatgatatcgctatcaatcaatgagaacatttgggatc

SEQ ID NO: 14744 - DNA, 2827 bp, Oryza sativa
  ref <308>: DATABASE ACCESSION NUMBER: AK065292
  ref <309>: DATABASE ENTRY DATE: 2001-12-06
ttggaaaaaaaaaagaaaaaggaaaaagaaaaaaggaaaatcttcaccgaaggcaatggcggcggcggcggaggcggaggaggaggtgcggcaggaggtggaggcggtggcgtcggtgtacggcgacgactgccgcgtggtgcgcggcttccctccccacctcgtcgtccacgtccgcccccgcaccgccgacgactcctcgcagcaggttagtgctcgccgtcctagctccacgggcgagccgcttcgcagcatccggatccctcccgatttcggtgttccgttcgtggattcggtcgatcggtcggtcggagacggtggcggcggtgctctgctgcctcctaaccctagctcccagataggaggaggaaggaggggattagtgtggttacctgagcctttgtgtttcgtggttgatgtagtttattactccctccatccacaaaagttagatatatttcacatttaactttttccaaataagttgttcctatttgtagtctttatgcatctaagacttaaataaagagataaattaaatgtttgatgagagcccaaggagtcatctaaatactcattggttgcatgcttgcattcactccttgaatttgtaacatccaagatgatttaatttcttcttggtcttggtgacaaaagtaatatgtgcaacttttgtggatggagggagtagtatggctagtaccaattgcgttactgattgattatcccatgatgaaggcatcaattctgggccttgaaggaatcaattgtggggggcttttccttggagcccatcggggcggagcggcgcttcagttcagtagtagaggagtcaatttggtaacataccttttcatttatgagtacaggtatttttttggggatggagaccactgttaaggtgatcagtgaaggggatattagataaggaggcagaatgggagagataagggtaagtgggatattaaagatgtgagaggaggatgggtacttcggggaggcagtgggcattgtgtggtggtgaagggaataagaaggtgggaatgtggtgtaaggaatggcaacttcaaaggacggtacataaattggtggtaaccaagactgtttcttttctgttccatccgatcaagagtgaggcattccacattgcctcccaacatataggtatcccttggtctgtccataataaaatggtagctagtaactgccgacatgaccatgagcaagattgagcatgttagttaaaaggtccttgggtggtatgctctctcagtgacccttgaggtggttgtaattgtcgcatttcctgagtgtgtttcatgtgaccagaagtgtggaaaagaagatataattgtcctttattatcaacttttccatgttttacgtatgattacattattcaagggatccatgtatttttgtaagccaatattgctcttaatttcagttgcttatgttgaaggagttttatcatcatgcatttagatttgctaatgaccattttcacttttgcagttcgtggagctatttcttggaattaaagcatcttctcagtatccaaaagcacctcctcatgtttatgccgtggaaagtaagggccttgatgagaatcgacaggtgtatcttattagcagcatccagaacaaggcaagagaactttcctgctacccgatgcttgtgacgctgtgtgaggaagctgtggagatgctctcaaatatgaatcatccagctggggattgcccactttgtctatatcctttagtcaaagagaatgatggttctgctttgccatttatgaagttgatgtcgtgctaccactgcttccacagtgactgcattatgagatggtgggaatggctacagaatgatgatactgactcgaagaagagtagtacagcagcaactactgaagttattcatgcttctgaaggattggatttgtccagctcagctaagcatcacaatgtaagtcagcacaaaggactatgtccagtttgccgcaaagtgtttgatgagaaggatattgagcatgttcgtgatctgctaggtgcaaatacttctcaactggcatctttatcgattgatctggacgaagatgaaaaagaagtacttcattctgagtcagagaagatccgtcaagaaaagttcgcatcgctgttcaatctacaacaagaacgaaatggcctgattgaaccaaagaaagacctttccatacagcctggaatgtacatccctcgtcctcccagcgcgcctactgcttccgaaggagacaccgttgatgattcttgtgaagacaccacaacttcaacctcaggaacggagccactcaaccagacaaacagcactggtggtaccaccaagcacaacagcagttcaggtcatcgaaggagacatcgatctcatgcttcaagaagacaaccacatgggcaagggcaacctgctaggcaacaatggcagaggaaaggcggagacacttcacaccaatagcaggaaaggttgtgggaggtttgttttttgtcggttataatcgcaagcctggtaccaattctatgtttcatgcctcactatcagacggctcataacatggcagaattatccaatgctgttgttatgactaagagtatattatagttttaaactcggttcatgtcactgctgcgaaactgaagctactagccactgtatacacatcaatttgactttgcatatcactgttgtgactcgtgagagatctggctagcacgtacttatgttcagccaaattcttcaaactggatgcaattgaagcacctggtgtttataagaaactttttgtgctattagcatc

SEQ ID NO: 14745 - DNA, 2040 bp, Oryza sativa
  ref <308>: DATABASE ACCESSION NUMBER: AK098920
  ref <309>: DATABASE ENTRY DATE: 2002-08-28
ggttggagagagagagagagagagagagagagcgagccgagcctgtgcggtgcggcgacgcctgctcctcttcgctcgcgcgcggcattccggtcgtgtttctgaggatccggattgcacggtgttcgggctgtttcgtcaaccatggggaagtctccggcgaagtggatcaagtctgtgctcctcgggaagaaatcagccaagtccaactctaccaaggccaaggatttggcgaaggctgcaaataacaagcctgtgctttctgaggatccccctgtgatttctgagccagctcttgttaattctcacaacgatggaaatgctgaaaattgcaagttaccaaacggagttgcagttgaagccatgggtcaaggagtggagaaccaaaacattgttggctccaaggcaccaactagtccagagaaactaagcgaagagctagctgcagtgaaggcacaagcggccttccgaggttacctggcacgtagggcattccgtgcattaaaaggtatcataagactccaggcactgatccgaggacatcttgtaaggagacaagctgcatcaacccttcgtgtgacatggttgatcgtgaaacttcaagctttagttcgtggaagaaatgttagactctccggtgcttccattcaatttgttgtgaagtccggccaacataagtttctgagtgataaaccatcggacgcttggaaagagaaggtatcttcaaacgcatatgttcgaaagcttctatcttcatcaattgggttagaagctcttcacttgcagtatgacaagagggaccccaattcattgtacaactggttggagagatggactataagccagatttggaagtcctcttcccaaccaaaaaaagttgctgatggcaaaccacaagtaaggaaggccagttatgcaatggaaactgagtcagccaaattaaagcgcaatgttcggaagagttctgctgtcactgttgatagcttccaaactaatatgacagttgaacctgaaaaaattaaacgaaattcaagaaaattctctagttccgctgctgattcagtaccagatagccagttatctgaacttgagaaggttaagaggaaccttcggaaggtaactaattccatggctgaagcatcaaagatatctagctccagggcagatgcctcaaaggtatctagctccatggctgatgcctcaaaggtgtctagctccacggctgatgcctcaaaggtatctgattccgtggctcaaatcccacctagtctcgtgaacgggatctctgatcatcaagacaaccaatgtgaggaagcacaacagaatgcatgcgtgtcatttcctcctgaaactcaggagttgcacagtggcattctgttggaggacaattcacatatgaatctgttggaacctgatttaatatctaacccggaaactcctttcacttcgattttaacctgggaaaaatttaatgattctactgctgatgctcaagaagttgaagttctgccactgcagaacattgataatgaagataatttcccagaaaatggtgtcttaggaaagaaagagaagccaaggtccaaggaagaacctctgtctaatggaaaccttaaaactagcaagaggaggtcttcgttctccaccaaatcagattacccggaaaatggagcccagaatacgccagttccacgaaggaagccaagctatatggctgcaacagaatctgcaaaggcaaagttgcgaggacagaattcaccaagactggattctgattcaccagcagacatgaatggcttcacacgccgccagtctctaccttcttctacaaacaacagagcgatcagagctgaatggagacggtggtgaggacaaccaacttccatttgaacggtgcaacgttgtggtggatgaagtgccctgctgtccgtgagattgtcgccattgttttgttcaagatgtaaaaatatgttggccctgtgttgatctattatctgttgcatatttgagttgttaatttattatccattgtttcttgtg

SEQ ID NO: 14746 - DNA, 2023 bp, Oryza sativa
  ref <308>: DATABASE ACCESSION NUMBER: AK065293
  ref <309>: DATABASE ENTRY DATE: 2001-12-06
caaagaaaagggctagagtctaagaggggagagagagagagagagagagaggaaggaacccttcgtcctcgtcgcctcacttttgtctcccactccttcgtcggcggctcggctcggcgcaggcgcagcggggagaagaccaaggaggagggagaggcggacgcgggagcggaagagattaatttccagtggggtttggggcgcggtgaggaggtgagggatgcagcggcggcgggcgcagacgtgggcgggggtggggaagacggcgcaggcggcggcggcgcacgcggcgctcttctgcttcacgctcctcctcgcgctcaaagtcgacggccgcacagcctactcctggtggattatattcatccctctatggctatttcatggcattgttgcccgtggaaggttttcaatgccagccccttcgcttcctcatggccgtcattgggctccttgccattcaattgttgcagcgccgttgcttattgcgtttgagctgctgctttgcatatatctcgaaagtttgagagttaaaagtaagccgactgttgatttgaagattgtattccttcctcttctggcctttgaagtgattattcttgctgacaatttcagaatgtgtagagctttaatgccaggagatgaagaaagtatgagcgatgaagctatttgggagacacttcctcacttttgggttgcaatttctatggtgtttcttatagctgctacaaccttcacacttttgaagctgtctggtgatgttggtgctttgggatggtgggatttgtttataaattatggaatcgcggagtgttttgcatttcttgtttgtactagatggtttaatcccatgattcataaatctcctaatcctggggaggctagctcatcatcagcggcaattagataccgtgattgggagagtggtcttctcctcccatcactagaagatcatgaacaagagaggctctgtggtcttcctgacataggaggtcacgtaatgaaaataccactggtgattttccaagttttgctttgtatgcgcttggagggtacgcctcctagtgctcagtatattccgatatttgcactgttctccccactgtttattttacaaggcgctggtgtccttttctctctagcaagattgttggagaaggttgttctactattacgaaatggaccagttagtcctaattaccttacaatctcatcaaaagtccgtgattgctttgcttttcttcatcgtggttcaaggcttcttggttggtggtctattgatgaaggcagcaaagaagagcaagcccggttattctatactgaatctactgggtacaacacattttgtggctatccacctgaggtagtcaggaaaatgcctaagagggatcttgcagaagaggtatggaggctccaagcagctttgggagagcaatcagaaattaccaaatgtaccaagcaggaatttgaaaggcttcaaaatgagaaggttctttgtaggatttgctacgagggggagatatgcatggtcttacttccttgccggcacagaacattatgcaagacttgttctgataagtgcaagaaatgtccaatctgccgtgtgcccattgaagaacgcatgcccgtatatgatgtttaaacttcgctaactcagatgaacgttacaaatttgtacatgttggttgtgcaatgtcgcgccatgtagtctcaatcacaactttaagctgattgaggtttgcacaagttcagaaaggtttaccgaatatggagaaaatataaagcatatcatgtctaaccaaaagcatgaaaaggtagttgatgatcattttgccggttacaattatgtactgtaagtatgtcatcggtggttttaacttttttttttggtgatcgatagatgctccagttagattgtgtagcatcttctcaagtttatgcattgtctgaatgtaaataagaatattgtcttgtttgagtgttgtagtgctctttggttgagaagagtagaaaagaaaaatgt

SEQ ID NO: 14747 - DNA, 2830 bp, Oryza sativa
  ref <308>: DATABASE ACCESSION NUMBER: AK065294
  ref <309>: DATABASE ENTRY DATE: 2001-12-06
gactccaccaccccacgcttccttcgccgctaagtatatccctcccggcgaccgcgaatcggatcttgagagtgagagagaggttgggggaggtggatgagagggcggagatgacggtgatggagctcaagaagctgccgctcgggttcaggttccaccccaccgacgaggagctcgtcaggcactacctcaaggggaagatcacggggcagatcaggagcgaggccgatgtcatccccgagatcgatgtctgcaagtgcgagccgtgggatctccctgataagtctctgatccgctccgatgatccggagtggttcttcttcgcgccgaaggataggaagtatcccaatgggagcaggtcgaacagggcgacggaggccgggtactggaaggccaccgggaaggacagggtgatcaggtccaagggtgacaagaagaagcagcaagtaattggcatgaagaagacgctcgtgttccaccgggggcgtgcgccgaagggtgagcggactgggtggatcatgcatgagtaccgcaccaccgagccggagtttgagtccggtgagcagggaggttacgttctctaccggctgttccgaaagcaagaggagaaaattgagcgacccagtccggatgaagtggatagaagtggatactcacccactccttctcgttcaactcctgataacatggaaccaattgaagacggaaatacaccattaaacagggaatctccagaatctgctctgcatgaaagcccaattgatttgcctgctctaactgaggctcaagctgcgccaattacaaggtggcttgcagacagaactgataacgcgacaacaaatgaagtaaacatctctcacatgcctcatcatgggcttgatggaggagctaaggctagcccttcagctggtgctttccctcagctgattggttcacaacagaatatccatgataataatgaattagccacagtttctgcacccatgctaccacatgaagacttcaataatttccctctaggagccattggtaattttgatggccatatgaatcctcgagatccagtggaggagttcttgaatcaaaccattgctgatccagatgagcattcatcaacaacatcaaaggctcagtatgattcggacactggaatcataccaactgagtttgagaaccatggggtgatgcagggtgaattcatggatgatctgagtgggttggaaaatttagatttctggccagatgaccgaaatccccagttgagtgcactgtatgaggacacaccattgctgccttatgatagcaccgaccaggatgtgctctccatggactctggtgctgaatccttgcaagatctattcaacagcatggacgattcaaacgcgaggaataatgtatggggcaacgaaccattcctccaggggactggatttcccatgtcttggccgttacagccgaactccgcatttccaaaccggggcactgcaaataggaggctcatgctacagctatcagaatcattatctcctgattttgatgtgagcatgactagagatgagtgtgaagatgaggaaccaggtattgttgtaacttcgaagtatgtgaatgaagctcctgaggagtcaactgcagaaaaggatatgccttctgatggagatgatgctgagccaacgggtattactatcctgaggcgacgccatgctccaactgcaagttcgttttctgatggagatgatgctgagtcaacgggtattaccatcctaagacagcaccaagctccaaatgcaagcttgctttctgatggagatgatgctgagtcaacgggtatcactatcctaagacgacgccaagctccaactgctagctcagctagttcatttactcaacagggtgctgcagtgcaaagggtgcggctacaatcaaaccttgatgcagcaccgtgttctagcgttgatggttcatcaagttgcatcataaatgaaggtgaaagtgaacgcaccatggagaaacctgagattgaagagaatgcaggaagtaccttggctgaaggtgggacttgccatgaggatgaccagaaggagcatgatgcttcagcagcaaatgctaaatctgttctgaggctgcggaagacagcagagggaagcgacaaggagaacaagcaggaggaagaggagggtgttcttgcttcacatgtgagagcaccagggaataagaggggattcccatcgtacatcatttggctggttctctctgtggctctggtcctgcttatctcccttgggatttatggatgggtgtaaacagctgctcccctgatggtcttcaagatgaccatgcttactggcacaggctcccaacattgacctgctgtgctgagtgacctgttgtacatattgcgtcttacgcccttgtgtttagacggcggttgctagacaccctggagtgtttgttccccttccagcgtgctgcggcagaagaaaaatccaaaaacaaaaaaaaaaagaggggcgaaaacgaagaaaaaagaagaggtagtgaatgaggaaagttgttgtagatgttctgtgacttaggtgcatggtagtattccttcctgctgttattgcagatgttagtagccacataccctagttgttcagcagttgtaagtcaggttagggatatggttacttttgtctatgtaatgttctgtagcattatctgaacctgctttatcggatgcaatttcgttttcctttcagtaaatctctgtgctgcaaactgtagttcctgtgtaagttttgatgtgtgaaatgttaatacttctagtactaatatactattgatgatg

SEQ ID NO: 14748 - DNA, 1983 bp, Oryza sativa
  ref <308>: DATABASE ACCESSION NUMBER: AK065295
  ref <309>: DATABASE ENTRY DATE: 2001-12-06
gggtccgcaccaaccaaccactgctctcgccgcgccgtcctcttcatctgcacttgcactgcgccatggcggcctcgaccaccctcgccttatcccaccccaaaaccctagccgccgccgccgccgcggcccccaaggccccgacggcgccggccgccgtctccttcccggtctcacatgccgcctgcgcgccgctcgccgcccgacgccgcgcggtcaccgccatggtcgcggcgccgccggccgtcggggccgccatgccgtcgctcgacttcgacacatccgtcttcaacaaggagaaggtctccctcgccggccacgaggagtatatcgtgaggggtgggaggaacctgttcccgctgcttcccgaggcgttcaagggcatcaagcagatcggagtgattggatggggctctcaggggcctgcacaagcccagaacctgagggattcactagctgaagcgaagtctgacattgttgttaagattggtctccggaaaggctctaagtcatttgatgaagcacgtgctgctggctttactgaagagagtggaaccttgggtgatatttgggagactgtttttggcagcgacctcgtgttgctgttgatattagacgctgcacaggcagacaactatgagaaaatcttctctcacatgaaaccaaacagcattcttggtttatcacatggatttttgcttggacatttgcaatctgctggccttgatttccctaaaaatatcagcgtgattgctgtatgccccaagggaatgggtccatccgttcggaggttatacgtacaaggcaaagaaattaatggtgctggtatcaactctagttttgctgttcaccaggatgttgatggaagggcaactgatgttgctctaggatggtcagttgcgctgggatctcccttcacatttgctactaccttagaacaggagtacaagagcgatatctttggggagcgaggcattcttcttggagctgttcatggcatcgtggaggctctgtttaggagatacacagagcaaggaatggatgaagaaatggcatacaaaaacaccgtagagggcatcactggaattatctcgaaaactatctcaaagaagggaatgcttgaagtgtacaactccttgacagaggaggggaagaaggaattcaacaaggcctacagtgcatcattctatccttgcatggacatactctatgagtgctacgaagatgttgcctctggaagtgaaatccggagtgttgtgttggctggacggagattttacgagaaggaaggccttcctgctttccctatgggcaacatcgaccaaactcgtatgtggaaggttggtgaaaaggtgcggtcaacccgaccagaaaacgatcttggccccctgcatcccttcactgctggagtctacgttgcactgatgatggctcagatcgaggtccttagaaagaagggtcactcctactcagagatcatcaacgagagcgtcatcgagtccgtggactcactgaaccccttcatgcatgctcgtggagtggccttcatggttgacaactgctcaacgacggctcgtctgggatcaaggaaatgggcgccacgcttcgactacatcctgacccagcaagcattcgtgacagtggacaaggatgctcccatcaaccaggacctcatcagcaacttcatgtccgaccccgtccatggcgcaatcgaggtgtgcgctgagctgcggcccaccgtcgacatctccgtgcctgccaacgccgatttcgtgcgcccagagctccggcagtcatcgtagagtgagataagataatctcaagggagcttgcatcttgttacagtttgtccgagagtattgtatgtgtgtgcgtgactgtctgaacttgtgagcttgccatcaggtgacctggaactggcctgcccatgtatatccgcaaataatatcatgcttgcgattccgactacttaacttgacgttc

SEQ ID NO: 14749 - DNA, 2246 bp, Oryza sativa
  ref <308>: DATABASE ACCESSION NUMBER: AK065296
  ref <309>: DATABASE ENTRY DATE: 2001-12-06
gagcattgaactccgcctctcctctcctctctctctctctctctctctctctctcctctcccctcgcgtctcgcggccttctccgccgccgcttcctcgtagcagcagcttgcagtagcctctctctctctctctctctctcctctcccctcgcgtctcgcggccttctccgccgccgcttcctcgtagcagcagcttgcagtagcctctccaccaccaccacctcctccgccgccgtgccagcgccctgcgcccctccgggagttgatactgcaatgcgacattgaagatttgatccctttctgctgccttgttggtctcgttttgcatgctggtgtttggtggaatccatggctttccgagaggacaaatatgtgagatttcatgactggagatcagaacattctgttggttccgaaaagacagttttagaaggaaggcataatgtgtttgactcgctaatggatagaactgtaggagccttttcattcctagggaattcctcacatcctgaaaccctcaacaaaccagcttctgaggaaaagaagtccaaaacaagagttcttgatcctcaagggccattcttgcagagatggaacaagatatttgttatatcatgccttattgcagtttctgtggacccgttattcttctatattccagtgattgatggtgacaatatctgcttatatctggacaaaaagttggaaatcatagcaagtgtcctgcgattttttacagatatattctatttactccatataatttttcagttcaggacaggctttattgctccttcctctagagtgtttggtcgaggtgtcttggttgaggacacctttgcaatagcaaagcggtatctatcaacatattttctgattgatttcttagctgttctgccccttcctcaggtgctcgtattggtagttctaccccgtctgcaaggctcctcagttatgacggcaaaaaatatattaatggttatagttatttgtcaatatgtacctcggttgattcgaataataccattgtaccttcaaatcaccagatcggctggtataattacagagacagcatgggctggtgctgcatttaaccttttaatttatatgcttgctagtcatgtccttggagctctttggtaccttctttccattcaacgagaagacacctgttggaaagatgcatgtagtagacatgatggctgtgattcgggatctttattttgtgggagtaatgcagctagaaataacagtttcttacaagatttttgcccgacaaatggaactgacaatgcagatccaactttcggaatttatcttccagctcttcaaaatgtttcacaatcaacgagtttctttgaaaaattgttttattgcttttggtggggtctgcaaaatctaagttctcttggtcaaaatcttaagacaagcacgtatacatgggagaatctatttgctgttttcgtctcgacatcaggtctagttttgtttgcactccttattggtaatgtgcagacctatctacaatctgcctctgtgcgtatagaagaaatgagagtgaaacggcgtgacacagagcaatggatggcacatcgattacttcctgataactcaaggagcgaatactgcgtcatgaacaatataggtggcaagaaacaagaggggttgatgaagagggccttctttcaaatcttcctaagaatcttaggagagagataaagaggcatctttgcctgtcgcttctcatgagggtattttctcatacctttgcataatttgctactatgttttgagagaatcctgattcttgtcccatctgggtgtatatgaaaagggttattcttgagactcgcacaatctttcataccttcatcttgagacaacatgcatcttccacgatcaacactaagcccaactgcatgtcatgccaaatcatatgttgaggattgatttcttgccttctatttcccaaggaccattagttagattgttacataaaaacaatttgcatgtggtttgtaaattccaagtttcttgcttattttgaatagctgcatctgtactggttttgtcagatgttagttctggactttctggttttgtgtcagacctttcctcttctgggtcatagtgtaagtctggcagttcctgaagtctaatcagtaatctggtttagtatagccaattaaagtctacaccctccattgcaaaaagattgcaattctagcattcaaattctgtccc

SEQ ID NO: 14750 - DNA, 2090 bp, Oryza sativa
  ref <308>: DATABASE ACCESSION NUMBER: AK065297
  ref <309>: DATABASE ENTRY DATE: 2001-12-06
tttgggggaaagaagaagaagaagaagcagaagaagcttggagcttgagctttctgaatttcagtcggtgtaactaatgggggagatgaaccagccgccgccgccgccggtggccgtgccgccgccgatggtgatgcagccaatcatgcatccgcccgtcggcaccggcgccgtcttcccgccgcacgagcagttccaccatctcgcctactgcgtccactccaacccttcctgggttcaggtggccgcacttgcattcctccactatcttgtgatgctgggttctactgtcatgcttgcatcaactattgttcctgcaatgggtggtaccccaggggataaggctcgtgttattcaatccttcctatttatgagtggcatcaatactctcctccaaacacttgttggaacgcggctccctacagttatgaatgcttcctttgcatttgtcgtcccagtactgtcaatagccaaagactttgaacaaaataactatgcgagcagtcaccagagatttactcacacaatgagagcaactcaaggggctctgattgttgcttctatcctcaacatgattcttgggttcagcacaatttggggggcattcgccaggaaatttagtcctgtaataatgacccctgttgtttgcgttgttggtcttgggctatttgcacttggctttccccaggttggaaagtgtgtggagatcgggctaccaatgctaatccttgcagttgttgtgcaacagtatgtgccatattacttccatcattaccatgagcgaatcaccttcttgtttgagaggtattcgttgcttctttgtattgggattgtgtgggcctttgcagctatccttactgctgctggtgcatacaaccatgtttcactcaagacccagcagcactgccgcactgacaagtcctatctcatatcatcggcaccatggatcaaaatcccataccccttccaatggggtacaccaatcttcactgcaggtcattcatttggaatgatgggtgctgtacttgtttctgcttttgagtccactggtgcacactttgcaactgcacgtctagctggtgcgacaccacctccagctagtgtccttagtaggagtgttggtttgcagggcattggaatgttcctagaaggtatctttggcgctccagctggttcatctgtatcagttgaaaacattgggcttcttggactaacaaaagttggaagcaggagagtgatccagatatcaactggatttatgattttcttctccatatttgggaagtttggtgctttctttgcatctattccattgccaatcttcgcagcaattttctgtatcttatttggtattgttgctgcggtgggagtctcgtacatgcaatttgtaaacaaaaattcgatgaggaacatatacatcattggactttcgctgttcctaggcatctcggttcctcaatacttccatgagtatactgcttctgctagcactggacctgcccgaacaaatgctggatggttcaatgacatcataaacacagtcttcgcctctggcccgacagtgtcactgattgtcgcatcgatcctggacaacacactggagtttagaggctacgaaaacgaccgggggcttccatggttcatgccgttcctgcaccgtcggaaaggttactcagatcctagaaacgacgagttctacagcttcccgatcagggtgcatgacgtcatcccaagccgattcctctgacgggcgagggtagcgcccgttacctgcgcttccgcgcatgtaaatctctttgttcttgttagcccttccttactcctgtgacatgtagcaattggcaccgccaagattaaaaagtctcaacttagtggggatatggtacaaatggttaggacttttggttttcttttctttttcctcccctttgggccaaccatttggttaattacatgatggtgtagagttggttaaatgattttgggatggatctttaaagaatatcagccacctcaatttgttgattgctcagccagtgatgtagatgtgcttccaggacatgcattgatttcgtcataactctgtaatc

SEQ ID NO: 14751 - DNA, 2190 bp, Oryza sativa
  ref <308>: DATABASE ACCESSION NUMBER: AK065298
  ref <309>: DATABASE ENTRY DATE: 2001-12-06
ggctcgatttttttcccaataaatttgcccgagttttcctcttttggttccccagtttcagtttaagctcttaaaccctcgccgggagatttcgccgcaagattctcattctccgcgcctatttgcttgccagttgttgatcttggagatggcggcagctcagcaggcgcaagattcagctgatcacatggagcctctagagtcacgccttgtggttgagaaaagtccttctacaagtattctctctagtgaagatcataatttatctagtactgctttgcacggcgcaagttccttaaaatcaaccaaaagtgctcaagagaagggaagctttttgggtaaaggtggagaacaacatttcatctaccagcccaatgtgtatacccctcagccacatacagtcttttctggaggatacttgaaccatctgggtcaatgggaagaatatccgcatgttgccagtgcagatggaactgatgctgcatctcctgtgatgtacagttcttattcccctgtgccaaccatgggagacagccaaccatattaccctttgcactgccctctgtcaagtccttactatcagccacctgcttctcctagcatgggatattcaaattctgcaactgggatgtcgcagtttgatcctatgcaagagtattaccttcctgatggacttctgtattcaccaactcctgggttccaccagcatttcggttccttcgatggaactcaaatgcaacaaagtgttactggaatttttggacaagggaacataccattggcttctggaatgcatcaggggtccatgtacagctctgggtcatacaaggcacggcagcaagtcggtaattttggaggtagcacgccaaattggagtgctgccagtcgcagatttagcccctttgacaggggcttcaagcatgataagggctctcttgagtttatgagtgagcaaaaccgtggtccacgggccaccaaacccaagaaagaagtgaataactcctcaactgaggacaaaaataggaaaagtgcattaataaatgattctaacttgtacaaccaacatgattttgttattgagtatgaggatgccaaattttttgtaataaaatcctataccgaagatcatgtacacaagagcataaagtatggtgtctgggccagcactgctagtggtaacagaaagttggatgctgcttatcgtgaagcaaaagagaaagaagccacttgtcctattttcttgtttttctcggttaatggcagcggccagttctgtggtgtggctgagatgattggacctgtggacttcgacaagagtgttgattactggcagcaagacaagtggagcggccagtttcctgtcaaatggcacattatcaaggatgtcccgaacagccttcttcggcacatcattctcgagaacaatgaaaacaagcctgtgaccaacagcagggacacacaggaggtgagactggaccacgggctccagatgctaacaatcttcaagaaccatgaggtcgagacaactatcctcgaggatttcgacttctacgagcagcgggagaaagccatgctggatatcagacagcgacagaagcagcagcatactgattccgaggtccagaagccgatggtggagtccaaggaaccagtggatcttatgaaccaaatctcagccacctttgcccgggccgtgcagcttggagaaaccaagggcagcagggaggacaaaccaaaggttgaagatgcttctgctgctgctgttgctgttcctgagaacgagcctgttgctcttgctgagactgaaggattgttagcagattcagagccaagccctttgaaggaaagtggttgatcttacccctttcatgtctgattgcgagaagcagctgggccttgtgatgttcacatggaagcaagaagatcaaaggaggttgatatgtgaaaaaaaaaatgctgcttcttttgtacttcaccataggctgcattataggctggaggagaaggatttggttcacctccagttaggttatgatgttagtcttatgtttccttcccaatttcttctttctgttctgtcatctgttccacaagcgccaccaagaatggtgctcagtggtttagccataaggaaagctgcatatataggccagagctctgtacagtttgcagttaaattatgttgttctc

SEQ ID NO: 14752 - DNA, 2760 bp, Oryza sativa
  ref <308>: DATABASE ACCESSION NUMBER: AK065299
  ref <309>: DATABASE ENTRY DATE: 2001-12-06
gagaatcgaattttgccctcagaacgaaacgcctcgtctccccttccaggcgattagggtttcgcccatcttccggaggcgcgcctcgccgccgccaccgcggcgatcccgctccgtcccctgcaaccgacctcccgctcgaccagggccgtcaagccttcatccacgcgcgagcggcgtcgcgtaggcggggggtccgagcgagcgctgagcgaggcgtccggaggggatcgatccatcccgctctagggttcgcgagcgtctcgcgtgtttgcattcgctgaaagatggagatacaaacttcagggaagcccattgatctgctgatggagaaggttctttgtatgaacattatgtcttctgattacttcaaggagctctacaggctgaagacctatcatgaggtcattgatgaaatatacaatcaagttgatcatgtggagccttggatgactggcaattgcaggggcccctccactgcattctgtctcctctacaagttcttcaccatgaagcttactgtcaaacagatgcatggtttgttgaagcatcctgattccccatacattagagctgtaagttctttgcccctattaacttttatcacactttattagatttaagattaatgcatgctttctgttgtttatcaagttttattggagtgcaatgataaactaagattttcagtataattggtgtgtacaaacaatccaaatttatttccttcaaattatagttctaacacataatatctgtttctacattttggttatatccactaacagtcctatgacttgcttcgttggatggccttgtgtattggttttggtcctaggacacgtggatgacaaagtttccaagcagttcatagtgttccagtctgttcattggagttgtgagcattttttgtctttatttattctgttgatgaatatgatgctttcagtaaataaccaaccggtgttgtgttgcagatagggttcttgtatcttcgatatgttgcagatccgaagatcttgtggacgtggtatgagccctacttgaaggatgatgaggaattctcccctggatctaatggtcgcatgacaaccatgggtgtttatgtgcgtgatcttatacttggacaggtctgcctcttcattctttgtgctttcagtatagaaataaccaataaacacactttttctcttacaaattaacagttgttgtgctaaagtatcttttaaatgaataacactagcagattaaaaagaaagtttctgctttttgatgactagtgtgctgtgctatgatgacttgattcacatacgcactcgatcactacacattattaaaataatctccatgttatggtgattcacataagttcatttcatttgttcaaatgtttgtgaacattttttaaatctaattctatttggtgtatgttcagaaactttgccaactaactggacattcttggccaggcaagtcatagttccacaacatagcttgttagtagtttttattctccttacttccccccagattggtagtactccataaatttgctttaagctttgttgcttgctgattttcattatccatttatcagaaatgaattgaatcctctgactgcaaattttgactagcaactatttccgatgctctttcttataattgattaacctgctgtttgtcttttcttggtgtagtactacttcgatagtcttcttccaagagttcctcttccagtaattcgtcaagtgacatccaatcttgagaagatgaagttgcccactaagctttctgggattactggagagtctaatcgtcatggatcagaagatactgcccgccggcctccttccgtgaaggcttctctgtcagtttcctttggacagcgtgctccgcatcgtgcatccacacgggagtcatctccagttcggaggacagtcacccatgatggccatcgtaaatcttcctcaccatctcgccgtagcggaagccgcgaggttcctgatcgtgatcgatcaagccgtgaccgttctagtcgtgactatgaccgttcaagccatgaccgtgatcgtgaccattccagtcgtgactatgaccgtccaagccatgaccgtgaccgtgatcgtgaccgttccagtcgtgactatgaccgttcaagtcgtgaccgggatcatgatagagacatcagagactatcatcggcgtgatcgtgacagcagggaccgtgactataggtctaggcattcatccgaaagacaagatgaccgaagggaccgtgaccgtgagggtagcaggcacagacggtccagctctcggcacagaagcagaagccgcagccgcagccgcagccgcagcagaagcaggagccgcagcagaaatgaggagagatccagtccttttggcaatgcaggcaaagaaaagactgctgccatctcgagcaacctagcaaagctcaaggacttgtatggtgatgtaactgagaagaaggacgacggtgaagcccctcgccgtgattcgtgcgcggaggaggttatcaggttgggtggcccgagatggagatagaatttgtgactgtaaccctgttgttcctcaaagaacctgatatgttgtcagtacaccttttctttcatctgccagtttctcaagaaacttgttaatacttggcatctcaaaacaccttactataatatgtcaacaatggtagtttgtatggtatggatggatgacattgatacatgttggttccctatgttttagtatt

SEQ ID NO: 14753 - DNA, 3916 bp, Oryza sativa
  misc_feature (645)..(645): "n"=any one base of a, t, c, or g
  ref <308>: DATABASE ACCESSION NUMBER: AK065300
  ref <309>: DATABASE ENTRY DATE: 2001-12-06
gagtgggccagtggctcaccgcccacttcaccggtttccggcgtccggcgcggcgcctgcagaagagcccctcgaaaacccctaccccccatagctgcccacgtccccccgtttcccgcgcccacctccaccgccatcgccatgggcaagccgaagcagcaagtgctctcccgcttcttctcccccaagccgcggccctccgcccccgccaccgccgacgatccgccgcctccgcctagacctcccgccgagccgcccgtcgccgccgtcgtctccttctcgcccgccaagcgcgcgcgcgccctctccgtctcccccaaaaccaccgccaaaagggccaagccctcccctcccccttccgactacgttcgccgcaggctgctcgaaccgccccggccgcccccgcccgccgctttgaaccctagcggcaaaggctacaccccgctggagcagcaggtggtcgacctcaaggcgcgccaccccgacgtcctcctcatggtcgaggtcggttaccgcttccgcttcttcggcgaggacgccgccgtcgccgcctccgtgctcggcatcatcgcccaccccgaccacagcttcctcaccgccagcatccctaccttccgcttgggcttccacgtccgccgcctcgtngccgcggggcacaaggttggcgtcgtccgccagaccgagacgggggtgatcaaggcggcgcacggcgggggcgcggccggcacgcccttcgcgcgcgggctctcggcggtgtacacgcgcgccactatcgaggccgcggccggggagctggagggcggcggcgcgcccgacgaggggagcaggtacctcgtgtgcgtggtggacaaggaggtggacaccatggggacggaggggttcgaggtgaagatcggggtggtggccgtcgaggtttcgaccggtgaggttgtgcacggcgagttcatggacggagtctcgaggaatggccttgagcccttgctgcttggcttggcgcccgttgaggtcatcctcgggactccaatatcctctgccacggaaaagctgatggtggcatatgccgggcctacctctaatgtccgggttgagcgcacctcgcgtctttgttttagtgagggtggtgctttagctgaactgctctctttgtttgagaagtctggggttgatgctccaactgttgagaatggcagacatttgatggagatgaacgaggagaacaataatcctcgtgggattgagggtatcatggctatgccagaactagttatccatgcactggccttgagtgttcgctatctcaagggttttggtatggacaggataatctgctttggttcttcatttcagccatttacagctaacactgaaatgtctctgtcagcaaatactcttcaacaacttgaggtattgaagaaccactcagatggttcattggatggatcattgttccaaactatgaacaacacatgtacagcttttggatccagattgtttagacactggctgactcaccctttatgtgatagaaatcaaatatgtactcgtcatgacgcggtctctgagatctctgaatcaattggatcacaacaatattcaactaacaatctccaggatgaagtggacatgtcttgctcatcttctgtgagaagtgatctgagcaccattctttcatccgttttgagaatgctggcaggaactcttgatatacaaagaggaataacaaggattttccactgcaaagccacagcgaaagagtttgttggggtcgtccaagctatcctgacggctggaaagcaactgcagaagcttgttcttgaggatacagacaccatgtcttctcagcatagaactgtgcactctcctttgttgagaaggctaataaatacggcttcatcatgtactgtcctggctaatgctgcgacacttgtgtcttgtcttaacaaagatgctgctgatcaaggagatatgctaaacttattcattgcatctgttgatcagttcccagaggttgcagagggtcatgcaactgttgaaatggccaagcagaaattggagctgttaattactgagtatcgaaagcagcttggtgtgcgcaacttggagtttaaaacagtagctgggacaactcatttgattgaactaccggtggatagaaaggtaccttcaagttggatgaaagtaaacagcaccaagaaaacaattagataccacactccggaagtctcgaaaaacttggagaatttattgctggctaaggaaaagctagcagttatctgcaggacaacatggaataacttcctcatggatttcggcagatactatgcgcagtttcaagcaactgttaaatctcttgccactctggactgcttatactcgcttgccactctcgcaaaacaaaataaatatgtacgaccaaattttgttcgtgagaatgaagcaagtcagattcacataaaagatggccgccatccggtggtcaatatgaaaataatattctactgtgccacggacactatttccaatactactggcagatcacacacggtcatgcatacttcatgtgaagcatttagtttatgttgacaatgtttgtatttctatgctgttggtttttaggttctggagtccctacttggagtcaattttgttccaaatgataccgagcttcatgcaaatagtgagtactgccggattgttacaggaccaaacatgggaggaaagagttgctatattcgtcaagttgctctaattacattgatggcccaggttggttccttcgtaccagcttcatcagcaacattgcatgctgttgatggaatttatactcgaatgggcgcgtccgatagtattcagcatggaacaagtaccttttatgaggagttgagtgaagcttccaacatattgcataactgctcatctcggtcactagttatcatcgatgagcttggtcgtggtacaagcacacatgatggtgttgctatagcttatgctacattacactatcttctgaaagagaagaaatgcatggtaatttttgtcactcattatccaaagattcttaatattctgagagaatttgaaggttctgtcggtgcataccatgtctcatatctagcaacacggaaactgttggaagtagctgataggcagatggtgattaacaacacagagacaaaggatcttggtgaaatcactttcttatataaacttgttgctggagcttcagacagaagcttcggtcttaatgttgcgctgcttgcacagcttccatctagctgtattgagcgcgcttcagtcatggcagccaaacttcaacaggagttaagtgagcgtgagaaaaataagttttgtaggctaatggacgttccacgggaaagctctccgaaagagctttgtgcacagccttatcaagggctggctgaagcatgccacaggatactatttaacgttacatctgctcaaagtaatgacgagttaacggatacactatcttctttaagggaagccagggaagttgccttgaaggcaataaaaggctggtgatcatgttcttcgaagcagtggatacttcaccactggtttccttttgtttttttgaagggatcaggtggcatcttctgataatctactaaaaatttatcgaagatgattttgggactaatgttatttatcgaagacgattttgggactaatgttagccattgtgctaatggcagcagtgtagactgtaaaatatagtggatctggaaggtggaggaccttgaagttaaagccaactctatggaagagcaagtaacttattgtaaatctgtagttacagcatcagttgatgtatccagacttgtccaaaccatattaaagctttgcctccattttgaagtgtagatgcagaaatgagatgcatctcttatatcct

SEQ ID NO: 14754 - DNA, 3612 bp, Oryza sativa
  ref <308>: DATABASE ACCESSION NUMBER: AK098921
  ref <309>: DATABASE ENTRY DATE: 2002-08-28
gctctctctctctctctctctctctctctcgccaaccaatctcctcccccctcctttcctcctcctcccgaaccaccggaatccgacgcggcgccgccgcgccaccccgttccgccggctctcttcctcacctctcctccccaggagatcgtcaatctcctcggtcaggtgtttgatcgattgcctgtgggaagcatatgggcggttagattcgtgaagttgagaggaatcagaagacgggaattgtttgaggggactgaatttgatctggaaaatggggtggtttcgggctgcgtccggattggctcgggtggcgctgaggaggaacctggcgcgtgctccggcgaacccttttgccggtcctgcgccacggtacttccactccacccgcccccggcggttcgccgctcctgtgccccgcgccgtgccgctctcgcgcctcaccgacagcttccttgatggcaccagcagcgtgtaccttgaggagctccagagggcgtgggaggctgatcccacctctgtcgacgagtcctgggacaatttctttcggaactttgtcgggcaggctgcaacttcgcctggcatatctgggcagacaattcaggaaagcatgaggttgctgcttcttgtgcgagcgtaccaggtgagtggtcacctgaaggctaagcttgatcctctcgcgctagaggagcggcctatccctgatgttctggaccctgcgttctatgggttctctgaggctgatctggaccgggagttttttcttggtgtgtggaggatggctgggttcttgtcggagaatcgccctgtgcagacactccgttctgtgttggagcggcttgagcaagcttactgtggtaccattgggtatgagtacatgcacatacctgacagggagaaatgtaattggctgagggataggattgagacggtcaatgcaagggagtactcctacgaccgtcgccaggtcatgcttgataggctcatgtggagcactcagtttgagagcttcttggcacagaaatggacgaccgccaagcggtttggtcttgaaggtgcggagacactgatccctggcatgaaggagatgtttgacagggcagctgatcttggtgtagagagcattgtgattggtatgccacacagaggtaggctgaatgtcttgggaaatgtcgtgaggaagcccttgcgacagatcttcagtgagtttagtggtggtaccaagcctgccgaagaaggggagggcttgtatacagggactggagatgtcaaataccatctaggaacttcatacgataggcctaccagaggtggaaagcatatccatctgtctctggttgcaaacccaagtcatttggaagcagtcgatcctgttgttgctgggaagaccagagcaaaacagtactattctaatgatcttgacaggaccaagaatttaggagtcttgttgcatggtgatggaagcttctcagggcagggtgtagtgtatgaaaccctgcatctcagtgctcttccaaactacactactggtgggacaattcacattgtggtcaataatcaggttgctttcactactgatccaagggcagggaggtcttcgcagtattgcacagatgttgctaaagcattggatgctccaattttccatgtgaatggtgatgacttggaggcagtggttcatgtctgtgagcttgctgcggagtggcggcaaacatttcattctgatgttgtggtggatattgtatgctaccgccggtttgggcataacgagattgatgagccttccttcacccagcctaaaatgtacaagataattaggaaccaccagagtgctcttgagatataccaaaacagacttttagaatctgggaagatatccaaggaagatattgataagatgcagaagaaggtcagcactatcttgaatgatgaattccaaaacagcaaagaatatattcccaataagagagactggctctcagcttactggactggattcaagtcaccagaacagatttcacgaatccgaaatactggtgtcaagccagagattctaaaacgtgttggagaagccatgactactctgcctgaaaatttcaagccccacagggctgtcaaaaagatttttgagctgcgtcgtcagatgattgagacgggcgaaggcattgattgggctgttggtgaagcacttgcttttgcaactcttataattgagggaaaccatgttaggttaagtggtcaggatgttgagaggggtacattcagccaccgccatgctgttatccatgaccaggaaactggagagcaatactgtccgcttgataatcttgttatgaatcaagatgaggaactatttactgtaagcaacagttccctgtcagagtttgctgttttgggctttgaattgggctattccatggagaatccaaactcactggttttatgggaagcccagtttggtgatttttccaatggagctcaagtgatatttgatcagtttctgagtagtggagaggcaaaatggctccgccagaccggtcttgtcgtttgccttcctcacggatatgatggtcaggggcctaaacattccagtgcaaggttggagcgtttccttcagatgagtgatgacaacccttatgttattcctgagatggatccaactctgaggaagcaaatccagcagtgcaactggcaagttgtgaatgtcacaactcctgcaaactatttccatgtcctgcgtcgccagattcaccgggacttcagaaagcctttgattgttatgtctccaaagaatctccttcgacacaaggactgcaaatcgaatctttctgaatttgatgaccttgctggtcaccctggatttgacaagcaaggaacccggtttaagcgtctaattaaagatcagaacaaccataaggaccttgaggagggaatcaagcgtttagttctctgttctggaaaggtatattatgagttggacgaagaaagaagaaaaaaggagcgtgatgatgttgctatatgtagagttgaacagctctgtccattcccatatgacctcatccagcgcgagttgaagcgatatccaaatgccgagattgtttggtgccaagaggaacccatgaacatgggggcgtacagctacatcaatcctcgcctcctgaccgcgatgagggcgcttggtcggggcacgatagacgacatcaaatacgttggaagggccccatctgcagccaccgcaacaggtttctactccgtccatgtgcaggagcaaaccgagcttgtgcagaaggcactgcagcgagaccctatcaactctccattttgaacctgtagattttatttggatagccgtgggtaatcaaacctttgatccaacagcaaaattattgcctgtgcagccatttggtgaataatccgcttcggatgtttggtaccgcatgagagaaaccatttgaaacccatgttgggatgcatcattttgtgtttcttaacatcaaattaaaccaagttgcatccaatgcttacttgaggagtagaaataagtcgatgctgaatactgatcttccatgtttttgtgatactacattcttattactgcgcctttcaccatcc

SEQ ID NO: 14755 - DNA, 2947 bp, Oryza sativa
  ref <308>: DATABASE ACCESSION NUMBER: AK065301
  ref <309>: DATABASE ENTRY DATE: 2001-12-06
ggttcgaaatttacaatctttgacccgcttcgtcctcaatcttcttgcttatacacagtcataatccctcgtactagaaattaccgtgcaaaatttccccacacacgtgctgctatggttctaaatttctaatcggctctgatgagtcaccttcccaacagatgagagaggattttctggctgagtttagcaattagcacagctctttgatcctatctttgctttcttgctccgcctacctggatggatggatcccccctccctattaatacagcacgcttcttcctcttcctcctcacgattcaagccaaacgcagccggccgacctcctcccgtgccttcctcctcgatccccggagagagaaaaaaggctccatcttttttcctctttccgtttttgggcgcgaacgcctcgtcccccccggatcgatcttgctcgcgcgcggtccgtagtcgcgtgctctgttcgaaaggcgagtccctttttttttttcttctccggccgcgggcgctaattttcttggagggcgacgcgccacctttggcccggccatgaacgcgctcgccgccaccagccgtaacttccggcaggccgccaggctgctcggcctcgactccaagctcgagaagagcctcctgatcccgttccgcgagatcaaggtggaatgcaccatccccaaagacgatggaaccttggcgtccttcattgggttccgcgtgcagcacgacaatgcccgcgggccaatgaaaggtggcattcgctatcaccctgaggtgaggattgtggtttgatgagaatctgtttttgattttgtccagtaataatgccggggatgtaaatcatcttccttattatctggaaatttgaccggagatgattaagcatgaataaatagtgaagtggttataaactcggaatgttttgacagtgactgtctcatgtcaatgggatcattgtttcgttttggtgagttattagatctacggtacttgttaacttgttattccttccttgtttgcatatggcctttccagttcggtgagttattcttttaggaaatgtgcgtgatgttactttcagtttcatacctttatttgtaatctactttatgatattttgtggatcgtctgggcactgggctgtcagtttgtcatgcagatggcgtgaactgaaaatccttgatattttgcaaagcatgtgttgcttttgtactactatgcgcttatgtgcttttacattcagatttatatttctttctgttgaactgtcaacctaaatgtatcttttccatactgacaaaagaatcccaatgggcacatgccaatcttcttcctctgtcaaattgtttctgtaatttctgttttttcttgaactattatttaactggcattttgagaaactagaaagtttgatgcccagacatgctacagatgctagtattcagtattggagacaaccactcaaccagctttgttttcttctgtgataatttcttttgttctttactgctccaatcatacttcggttcttgttgctggaagccattaaatttcatacagataggtgcttgttataattaaacctagggaataatcccttaggtttttccaaaactgcgagcttatggtattttcctgttgaaaatgccagagttatatatgtgcaccatttaggttccaaatgaagatgagggattttcaaattttaggttaaaaaaaaaacagtctcctggagtactaataaatataaagcataaagcgctatgagcttctgagacttttattgtcgtgttttactttgtacttaataaataaatggatttcctttgatgatgaattgatgtttgttatcagttagctaacagaaaagcagctaacctatcaatcaattcctagagtaagcaattgatgtcagcagttgttaatttgcaaaggaattttttgtaagtattaccgtaagactttcacaagctaatgtagaaagtcaactataatattttctgctgaccatactttgtcttataaattattcattgtagtctgagattcatctgtttctcatttttaaaactacaattgataatgaattttgggtgaggttccccctcctttataactttcttatcttcttaaatggcacccagctctcttgcgtgttcgagaaaaaataaaactaaaactaataagctatggtttcaccattctgctttgcaggttgatccagatgaagtaaatgcacttgctcaactaatgacatggaagactgctgttgcagcaattccatatggtggagcaaagggtgggattggatgcgctcctggtgaattaagcacgagtgagctggagcgtttgacacgtgtatttacacagaaaattcatgatcttattggagctcatactgacgtgccagctcctgacatgggaactaattcacagaccatggcttggattttggatgagtactcgaaattccatggtcattcaccggcagttgtcactgggaagccaatagatcttggtggatcattaggtagagatgctgctacaggaagaggtgtgatgtacgctactgaggctcttttggctgaacatggaaagtccatttctggatcaacctttgttatccaggtcagtcataattaataatcgattgatttttgctatgcggattatttctaggatggttgaaggacaatactccatccgtcctagaatataagaagttttaggcttggacacggttattaagaaagtaggtagaagtgagaggtggatggtcataattggatgagtagtggaggtaggtggaaaaagtgaatggtggagtgctgttattggttgggaagagaatgttggtggagaagttgttatattttgggacaaatcctgagggctaaaagttgttatattttggtacgaagggagtaacatgcatcatcataacagc

SEQ ID NO: 14756 - DNA, 1790 bp, Oryza sativa
  ref <308>: DATABASE ACCESSION NUMBER: AK065302
  ref <309>: DATABASE ENTRY DATE: 2001-12-06
gtggaagccactcgagagctttctctttctgtgtgtagtgtgtgcaactaggaggcttgttccatactagtttgctaggtcatggaaaagagcgagattttcgtaggagcacactcatatgcagctatatgtgcttttacactcatcataggatggttagctcactgggtatacagatggataaatcctccatgcaatgggaggcttcctccgggctcaatgggcttccctattgttggtgagaccttccaatttttcagaacaagtccatcaatagacatgccaatttactacaagcgaagactggagaggtatggacctatattcaaaactaacataggaggccagcacgtggtcatatcccttgatcccgaggtgaaccagttcatatttcaacaagaggggaagttgttccaatcctggtttccagaaaccacactaaacatctttggaaagaagacactcaccacgtataatagaactgctcacaagttgatccggagcttcgtatgcaagctctatggccctgaaaacgtgaaaaaatcactcctgccagaactagagaactccatgagggaaagcttggcgtcatggataggaaaacctagtgtcgaggtgaatgatggcgtgtcaaatatgatcttcggcctagctgccaaacatttgattggcctcgacatcaccaattcaggagaattgaaaaagaactttcaggaaatatttcaagtgatggtttccatcccattcccaatatattttccagggacctcgttttaccgatgcatgcagggtaggagaaatgtatggaccacactaacaaatgtagtgaaaaagaggctaagtgcacctggaaacaaattcggcgaccttgtcgatctgatagttggagagctacggagtgaaaatccaacaattgatgaaagttttgctatagacactctatctgggctcttgtttgctagctttgcaccgctatcgtgcaccttgactacaacttttaagttcctcaacgacaatcctgaagtttttgacaagctcaaggaggagcacgaaatgatactgaagaaacgagagggtgcgaattctgggttcacatgggaggaatacaagtccttgaaattcagtactcaggttgtgaatgaaattaatcgaatcactacggttatacctggtggtttcaggaaagcactaacagacgtgcaagtaaacggatatacaattccgtctgggtggctagtcatgattagccccatgggagtgcatctaaacccaaaattgttcgaggatccactcaaatttgatccatggagatggacggaggagaagagaatctcgatgcaaaggaatttcatgccatttggaggaggaatcaggatgtgtcctgcggcagagtttaacaagctttttatcacactctttctccacatcgtggtgaccgagtatagatggaaggatatcgacgggggaatgtaaagcgtatctccgaggttttggtcgctcaagagtatcatattcaactagttcctcagacgtaacatacctatgggatattcatctataaaaaaccaagtgtcaatggatcctacggagctattcgtacatgtacttcaatattttcatcatatggtcctcttatgtgtgtgtgtgtgcaagtttgaatttccatatattgttccatacttccattaaagtctcatatgattttcctcgaatttgatgaactagccgccaaaccgtgcattgtatcacttttcatatattgttataatatcattaatgtattggttatc

SEQ ID NO: 14757 - DNA, 1979 bp, Oryza sativa
  ref <308>: DATABASE ACCESSION NUMBER: AK065303
  ref <309>: DATABASE ENTRY DATE: 2001-12-06
gtgttgtgctcacctgggcgtggagttctctgcatgagagagagagagagagagagagagagagagagagagagagagagagagagaggacacctctgagctgtttcttcaacaagtcttcaagatttggcagagctactgagagagagcaaaggagaggagggctatagggaaaaaagtatttttttttgggggtacaaatttcttgcttgattctcttcgatcccggagagcagccaccagttgaggcacaatccttgctgttcgtgtgcctgggtttgatagctgtccagatctgcggcacttgcccgatagattccaagaatccgagcacaaactctcgtttgctgcgaaaagatagtaggtggaataagttgagcaatacggtggagataagagagatagcttgtgtctcgtgatgccatcaagaaactgcgtggaggaggaggagagtgtgagatgaaggatgctggccgcggtgatggactacttcaggtcctgctggggcccgcgatctccggccggtcaccgggtcaggggctccgacgtcgccggccggcaagacgggctcctgtggtataaggacgccggccagctggtcaccggggagttctccatggctgtggttcaggccaacaacctgctggaggaccagagccaggtggagtccggcgcgctctccatggccgagcccggccctcagggcaccttcatcggcgtctatgatggccacggcggcccggagacggcgcggttcatcaatgaccacatgttccaccatctcaggagatttgcaactgagcacaagtgcatgtcaaccgatgtgattcggaaagctttccaagcaactgaggagggcttcctttctctagtcagtaagcaatggtccttgaagcctcagattgcagcagtaggatcttgctgcctagttggtgttatttgctcagggactctctatgttgcgaaccttggagattcgcgtgctgttcttggagatttgtcaagtccactggggaagttgtggcaacgcagctatcatcagaacacaacgcgtgctatgaggaagttagacaagaattgcaggcatcacatcctgatgatccacaaattgttgtcctaaaacacaatgtttggcgtgtcaagggcctcatccagatctcaagatctattggcgatgtatatctaaaaagaccagaatataacagagaacctcttcacagcaagtttcgacttcgggaaaccttcaaaaggccgattcttagttctgaacctgcaattgctgtacaccaaatacaaccaaatgatcattttgttatatttgcttctgatggtctatgggagcacctcagtaatcaggaagcagttgaccttgtccaaaataatcctcgtaatgggattgctcgaagactagttaaagtcgcaatgcaagaagcagccaagaagagggagatgagatactcagacctcaagaaaattgatcgtggcgtgaggcgtcatttccacgacgatataaccgtcattgtggtgtttcttgattcgaatgccataagcaaagcaaactggagccgaggtccttctgtttccctgagagggggtggtgtcaccctccgtgcaaattcccttgcgcctttctcaactcccacggtgttaagcagcacctattgaaggagctatactgcaaagaacatgaacatctacagtaacacagatggaggtgaaagcagctgccgttatcaactgtactgtactccttctgtgttgctcttatgaaactgtttagaccccacctggtaattagtgtactgatagcgaggtataagattagattattccttagcaacgcaatcttttttttcttttctttttctttttccttctttattcttatcctttctcttacccacgagagaacaggtggttgtaaattgcccagaacacctttttcgtaatagtccatcatatccccttttttcgtgttg

SEQ ID NO: 14758 - DNA, 1318 bp, Oryza sativa
  ref <308>: DATABASE ACCESSION NUMBER: AK065304
  ref <309>: DATABASE ENTRY DATE: 2001-12-06
gggaactctctccccgagcaccgccaagcagctctccactcccaccatgctgctgctccactcctctccgcgcctcctcctccgccaccgcctcctcctccccccgtcccgcgacctcctccccgccgcctccgcctccgccctccgcctccgccgctccgtcgccgtccgcgccgagccggagctgtccacctcggcagccgagcctcccccgggcgacgacggcgagggagatggccccgtggagctccgcaccccgacgctcttctccatcgacgagaaccccaccccgctgcagaccgccaccagcgtcctcctcaccggcgccatctccgtcttcctcttccgctccatccgccgccgcgtccgccgcgccaaggagctcagggttcggtccggcggggtggagaagcccaacaacctgagcaaggaggccctggaggggctgaggctggtgagcgcgtcgccgatcgaggtcgacaagccgccgtcgcccgtgcaggcgctgctcggcgggatcgccgcgggggtcatcgcgctcatcctctacaagttcaccaccaccatcgaggccgcgctcaaccgccagaccatctccgacagcttctcggttcgtcaaataacaataacaataagaacaattataaatgggatatgctacctagcaacatttgtgtttggaatcaactcaattggattagtactctatggtctccagctcacttttgcttctatcatgggcgatgacaattccagcagcgctgcagagaaaatcagtgagcagtccaacacaatggcatcatctaatagctccacagattcaacaagtgacaacgaatcaactagcaatgataagagtaaagggtagctggagtggaccgtgcaaatgcactagccaaatcttggagtacatacaattggataatctttgtgggcatttagttttctcatcttgagctgtagtgtcattgtatagcgcaaatatggaccaattgaattgcaattactgtagtaacatttcggctgaacatgtacaaagaaaaaaggtagcaagcagtttttttggggacactttctgattgcaactggatgaatatttttggcagaatctacccttgtacttgtggaataacattataatgaccctttgctgtgaaaataccatcttttagaagcctgatgctcgtgttgtgttcatggaagatggcagattgcagggatatttggcgatagtatgggcgcggttcacttgtggttacccaacttgaccttgctcttgttttacaagatcagctataaaatgtgttctttctgatgc

SEQ ID NO: 14759 - DNA, 1298 bp, Oryza sativa
  ref <308>: DATABASE ACCESSION NUMBER: AK065305
  ref <309>: DATABASE ENTRY DATE: 2001-12-06
gcttacactttatggcttcacgtagccgagtcgtcgagtcaactcggttgagctatataagctctccatttgccttgctctgcttccacgcactcgatcgagcttaactaattaaccatcagtagcaaattaagcctcgaccagctaatcaattaattgagcttgtgctgttagccgtgtcatctatagctcgctagcttgccatggtgtcctctgctatggcggcggtggcggtggcgtttgctgtagtggtggccgcgacgatgagcagcgcgcaacttgacccgcacttctacgacggcttgtgcccggcggcgctgcccaccatcaagcggatcgtcgaggaggccgtcgcggcggagccccgcatgggcgcctcgctcctgcgcctgcacttccacgactgcttcgtcaacggttgcgacgggtccatcctgctggacgacacgccattcttcacgggggagaagaacgcggcgcccaacatgaactccgtccgcggcttcgacgtcatcgaccgcatcaaggacgccgtcaacgccgcctgccaccgacgggctcgtcaggttctacgccgccaggcggcggcgaacagcagcatcccggcgccgacgctcaacctcgacggcctcgtctccagcttcgccgcgcagggcctctccgtgcaggacctcgtcctcctctccggcgcccacacgctgggcttctcccgctgcaccaacttccgcgaccgcctctacaacgagacggccacgctcgacgcctccctcgccgcgtcgctcggggggacctgcccgcgtaccgccggcgccggcgacgacaacctcgcgccgctcgacccgacgccggcgaggttcgacgccgcgtactacgcctcgctgctgcgcgccagggggctcctgcactcggaccagcagctgttcgccggcggcggcctcggcgccaacccggacgcgttccggcgagacttcgccgagtccatggtgaggatggccagcctgagcccgctcgtcgggagccaaggcgaggtccgcgtcaactgcaggaaggtgaactactactagcaagaacgcgagatggcctaaattaaatgagttccgaatgaattaatagtgcttaagtatgttaattaattaccttctcctgtggatgagagttcttcattgtggtttaattagctcatttaattcagtttgtgtgagtgaagtgaatattgtttaaacgttctggtgttctttgattttcatttcctcttgtaatagtgatgagttcaaaagttaaatgcactgagtttttgt

SEQ ID NO: 14760 - DNA, 1113 bp, Oryza sativa
  ref <308>: DATABASE ACCESSION NUMBER: AK065306
  ref <309>: DATABASE ENTRY DATE: 2001-12-06
gatttgcgagcgatgtcggctgcgagtgcgagtgccactgcctccctctccgcggcggcggcggtggcgggggtgcggcggccgctctccgccccacgcagcagcgacgcctgcgcgttgtcgcgccaccgcgccccctcaggctcaccagtctcaacccccctcgcgcggcttccgccccctctactcctctgtgggaggccggcgtccgagctgagtcgtccgactcgcccggagccggagccgggggtgacgtcatgggcctcctcctccgggagcgcatcgtcttcctcggcaacgagatagaggacttcctcgccgacgcagtcgtcagccagctcctcctcctcgacgccgtcgaccccaactctgacatccgcctcttcgtcaactcccctgggggatcactcagcgcaacaatggccatctatgatgtaatgcagctcgtgagggcagatgtttccactattggattgggcatagctggttccactgcttctataatccttggtggtggcacaaagggcaagcgattcgccatgcccaacaccaggataatgatccatcagcccgttggaggcgcaagtgggcaggccttggatgtcgaggtccaggccaaggagatattgactaacaagaggaatgtcatccggcttatatcaggtttcacaggacgcactccggagcaggttgagaaagacattgatagagacagatatatgggtcctcttgaggctgttgattacgggctcatcgacagtgtaatcgacggagacagtatcatcccacttgagcctgtcccggagagggtgaagccgaaatacaactacgaggaactgtacaaggatccacagaagttccttacacctgatgtcccagatgatgagatatactaggtaatgagcctgcctgcctgtcgtttgcatttcgcacggcaagggggctgcttgcaatcaaagacgatgctcctagtcctagcactagttgatttttcctgtcacatgttaaccaactagtgccatattacgattgttgagcacgcagttagacttattggttgtgtttgtcgttgaaattgcatgcgtttggtgtgcgaatgtggatggattgacg

SEQ ID NO: 14761 - DNA, 2414 bp, Oryza sativa
  ref <308>: DATABASE ACCESSION NUMBER: AK065307
  ref <309>: DATABASE ENTRY DATE: 2001-12-06
gtggggattccttccagctctcaaccaactcgtcacgccacgcctaccgcctccgaagtttataaacctctctctcttttcgagctctccgctgcgtgtccaccatttccgtttggttttactccactaataagctaaggattttttcttttggttgtggttactgcgccaatggctggtaatccggcggcggcggcgccgtcgtcgtctggctcttcgtcggtgttcctgccgcccccgtcgccgtccgacggggagctgctccggccgctgcaccgcctggcgcgcgacctgtccgccgtcgacacgcccgcgccgttcctgcgcgccgcgttcgcgtccatctcgaggcggtccaagctactggcggccgcgttcgacgacctgctgctgtgcggcgccgcgggggagctgccgcggtcggcgtcgctgtgcctgcgggaggtgctcctggtgctgcagcggttcaaggcgatcgtcgccgattgctcggcgcgcagccggatgcggctgctgctggagtccgacgagatggaggcggagctgcgggagctcaaccacgacctggccacgctgctcgacctgttgccggtcgtcgagctggggcttgccgacgacgtgctcgacgtcctcgccctcgcgtcgcgccagtgccggcggtgctcgccggcaccggagtcggaggaggcgctgaaggcgagcgtgctgtcgctgatacaagagatcgagcgggagatcgtgccggagcgggagaggctggaggagatcctggtggaggtcggcatcaacgacccggcgagctgcagcgaggagatcgagagcctggagcaggagatcggcgaccgtgcctcggagaaatggacggcctccatgatcgctctcgtcggcctcctccggtatgccaagtgcgtcctgttcagcgccacgcctcggccttcagattccaattccaaggctgacgtcgaggctgaagacggcgagcccccggtgccgccgtcggacttccggtgcccaatctctctcgatctaatgcgcgaccccgtcgtcgtcgcgagcggccagacgtacgatcgcgagtcgatcgaccggtggttcagctccggcaagtcaacgtgccccaagacagggcaggtcttggccaatctggagctcgtgtcgaacaaggccctcaagaacctcatctccaagtggtgccgggagaacggcgtcgccatggaagcctgcgaggcgagcaagagcgagcaggcccaggcggtggccgccaacaaggccgcgctcgaggcggcgcgcatgacggcgtcgttccttgtgaagaagctgtccgtctccttctccccggatgccgccaaccgcgtcgtgcacgagatccggctgctatccaagtccggctcggagaaccgagcgttcgtcggagaggccggagccgtgcctctgctcgtgcccctgctctactccgaggatgcagggctccagctcaacgccgtcacggcgctgcttaatctctccatcctcgaggccaacaagaagcgcatcatgcacgccgacggcgccgtcgaggcggtcgcccatatcatgagctccggcgcgacgtggcgcgccaaggagaacgccgccgccgccgtgctcagcttggcgtccgtgcattcctaccgccgcaggctcggcaggaaccaatccgtcgtggagaaattagtgcatctcgtgcgcaccggcccgacgagcacaaagaaggacgcattggccgcgctgctgacgctggccggcgagagggagaacgtcggcaagctcgttgacgcaggcgtcgccgaggtggcgctgtcagcgattagcaaggaggagaccgccgcggcggtgctcgccgcgctggccaagcgcggcggtgcggaggcgatcgtcaacatcgacggcgccgtggcgcgtctcgtggcggaaatgaggcgcggcacggactgggccagggagaacgccacggcggcgctcgtgctgctctgccggcgcctgggcgcgccggcggtgacccaggtcatggccgtgcccggcgtggaatgggcgatctgggagctgatgagcatcggcacggagcgcgcccggcggaaggccgcctcgctcggccggatatgccggcggtgggcagccgcctccgccgccgacggggagcgaggcggcggttgccccgttgccaccgtggtgccccctgccatgatggcttcgtgaaaaccaatcacaacttgcctcgtaggataagttcagaaacataatttttccccccttcttgctgtacagagtcttttttaggctgtcaagattctttgctccgagagataatggtgagtgtttgatcaactgtgcatacgagcttcagtccaatgtaatcccctccaattccaactcaaattgcgccctttcttttcttg

SEQ ID NO: 14762 - DNA, 2559 bp, Oryza sativa
  ref <308>: DATABASE ACCESSION NUMBER: AK065308
  ref <309>: DATABASE ENTRY DATE: 2001-12-06
gtattccatgacctcccctccgagtcgcgcaccgcgctctcctacacctccctcatcgccgcctacgcgcgcaacgcgctgcacgaggaggcccgcgagctgctcgaccagatgaaggcctccggcgtcgtgcccaccgatccgccggtcccgttcgacatgctgctcggcctcttcgctgaaatgcgccatgacccttccccctccgttcgtcccgacttcaccacctacaacaccctcctcgccgctgccgctgtacgcgctctctccgaccagtccgagatgctgctgcgcaccatgctcgaggccggtgtcttgccggacaccgcatcttaccgccacattgttgatgccttcgctggtgctggtaacctctcccgtgtggccgagctgtttgccgagatgtcagcaacggggcacactccagacccatctgcgtatcttgggctgatggaagctcacacgctggttggtgccactgctgaagcggtagctgtgctgcggcagatgcaggctgatggctgtccgccgacagctgcgacataccgtgtcttgcttgatctgtatggcagacaggggaggtttgatggcgtgcgcgagctcttccgcgagatgagaacaactgtacctccagacacagccacatacaatgtcctgttccgcgtttttggggacggtggcttcttcaaggaggtggtggagctcttccaagatatgcttcactctgaagtagagcctgatattgatacatgtgaaaacgtcatggttgcgtgtggtcgtggtggactccatgaggatgcaagggaagttcttgactatatcacaacagaaggaatggtgcctactgcaaaggcctacactggcctagttgaagcgcttggccatgcagctatgtatgaggaggcttatgttgcattcaacatgatgactgaaattggaagcttgccaactatagagacctacaatgctcttgcaaatgcatttgcaaagggtggccttttccaggaggctgaggccatcttttctcgaatgaccaacaatgctgctattcagaaagacaaggattcattcgatgctctcattgaagcgtattgccagggtgcacagttagatgatgcagttaaggcatacatggagatacggaagtccaggtttaatccagatgaacgctcccttgagggggtactcaatgcctactgcatagcaggtgttatagatgagagcaaagagcagtttgaagaacttcagtccatggtgactgttcctagcattattgcttattgcatgatgttgtcactctatgccaggaatgacaggtggacagatgcttatgatctgttggaagaaatgaaaacaaaccgtgctagtagtacacatcaagtgattgcttccatgatcaaaggggagtatgacgatgactccaattggcaaatggtcgaatatgttcttgacaacagtaacttggaaggctgtgactacagtttacgattctttaatgcactccttgatgtcctttggtggtttggccagaagggtcgagctgcaagggttttggatcaagcattaaaatatgggctcttccctgagttatttcgtgataccaagctggtctggtctgcagatgtgcataggatgtcagtaggtggatcattagtggctgtgtcagtgtggctcaataaactttatgatagactaaaaggcgatgaagatcttcctcagttagcctcagttgttgtattgaggggacaaatgaagaaaagcacagttacaaggggattgccgattgcaaaagttgtgtactcttttctgaatgatacactatcatcatccttccattatccaaaatggaacaagggacgaatcatatgtttgaagtcccagttgaaaaagctccaggcagccatagattcttccaatggtgctgcaatttctggttttgttcccatgacaaactctcatttgccatcccctggttccaaattgtacactagggagtcccaagctgataatggttctgcccatttgactgatgaaaccttggtagaagaaaaggaatcagaactccttgcactgtgagttttcaggagcttgctgcctccttccttttgcagatgcgatgttatctggccgaacaagggaagataagacacagaatgtctcacaattttgaagtttgggcaatcagatcgtcctaatgtgcaatgagatggccttatgcctttgcagtgctctcttgcttcactatatgcagtggacgtgactcccaatatccacaatcttgcctagaacccagcacataagcatgagttcgtgatactggatttgcgctaacttgatagacaatgctggacttccagttgtgtttcaggatgtagcacttagtagggagaatcagagtatgcatgttgttgttagttgctcacttgttctatatgacatttcgtgcctgccccattcggcaagaacgaaccctgtctggaatatatggattcactcgatgcaagtaaaacatgctgatgagtcagtggaacacatcagtcatcgatacgtttctgatgg

SEQ ID NO: 14763 - DNA, 1425 bp, Oryza sativa
  ref <308>: DATABASE ACCESSION NUMBER: AK065309
  ref <309>: DATABASE ENTRY DATE: 2001-12-06
gacgggcaccacaagctcgtcacctgctttctcttccactcaatccaatcctctctctctcttttccaatctcaattactacaatcctctcctctcctctcctctcctctccttcctttgtcgcgagtcacaggcacacagacatggccgccgtgaacacagtgtcgtcgctgccctgtagcaaagctggcgccgccgtagccgggggagctccgaggccgtcgacctgctccgtattctaccctcctcgttgctggtcgaagcgaagcagcggtaatggcgtgcgggcgcaggcgtcgacgacggagacgaccgcagcgccggctgcggaggtgactactaaggtggagaaggtgtcgaagaagcaggtggatggcgtggtgacgaacaagtacaggcccaaggagccgtacacggggcggtgcctcctgaacacgaggatcaccggcgacgacgcccccggtgagacgtggcacatggtgttcagcaccgacggcgagatcccctaccgcgaggggcagtccatcggcgtcatccccgacggcatcgacaagaacggcaagccccacaagctccgcctctactccatcgccagcagcgccatcggggacttcgccgactccaagacggtatcgctgtgcgtgaagaggctggtgtacaccaacgatcagggagagatcgtcaaaggagtctgctccaacttcctctgtgacctgaagcctggttcggacgtgaagatcacggggccagtggggaaggagatgctgatgcccaaggaccccaacgccaccatcatcatgctgggcaccggcaccggcatcgcgcccttcaggtccttcctgtggaagatgttcttcgaggagcacgacgactacaagttcaacggcctggcgtggctcttcctcggggtgcccaccagcagcacgctgctgtacagggaggagttcgagcggatgaaggagatcgcgccggagaggttccggctggacttcgcggtgagccgggagcagacgaacgcggcgggggagaagatgtacatccagacgcggatggcggagtacaaggacgagctgtgggagctgctcaagaaggacaacacctacgtctacatgtgcggcctcaagggcatggagaaaggcatcgacgacatcatgatcgacctcgctgcaaaagacggcatcgactggcttgactacaagaagcagctgaagaagtcggagcaatggaatgtggaagtctactgatggatatatatatgttaataattaattaatccctttttatctcgattttcatgcatgcatgcgcaacctgcatacgccatcttgttgtactcgatctgatctcatctgatgagatgcatgtagatattatactgacgattcgtcgactataaagtggtttcccattttctgctgtattttg

SEQ ID NO: 14764 - DNA, 2060 bp, Oryza sativa
  ref <308>: DATABASE ACCESSION NUMBER: AK065310
  ref <309>: DATABASE ENTRY DATE: 2001-12-06
gcatctctgctcctgtcttgcacagccgcgagcccctgaaacggggaggatagagcagtgctcatcgatggatgaacggttaagatggaatcaaccgggggccatcgcaggttgatccggatccctccgcggctccgccgaatatccgccgcgctgctgcctgctgcctgctgttgctgctatccatcctctcctctccacctcgcttccgctcgttcgttcctcttccccctcacccacctggtcgccaccccccaaccccaccggcgtctgagcccgctccgctccggcctcctcctgcgaggccatcgatatagctaaccgtagtggaagataaaggacatgaaaatggcacatatggtaactaactgtagtttcagcccttcgcctgcagttaagacgtactcgaaatctcctggttattgctgcaatgtgacccaattccagagctcaaaatgttccaatctagtgctcaaatcatgtactgcgacaagaccgaacaggccatttgtcgctcgtgctagcgctgctgtacaaggacagacacaaacaccccttactggaagtcagcaagcatctgggcactcatcctctaaacccaaaaaggtcatggttatcggcggagatggctactgcggctgggcaaccgcacttcatctctccaataaaggatacgaggttgccattgttgacaatcttgtgcggcgcctttttgatcaccaacttggcctggattccctcacacccatagcctccatccagaatcgcatccgtcggtggaaggctctaaccggaaagacgattcagctctatgttggtgatatatgtgactttgatttcctttcagaagccttcaagtctttcgagccggattctgctgtccactttggtgagcagagatcagcgccatattctatgattgatcgttcccgtgcggtattcactcagcataacaatgttatcggaactcttaatgtattatttgccattaaggagttcagtgaagaatgccatctggtcaaactaggaaccatgggtgagtatggaactccaaatattgacattgaagaagggttcatcactattacccacaatgggagaactgataccttgccttacccaaagcaagcgagctccttctaccatctaagcaaagtgcatgactcgcacaatatagcatttacatgcaaggcttggggtataagggccacggatcttaaccaaggtgttgtatatggagtgagaacagatgaaactgcaatgcatgaagaactatccaacaggtttgattatgatggcgtctttgggacagcactgaataggttctgtgttcaggctgctgtaggtcatccacttacagtttatggaaaaggtggtcagacccgtggatatctggacatcagggatacagtgcaatgcgtagagctcgcaatcgccaacccagccaaaccaggtgagttcagggtcttcaaccagttcaccgagcagttctcggtcaacgagctggcaaagctggttacggccgccggtgcaaagcttgggctggaggtgcagaccaagtcggtgcccaacccgcgggtggaagcggaggaacactactacaacgccaagcacaccaagctcatggagctcggcctggagccccacctgctgtcggactcgctcctcgactcgctgctcaacttcgccgtccagtacaaggacagggtcgacacggcgcagatcatgcccagcgtgtcgtggaagaagatgggggcgaagccgaagacggtgtccgtctaagaggaggctggttttgccatggcggggtataatgtcaaccgtgacattgacattataaatttggtgtgtagtaatgcaataattatgtgcgtttagtataatgcacgttgtagtgggtgtggttacggtgttagatttcttttttgttcttcctcacgaatagatgctgcaatctgatcgaaggggattccttctgtatttctgttgtaaacttttatccagctcttgatcagcaaatgggtatccaggatgcaggggggtatttgagcctttttttt

SEQ ID NO: 14765 - DNA, 1058 bp, Oryza sativa
  ref <308>: DATABASE ACCESSION NUMBER: AK065311
  ref <309>: DATABASE ENTRY DATE: 2001-12-06
gcttttaatttttccttcttttcttctaattattattagtactaattcaacctccccctcgccgccgtcctcctcctcctcctccgcgtccgcacggcagccggaggcgggaggcgaggcgaggcgaggcgcgcggcggagatggcgatcctgtacgcggtggtggcgcgcgggacggtggtgctggcggagcacagcgcggcggcgaccaacgcgggcgccgtggcgcggcaggtcctcgagcgcctccccggcgggggagccgacagccacgtctcctacacgcaggaccgctacgtcttccacgccaagcgcaccgacggcatcaccgcgctctgcatggccgacgaggccgccggacggcgaatcccctttgcgttccttgaggatatccatggaaggttcgtgaagacatatggccgtgctgcattgacatcccttgcttatggcatgaatgatgagttctcgagggtcttgagtcagcaaatggattactattcgaatgacccaaacgcagacagaataaatcgtatgaggggtgaaatcagtcaggtccgtactgttatgattgacaatattgataaagtccttgaaagaggtgatcgtttggacatgttggtcgacaagactgcaaatatgcaaggaaatacaattcgttttaaacgacaagctcgccgcttcagaaataccacctggtggagaaatgttaaactcacgattgcgttgatattcctcctcacggtaataatatacgttgtgctcgtctttatgtgccatggcttcaccttgcctacttgtattaggtgagatgccatccatgtctttgtgtggtgtgctggtgagtgctgctgaactattgcaacaccattgcaataggtcagggtggtttttgtgtagagattactatttattgtgtaatcatgctgtgttgattgtgcaaactcaatgaaagatgtaatctttgccccccataaatccgcctatttggagctgtacgaccatgggaattctactattactctatcaatattcttcgctgctgctgcagctgcgtctgc

SEQ ID NO: 14766 - DNA, 2103 bp, Oryza sativa
  ref <308>: DATABASE ACCESSION NUMBER: AK065312
  ref <309>: DATABASE ENTRY DATE: 2001-12-06
ggtgttcttcttgtccgctttaggggttcgcttttctagattcagtctgtcagcggcgacggcgagggagctgcgagatccggccgtgagatggtggtgatccgaaggagtcatcgtcatcgtcgtcgggttggagcctcttcgtccaagaacctgccttgatcttgcagccttgttcaagcttccgagtcttttgctgatccagggtgcagtttcttagcatgtgagtaatggcagctgctgaaacaagggctgcttggcagcgtgctgctaaccgctgccgggttcaagaggacgcaaagagagctccgaaactcggttgctgcccgccatctgggcaacagcatgagaccaacaatggaaatcaaacaaatccgcaagactgccatatccccaactttatgcctttaaactggaatgcaatgaactccaatctgccaaaagatacccaatggtggcttcagttgcagcccaattttgggtgccagaatgtgcttgctagcgaggacctgaattatatgtgtggggaagttgatgtaaagaaagtcgaaagtttcgcaccagtgtccaaacttgaggacatcaatcctaagaaaacagctgatccttttgagcccccatggatagtttcaacagcttttatgaaacaaacatatgagacaggttttgaagagctcaagagtcttcctgcctattctgaaatgaccctcaaatgcaggggaagtgccacctatcttcatgaggacaaagaacatatggacttcaaaacttttgatcctttgtatccaaagaaaccacagacggcatgctatgagatggatgcaccttggcaagaaaacaggaagtctcggccatggtggcaggtagctgaagcggatggtttggcttccgtagttgcagaaagtgaaatgcacaacgtaggcaaaaatgagctgccaagacccacccaacgtgctcatggttcaaaattgaacaaccatgaaaacaaggatgattatggaccttatactggcaaagaatcacctccagtgcagtatgacactatgctgtgcagctatagcatttcaagcaccaatgagacaaattcatctgatggtggaggctggcaacatcaaagaaatgatgcacgtgggggtacacaggattcttgtagttctgatgatcgcacaccaggcagcaagccgacatatcggagtgccgctgagaggacccagttgctggatgcactccgccattcacaaacacgcgcgagggaggctgagatggctgccaagaaagcttatgatgagaaagaccatgtcatcaagctattattccgtcaggcctctcatctctttgcgtgcaagcaatggctgaaaatgctgcagctggagaacatatgcctccagctcaggttgaaggaacaccagatagcagccatgttccctgaactcccctggatcatgctcaaagaaaaggtgacgccagggcaagaaaggaaggatggaacaaggaagaaaggaaggaagcagaacaaggacagccacttgcgcaaggctgtcgtgtttgcggtcggtgtaggcatcgttggtgctggactgcttctcggctggactctcgggtggctcttgcccaggttgtaagttccattatcatctaccaccatggctagattaacgcctagcgcgcacttcgatcgaataggtgatagataaagcttcaggtatgtgcttcatgatgttagaagaatgaagatcatattcttggagctcattcatatctgttctgttgttggtttggaagccttgctgatgatattttcatatcttcatgtacatataggatgaatttgctgtatatattttcagaaactgggtgcttctgtatgttgcatgcgtttgcccgaatgttgtacatatatggggtcagtggtggtggaactagggaaaaaaatccgtcgacatcaacaatgtattaagtataaaacttgtattttcagttgctggagtagccagctcttgtttgtataataaaaacttgtatttttagttgctggtttagacagctcttgtttgtattataaaggcctaggcacgcttgtgacactatgaatttccatttgtc

SEQ ID NO: 14767 - DNA, 1455 bp, Oryza sativa
  ref <308>: DATABASE ACCESSION NUMBER: AK065313
  ref <309>: DATABASE ENTRY DATE: 2001-12-06
cctcccctttctatcctccacctcggcttatctcctcccccctccccaccaccaccaccaccaccatggccacagccgcttccctctccgccaccgcctcctccctcctcgcccccgcccccgccaccaccggcgccgcggcggcgcagtgctgctcctcctcgtccaccgcgctgttccccacccccgtcccgtcgctgcgcgcctactacccgcgcctgctcctcgcgttccgccgccccgccgtcgccgccgtcgcagacccgcagggcgccgtgctcgaggaggagcagggggagcagcaggacgaggggcaggagcagtacgacgacgacgactacgacgacgggtacgagggcggacgcggccccgcgttcacgccccccacccgcccgcgcaccggcaaggccgcccttccgctcaagcgcgaccgcacgaggtcgaagcgattcctggagatacagaagctgagggagagcaagaaggagcacgacgtgcccacggccatctcgctggtgaagcagatggccagcgcccgattcgtcgagtccgctgaggcgcacttccgcatgaacctcgaccccaagtacaacgaccagcagctccgcgccacggttaatttgcccaaggggacgggccagtcggtgaagattgcggtcctcacacaaggtgagaagatagatcaagcaagagctgcaggagctgatattgtcggtggagatgacctgattgaccaaataaaaggaggatttatggaatttgacaagctgattgcatcacctgatatgatgcctaaggtcgccggattgggaaagattctaggaccgagaggacttatgcctaaccccaaagctgggactgtttctccaaacataactcaggctatcgaagagttcaagaaaggtaaagttgaatacagagttgacaagacagggattgttcacattccctttgggaaggttgattttcctgaagaagaccttattgcaaacttcatggctgttgttcgctctgtcgaaaggaacaaaccatctggtgcaaaggggatatactggaaaacggcatacttatgctcatcaatggggccttcaatcaagttaaacatcaaagaaatgcttgactatggctcagaatcatcagactaaatgccacgaaaagcaccagttaagaaatctggtgtttgctaccaccttcacaaaattaaccatccacccttagcgataaatgaaccgggaaacatggtgggggaaggcaagggaggtgcttaggtacagtttttttttcagtctcacctgcatccatccagcagttacacgatgcccaagtcgacgaaggggtgatattgttggccatttgtacttacgagcaaattatttacggacttatagatgtgttttctgagatgtttgttgtaatgatcaatattttgtccatagtcatccttgagcttacgac

SEQ ID NO: 14768 - DNA, 1581 bp, Oryza sativa
  ref <308>: DATABASE ACCESSION NUMBER: AK098922
  ref <309>: DATABASE ENTRY DATE: 2002-08-28
gactcgaagacgaatcgtaaaagctcaaaaaaaaaaaagagaaaaaaagaaaaaaaagggagacgcggccatggcggggacggggagcttcaaggtgacgaggatctcggagggggcggtgaagccggcggcggcgacgccggaggagacgctgccgctggcgtgggtggaccggtacccgacccaccgcgggctggtggagtcgatgcacatcttccggtcgggcgccgacgcggccccgggcgtcatccgcgacgcgctcgccagggcgctggtcttcttctacccgctcgccgggcgcatcgtggagcccgaggccgggtcccccgccatccggtgcaccgccgacggcgtctacttcgccgaggccgccgccgactgcagcctggaggacgtccgcttcctggagcgccccctcctcctccccaaggaggacctcgtcccctaccccggcgacgaccgctggggcgtcgagccccacaacaccatcatgatgatgcagatcaccaaattcacctgcggcgggttcgtgatggggctccggttcaaccacgcgtcggcggacggcatgggcgcggctcagttcatcaacgcggtgggcgacatggcgcgggggctcccggagccgagggtgaagccggtgtgggacagggagaagttcccgaacccgagcatcaagcccggccccctgccggggctgccggtgctggcgctcgactacatcgtcctcgacttccccaccggctacatcgacggcctgaaggcgcagtacaaggcgcacagcggcaagttctgctccggcttcgacgtgctgacggcgaagctgtggcaatgccgcaccagggcactcaacctcgagcccggcgccaccgtgaagctctgcttcttcgccagcgtgcgccacctgctgaagctggacagggggtactacggcaactccatcttcccggtgaagatgtcagcgccgagcgagacggtgctgtcgtcgtcggtgatggaggtggtggacatgatccggcaggcgaaggagaggatggcggtggagttcttccagttcgccaaggaggagacggagcaggacccgttccagatgacgttcaactacgagtccatctacgtctccgactggagcaagctcgggttcgccgaggtggactacggcttcggcccgcccaagttcgccggcccgctcgtcaacaacgacttcatcgcctccgtcgtcatcctcaaggcgccgctgccgctcgacggcacgcggatgctcgccagctgcgtcaccaaggaacactcggaggagttcgtccgcggcatgaaggaggacctgccatgaactgagcaaatgaggtgatgagctttttttcttttgttacttgaagctgctgcttgtgagctgaagtgaagggcttcttctaatagggaggggaacacatactggtgaaaaatgatgttgttgtaagaggcgtattttgtttgtatttatttgtttctttactcttggttaatacggattcgagttatgttcttagacagtttaatatttgtaccatttgatatgggaataaaagaaaagatatactctcc

SEQ ID NO: 14769 - DNA, 1284 bp, Oryza sativa
  ref <308>: DATABASE ACCESSION NUMBER: AK065314
  ref <309>: DATABASE ENTRY DATE: 2001-12-06
gattccattccactcgccaacccgacacgtctctcatcttcacgcaacgaacagcagcagcagctcaagctaagctaagctaaagtactacgtgttctttcgtcttcgtcggcgccggagtttgattcgtcggagctagctagcaagaggaagaagaaaatgttggccatattccagaagcaggtggcgcacgcgccggcggagctgaacagcccgcggagcagcgcggcgaagcccaagaaccccgacgagatcatcagggacttccacgccctccaccccatcgaggccttctccacctccttcggcggcggcgccgccctcgcctgcgtcgccggccacgcccgcaatggcctctctggctacgagaggatgttctgtgggctggatgacatctactgcgtgttcatggggaggctggacaacctgagcagcctgatccggcagtacgggctgtgcagccgctccaccaacgaggcgctgctcgtcatcgaggcctaccgcaccctccgcgaccgcggcccctaccccgccgaccaggtcgtcaaggatctctccggctccttcgccttcgtcgtcttcgacaacaagtccggcgccgtcttcgccgccctgagtacggatggggaggtgccgttgtattgggggatcgcggcggatgggtcggtggtgatctgcgacgagagggagatcgtgaagggagggtgcggcaagtcgtacgcgccgttcccggtggggtgcatgttccacagcgagggggggctcaagagcttcgagcacccgatgaaccggctgaaggcgatgccgcgggtggacagcgagggcgtcatgtgcggcgccaccttcaaggtcgacaccttcaccaagatcaactccatgccccgcgtcggcagcgccaccaactgggccgccacctgggacgacgctgccgcctgatgatggcgctccgtacgccgtcgtctcgtcgccgtgcgcctgccctcgccgccggcctcctcgccgtttgccgccgccgctcatctcttcctcctcttcttcctcctctctatatccgatgtgcttctccgtccgaagcatgcagattattagagcgatatttgcagctagcgtggaagcgcgccaatctatttttctgcggtgtttttacttaattttcacctcttctttttaaatttttatgtccatctttgggctctcgcctctcggcaatgtatattctcggtcgcgggtggcatgtcatggtacatactatgaatgatgaataagaaagagtttgcttcactc

SEQ ID NO: 14770 - DNA, 2289 bp, Oryza sativa
  ref <308>: DATABASE ACCESSION NUMBER: AK065315
  ref <309>: DATABASE ENTRY DATE: 2001-12-06
ggggcagcgtgacagtgtgtcccccccgcctcgccacctaaaaccccacaccacagagcgcagtgcacgactgcacggcccgcgccatagacagcacacgctccggggagctgaagcggagctgaggctgtctgtcggcatgggggtccgcccggcggccaccaagctgaacatctcccccgccgccgcgcggcgcccctcctccttcctgcccatcgccaccgtggcgctcctctgctccgcgtcctacttcctcggcgcgtggcagcacggtggcttctcctccccctccgcctccccatcctccgtctccgtcgccaccgctgtcgcctgcaccaccaccaccaccgccaccacccgctccgccacgcggccgcggaagcggacgcccgcggggcaggggcaggcgctcgacttctcggcgcaccacgcggcggccgcggacggcgccgtgctcagctcgtccggggattcggcggcgacgcggaggtaccaggcgtgcccggccaggtactcggagtacaccccgtgcgaggacgtgaagcggtcgctgcggtacccgcgggagtggctggtgtaccgggagcggcactgccccacggggcgggagcggctgcgctgcctcgtgccggcgccttccgggtaccgcaacccgttcccgtggcccgccagccgcgacgtcgcgtggttcgccaatgtgccgcacaaggagctcaccgtcgagaaggcggtgcagaactggattcgcgtcgacggcgacaagttcaggttcccaggcggcgggaccatgttcccccacggcgccgacgcgtacatcgacgacattgggaagctcatcccgctccacgacggctccgtccgcaccgcgctcgacaccggctgcggggtggcgagctggggcgcgtatctgctgtcccgcgacatcctggccatgtccttcgcgccgcgggactcccacgaggcgcaggtgcagttcgcgctggagcgcggcgtgccggccatgatcggcgtgctcgcctccaaccgcctcacctacccggcccgcgccttcgacatggcgcactgctcccgctgcctcatcccctggcacctctacgatgggttgtatctgatcgaggttgaccgtgttctgcggccgggagggtactggatcctgtccgggccgccgatcaactggaagaagtactggaaagggtgggagaggaccaaggaggacctgaacgccgagcagcaggctatcgaagccgtcgccaggagcctctgctggaagaagatcaaggaggctggcgacatcgctgtctggcagaagcctgccaaccacgccagctgcaaggcctcccgcaagtccccgcctttctgctcccacaaaaaccccgacgcggcatggtatgacaagatggaggcctgcgtgacgccgctcccggaggtctcagacgccagcgaggtcgctggtggcgcgctgaagaaatggccgcagcggctcaccgccgtgccgcccaggatatctagaggtagcatcaagggcgtgacatcgaaagcgtttgtgcaggacaccgagctgtggaggaagcggattcagcactacaagggggtgatcaatcagttcgagcagaaaggacgataccgcaatgtgctcgacatgaacgccggcctcggcggtttcgccgcggcattggccagcgaccccttgtgggtcatgaacatggtccctaccgttggtaactcctccacgcttggggtggtctacgagcgtgggctcattggaagctaccaggactggtgcgagggcatgtccacttatccacggacgtacgatctcatccatgcggactcggtcttcaccttgtacaagaacaggtgcgagatggatatcatcctgctggagatggacaggatcctgaggcccgagggcacggtgatcatcagagacgacgtggacatgctggtgaaggtgaagagcgccgcggacgggatgaggtgggacagccagatcgtcgaccatgaagatggcccgctcgtccgggagaagatcctcctggtcgtcaagacgtactggacagccaaggagcaagaccaatagcagcagtagtgtgaagaattgaattactgcaagccagcagcaacaacattgttgagaagttcccgtaatcgggtcgccatttctagctcgtttcttcagttaaggtttttttatgttcttttggactgtagcactatagaagatttgtactgcctggtaggtgtaatacagggcagaatatgggaaggggtggatattacaaagatttt

SEQ ID NO: 14771 - DNA, 992 bp, Oryza sativa
  ref <308>: DATABASE ACCESSION NUMBER: AK065316
  ref <309>: DATABASE ENTRY DATE: 2001-12-06
gtaccatctcccgtgtcctcctcccacctcgctcccccgtaaaacccgaaattacaatcaggtcctcggcggacgccacccccaaatctgaaaccctcgccgccgccgccgccgcgcgatcccccccggaattccatcggatcggcccccgcctctccggcgagatgggcatctcgagcatgccggcgcccaaggacagcgtggtggcgtacctgctgtacaacacggcggtgtcgatcgccatcctggcggacatggtgcgggcggcgctggtgttcctcggcctccccgtgccgccctcggcgtgggaggacggcgacgaccagctggcggcgatcgcggcggccgccgcggccgcggccgcggcggcggggggcccgagcctggcggacaggttccggagcaggttcaggccggcgaggttcgggcggcggcgaggcgggggcgcgggcgcggccgactgccgcgtctgcctcgcgcggttcgagccggagtcggtggtgaaccgcctcccctgcggccacctcttccaccgcgcctgcctcgagaagtggctcgactacgaccacgccacctgcccgctctgccgccaccgcctcctccccgccaccaccgagtccccctcgccgtcgccggcgacggcgaccccccatttcgcccggatttagagagatctccccccttcaatccgccactgggccgtgtgcgcgtaggaaaattgagaggatcatttagctctagtgctagctccatttagtgctcctttttccccccactttcttaatttttttttcacctctttgcagtgtttttttttaccatcttcgagtggccttttcttttcttttctttctttttttacttctttgtgttgctgctgtaccattgtaaatatttgcagagtgctccgatcgatggagaggtgtagcacttgtgtacagggcttttggaaagcgaagagatgagaaggagagaaaaaaaaatcattgccc

SEQ ID NO: 14772 - DNA, 1202 bp, Oryza sativa
  misc_feature (640)..(640): "n"=any one base of a, t, c, or g
  ref <308>: DATABASE ACCESSION NUMBER: AK065317
  ref <309>: DATABASE ENTRY DATE: 2001-12-06
tgtcagagagctgagggagccatggccatggagaagagccgggtcctcgtcgtcggcggcaccggcttcgtcggtcggcgggtcgtggcggcgagcttggcggcgggccacccgacctacgtcctgctccggccggagatcggcctcgacatcgacaagctccagatgctgctggccttcaaggcgcggggcgcgcggctcctcgaggcgtcgctcgacgaccacgacggcctcgtcgccgccgtccggcaggcggacgtcgtcgtctccgccatgtccggcgtccacttccgcagccacaacctcatgctccagctcaagctcgtcgaggccatcaaagatgctggaaatgtcaagcgattcctgccatctgaattcggcatggatccatcaaggatgggggacgctctagaacctgggagggtttcatttgatgagaagatggtgataaggagagcaattgaggatgcaaacatcccccacacatatgtttctgccaattgctttgcagcttacttctgtcctaacctctgtcagatgaaaactctcctccctcccaaagagagagttggtgtgtatggagatggcaacgtcaaggtgtttttcgtggacgaaaatgatgtgggaacatatgcaatanaatcaatcgatgatcctcgcaccttgaacaagacaatatacataaggcctcaagataactgtctcactcagaacgagttgatctcaaagtgggaaacactcactgggaaaagtcttgagaaattccacatacctggtgatgaatttttggcttctatgaaagatttggattttgctagtcaagtaggaataggacattattaccacatcttttacgagggctgcctggcaaacttcgagattggtgacaatggtgccgaggcaactcagctctacccagaggttcagtacacccgcatggatgagtacctgaaacgctatatctaaccggttcaaatttaaagcatctgtttgtcaaatttaaagattgtaatccgcaaatgagcatccctggtcgatcttcccctaccagaattgttcaacgacaatatgcctgctcgaatttatggtactagtagtctagtacatcccctcttgtttgttgactctgttgtactatcaagttggatgggtggaaagttcaaacgatggttagcatgttcatgttcagaccggtattttgg

SEQ ID NO: 14773 - DNA, 3004 bp, Oryza sativa
  ref <308>: DATABASE ACCESSION NUMBER: AK065318
  ref <309>: DATABASE ENTRY DATE: 2001-12-06
ggcgtcgcctcctcgccctcctctcgccgccgctgcaccgcccccgactctctccccagtcaggtcacttcatctaccagcgaggagaccaggggcatcgaatccggtgaccacctcctctccgcaggcgattccggctgcccggacaaaagggtcgtgagccaccaccaccatcttctccaccctgcttggtgtagtgccaaatccactggcaggccgtcgatccggcgtttggtctccccccggtggatccgaccgctcagagcctcgccggcgccgaggacagcgagctcgcgcggcggctcaggggccccgccgtggccatggggaagcgcctcagcttcatgaacgcgtacctcgccgaggactgcaaccccgtcaggtgctgggtcatcaccgccgccgtcgcgttcgtcacgctcatcgtattaggtgtagggagtgttgatgataccccagtagagctgccaaagaaactctacataggtccccaagtgccaaaacaattcaacttcctgatggaaggcatctggcttataaagaacaaggagtcacagctgacagggcaagattttcactgattgctcctcattattttctttcgtcgaggttagcaggaatcccaggaatcaaaccatccctcctggagaaatttggggcacgacttgtgatcattaattaacactgtaaaaccaacactatgaaaaatatgggtaaatcatctactatccaggctttcttatgatctcatagtacctcctcattttttttctgtcagctgtagtgtgtacatctgttgtttatgcttgcatcatcatctcctctgaggcatctatagggttggcatgccaaaaataactcaaactgcttgagttcatataattcagtgtgccttctaaaattgaagaataacctttacatttagcttttgggatagccagctaggtagcgcctaggtccgtgggtggtttgaaatacattcccaaagaaaaagcatttttagcactacaatttaggtgccttcatgaaaaagtctcatctgatcggtacaatctacaggcctagacttttagagagcattaatgatttacaattactgctgtcacatgtgacaatccattgtttctaggttcacttttgccattttttatctatgtgaggttcagcagcatgtaaggagccttggcactgctattacaggtgtgttgagtcggattgtattatatctgaatctcacaaaaaacattgcagaccatcatattttaagacatatgcaagtatatatcatcctatgctcctatgaaatatgtatctatggaatgtgggacactattctttttgttggatataggatagtttacttaccaaatggaagtcaactctgttctaatttaaaattcactgttaatttcattctttatgaatatcacgtggtgctgcgtatatgtaatggttcccaatgtgtaataattatattggcaaaaggtgatatttgtagatatacaaaaagtaaagcttagttaggtgacttcattctttcaatagatagcttttcttttcattttctgaattgaggtcatgagggacatgaatctataaatgtcttgccaacagtctactcttgctgttatcacttaccagggcactcagtcctactgtgctacactgctatgagttcttcttttatcagactgctggctacaagccataacatttgggtttagcatttccattaccttataagctataacaggatggatatatcatatatgtatcatatacatatatatataggcaacagcttgcccaaactgttgtctagcatggtaaaggtacattcttagaaatgtgcaaatgcctgataatatttggtcatatatgttttgtactgaaggagataatccacatcctttttatatatgtatatatcagtaaaataaatagtaatacttcataccacacctaatgtatctattatttcttattttgcaactatatgcctttagcctttgcaatttgtagatggacgagctcatgaacacaaatgcaagtatgaacagttggggagcctcatatgtgagataacgactaatccggaggatatgttttttttcttagtttttttattcttaatgtccacattttgtaagaattctccactaacatgctctgttgtgtgattctcagttctatcttgtggtcacaacactaactgtcaactgctcactcctctcttggctcccatattagaaccaacactatttgttgacactttaacatttggtgatatttatcatgtgcactgtttaatttatgaaatttgtaagacaattctatttcatcaattactgtttctccttgctcatttctaatatgtaaatgatccaaatacatgctatataaaaaaattatatgctgttaaatttatttctcctctgatattggacgggtgcagcgaagcgcgcagttatttctagtttgtttcaaatgccccgttgctagatttgcctggtgtatttgtagagacgcccttggccagagtagaattcctcatgattttgatgactttttctgcttggttctggggaaaacaggcttaaaaaatctagagttggatgccttcttttagctgctttatgttggaattctttggtcaactagacatgacatggtcttcagggataagatggtttcctcacctctaattattcttttttcgtttgattggcttactgttgtagtggaaatcatttctgaagcctgatgacgttgctactctggagtccatggcggcggcattacaagatgctgtcaacggtcttcgtccctcgcgagctggaataggctaacatcggtgttaccggtggtttagttttgcttttggcttttgctggcattctggagtttggagcctgggagcaactactataattgatgtactgtccttaaaagcatcatatacgattttctttttaacacgagtgtcacgtacgattgagtgatg

SEQ ID NO: 14774 - DNA, 2484 bp, Oryza sativa
  ref <308>: DATABASE ACCESSION NUMBER: AK065319
  ref <309>: DATABASE ENTRY DATE: 2001-12-06
gaatcaatcattcccccgcctcatctcctctcctctcctcccccctgcttctccgaccaaagccgcgccgcgcattccgccgccatgtccgccgcgctccacacgctccccgccgtcgccgctggcggcctcggctgtcggtggcggcggccctccgcgacgctacgggcggcgagctccgtggggacggcgtcggtggcggtgtccgtgaatgcggagacgcagcagcagcggcaggtgggtgtggaggaggaggagaagaggagggaggatgcggcggaggtgaggacgggcagggtggtggaggctctctacgacgacgggttcggcggcgtcacggtgaaggactacttcgcggcggccagggccgtctccagcgacgacggcggcccgccgcggtggttctgccccgtcgacgccggccggccggccggtggacaacgcgccgctgctgctcttcttgccaggaactgatggtgttggaatggggctcattttgcaccacaagtctttgggaagggtattcgaggttcgctgcttgcatataccagtgaatgatcgtacgccatttgaagggttgttgcagattgtggaaaattctatcaaatatgagcatgctatgtcaccaaaccgacccatatatctcatcggggactcatttggaggatgcctagcactttcggtggcagctcgtaatccacaaattgatctggttctcatactgattaatccagcaacgtcctttgcaaagactccgttgcagccgatattacctgtgttggaagcaatgccaagtgaacttcatgtcacagttccatatcttctcagttttgtcatgggcgatcctcttaaaatggctatggtcagcgttgagaacaacctttctcctccaaaaactctgcagaagttgtcagatagtctcacttccatgctgcctttgctttcagaattggcagatatcataccaagggatactcttttctggaaactcaagctgctgaagtcaggagcagcctacgctaactctcgtcttcatgctgtacaagctgaagttctacttcttgctagtggcaatgataatcttctgccaagtggagaagaggcagatagactcttcaaatcactgaaaaactgcagagttcggtacttcaaagacaatggccatacactactgttggaggacggtgttaatcttttatcagtcataaaaggagtaaatatgtaccgccgtggcagacaacgggatcctgtgacggattacattcccccgacattgagtgagttcaagaaaacattcgatgaagatcacaaattgtttcaccttgcattgagcccagtcatgctgtctaccctgaagaatgggaagattgttcgtggccttactggtgttcctgaccaaggtcctgtcttgtttgtgggttatcatgcactgatggggatcgagttgagtccattgtacgaggagttcttgagagagaagagaacaagtttccgtggtatggctcacccaattttatttggaggaaaacatgagagttcgcgacaggagctgtctcggttcgatacaatttctatgtacggtggattaccagtcactgcgatcaatatgtataggttgtttgagagaaatcaatttgttttgctctatccaggcggtgtgcgggaagctcttcacaggaagggtgaagcatacaagttgttttggccagaccaaccagaatttgtaagaatggcagcacgttttggtgttactatcataccatttggttttgtaggagaagatgatgttttagagttggtcgccgactacaatgatcaaaagaacattccctaccttcgggaatggattgagtcgattaaccgagaagccaaaagagtaagggatagcgtcaaaggagaggatggaaatcaagacgttcacatacctgctttgctccccaaagtgccaggccggttctactacctatttggcaaaccaatcgaaatgaaaggtatggataatgtcgtcagagataggaaaagtgcaaacgaagtgtatttgcatatcaaatccgaagtagagagcttaatgtcatatctgaagaggaagagggaggaagatccttacagaagcatagcgcagcgtgcagtgtaccaggcatcttggggtgcttctgcagaggtcccaacatttgaaccatgaaggttgggtgatctcgtggtactgtgattgaatgagcatcggcaatcttgtgttccgaagcaaacatggaaagggggtattatctgttggaagtaaatagcattttcagtaggctggctgcaagcctgcaactcttgaatcagttacacattttgatggaacatacccccaaataggccattatacaagtgtatagtaaagtagaacagatatatctgaacagttttttttttgttatatattttaaccaatgtatagtgattgatatacagactagttactgatgaatggaattcttgctc

SEQ ID NO: 14775 - DNA, 2131 bp, Oryza sativa
  ref <308>: DATABASE ACCESSION NUMBER: AK065320
  ref <309>: DATABASE ENTRY DATE: 2001-12-06
gccatccgcggcctccgcggcgccgggttcgcccccacccgcaccctccacatctcgctcgtccccgacgaggagatcggcggcgccgacgggttcgagaagttcgcccagtcggaggagttccgggacctcaatgtcgggttcatgctcgacgaagggcaggcgtcgctgacggatgaatttagggttttctatggggacaggttggtgtggaggctgatcgtgaaggctaccggcgcacccggccatggctcgaagttgttcgacggcgccgcggtggagaatttgatggattgcgtggagaccattgccgggttcagggaggcgcaattcgggatggtgaaatccgggaagagaggtcccggggaggtggtgtctgtgaatcctgtgtacatgaaggctggcacgccgagccccacgggttttgtaatgaatatgcaaccctcagaagcagaagttggttttgattttcgacttcctccaactgaagacgtggaacatatcataagaagaatcaaagaggaatgggcaccagctaataaaaacttaacctacaagctgatgcagaaaggaccaacacgggatttggcaggacgccccatggtcacaccaaccaatgcatcaaatccttggtggtctgtatttgaacaggctatcatatctgcaggtggaaagctagctaagcctgagattttatcttcaaccacggattcacgcttcatcaggcagttgggcattccggcccttgggttttctccgatgacaaacactcctatattacttcatgacaataatgagtttctggaggataaagtattcctaaggggcatcaaagtgtatgaacatattattagagcactgagctccttcaaaggttgattcataataggaaactgctattgcataaagtgtaccattgatgtactttcacctcatgttggaagactggagttgcaggaaagaagccccaaggaggacctcgtcccctaccccggcgacgaccgctggggcgtcgagccccacaacaccatcatgatgatgcagatcaccaaattcacctgcggcgggttcgtgatggggctccggttcaaccacgcgtcggcggacggcatgggcgcggctcagttcatcaacgcggtgggcgacatggcgcgggggctcccggagccgagggtgaagccggtgtgggacagggagaagttcccgaacccgagcatcaagcccggccccctgccggggctgccggtgctggcgctcgactacatagtcctcgacttccccaccggctacatcgacggcctgaaggcgcagtacaaggcgcacagcggcaagttctgctccggcttcgacgtgctgacggcgaagctgtggcaatgccgcaccagggcactcaacctcgagcccggcgccaccgtgaagctctgcttcttcgccagcgtgcgccacctgctgaagctggacagggggtactacggcaactccatcttcccggtgaagatgtcagcgccgagcgagacggtgctgtcgtcgtcggtgatggaggtggtggacatgatccggcaggcgaaggagaggatggcggtggagttcttccagttcgccaaggaggagacggagcaggacccgttccagatgacgttcaactacgagtccatctacgtctccgactggagcaagctcgggttcgccgaggtggactacggcttcggcccgcccaagttcgccggcccgctcgtcaacaacgacttcatcgcctccgtcgtcatcctcaaggcgccgctgccgctcgacggcacgcggatgctcgccagctgcgtcaccaaggaacactcggaggagttcgtccgcggcatgaaggaggacctgccatgaactgagcaaatgaggtgatgagctttttttcttttgttacttgaagctgctgcttgtgagctgaagtgaagggcttcttctaatagggaggggaacacatgctggtgaaaaatgatgttgttgtaagaggcgtattttgtttgtatttatttgtttctttactcttggttaatacggattcgagttatgttcttagacagtttaatatttgtaccatttgatatgggaataaaagaaaagatatactctccatttgatt

SEQ ID NO: 14776 - DNA, 2702 bp, Oryza sativa
  ref <308>: DATABASE ACCESSION NUMBER: AK098923
  ref <309>: DATABASE ENTRY DATE: 2002-08-28
gtccattcgtttgctcgtctctgaccaccattggttcctgaaattgagtcatggctgccaagctagctcgcctccacagtctccgcgaacgcctcggtgccaccttctcgtctcatcccaatgagttgattgcactcttctctaggtatgttaaccagggaaagggaatgctccagcgtcaccagctgcttgcggagttcgatgccttgatcgaagctgacaaagagaaatatgctccctttgaagacattctccgggctgctcaggaagccattgtgctgccgccctgggttgcactggccatcaggccaaggcctggtgtctgggactacattcgggtgaatgtaagtgagttggcagtggaagagctgagtgtttctgagtacttggcattcaaggaacagcttgttgatggacacaccaacagcaactttgttcttgagcttgattttgagcccttcaatgcctccttcccgcgcccgtccatgtccaagtccatcggaaatggggtgcagttccttaaccgtcacctgtcgtccaagttgttccaggacaaggagagcctctaccccttgctgaacttcctgaaagcccataaccacaagggcacgacaatgatgctgaatgacagaattcagagccttcgtgggctccaatcatcccttagaaaggcagaagaatatctgatgggcattcctcaagacacgccctactcggagttcaaccacaggttccaagagctcggtttggagaagggttggggtgactgtgcaaagcgtgtgcttgacaccatccacttgcttcttgaccttcttgaggcccctgatccggccaacttggagaagttccttggaactattccaatgatgttcaatgttgttatcctgtctccgcatggatactttgcccaatccaatgtgttgggataccctgatactggtggtcaggttgtgtacattttggaccaagtccgcgctttggagaatgagatgcttttgaggatcaagcagcaaggccttgatatcacacctaagatcctcattgtaaccaggctgttgcctgatgctgttggtactacatgcggccagcgtgtggagaaggttattggaactgagcacactgacattcttcgtgttccattcaggagtgagaatggtatcctccgcaagtggatctcccgttttgatgtctggccattcctggaaacatacactgaggatgttgcaaacgaaattatgagggaaatgcaagccaaacctgatctcatcattggcaattacagtgatggaaaccttgttgccactctgctggctcacaaattaggagttacccagtgtaccattgctcatgccttggagaaaaccaaataccccaactcagacatatacttggacaagtttgacagccagtaccacttctcatgccaattcactgctgatcttatcgccatgaatcacactgatttcatcatcaccagtacattccaagaaattgctggaagcaaggacactgtggggcagtatgaatcacacattgcattcacccttcctgggctttaccgagttgtgcatggcatagatgtttttgatcccaagttcaacattgtctctcctggagctgacatgagtgtctacttcccgtacaccgaggctgacaagaggctcactgctttccaccctgaaattgaggagcttctctacagtgaagtcgagaacgatgaacacaagtttgtattgaaggacaagaacaagccaatcatcttctccatggctcgtcttgaccgagtgaagaacatgacaggtctggttgaggtgtatggtaagaatgcacatctcagggatttggcaaaccttgtgattgtttgtggtgaccacggcaatcagtccaaggacagggaggagcaggctgagttcaagaagatgtacggtctcattgaccagtacaagttgaaggggcatatccgctggatctcagctcagatgaaccgtgttcgtaacggggagttgtaccgatacatttgtgacaccaagggagtctttgtccagcctgcattctatgaagcgtttggtctgactgtcatcgaagccatgacatgtggtttgccaacaatcgcaacatgccatggtggccctgctgagattattgttgatggggtgtctggtctgcacattgatccttaccacagtgacaaggctgctgatatcttggtcaacttctttgagaagtgcaagcagggttcaacctactgggacaatatttcacagggaggtctgcagaggatttacgagaagtacacctggaagctgtactctgagaggctgatgaccttgactggtgtatacggattctggaagtacgtaagcaaccttgagaggcgcgagactcgccgttacattgagatgttctatgctctgaaataccgcagcctggccagcgccgtcccattggctgtcgatggagagagcacatccaagtaatggaggggaaaatatgcatcttcagcaggagaagccgtcagctgcattcgaatttgataattttctgtagttgtcatttggcatccatgtttgccatggatgtgtactatgtctaaggtttcagtacttttgcgagattttgggcagtgcttgcctcaaataaacgccggttcctggtgtttatcgttcagaattcaatgcaatgttttattgccgcgcttcctc

SEQ ID NO: 14777 - DNA, 1852 bp, Oryza sativa
  ref <308>: DATABASE ACCESSION NUMBER: AK065321
  ref <309>: DATABASE ENTRY DATE: 2001-12-06
gactcttcctactacaaaaaaccaaaccatcaccacaaaaagcatcaaggcgagctcgaatcccggcggcggcggcggagtagagccatggcgtgctgcggcggcggaaggggggagggggcggcggcgacggagtcggaggcgtacctggagggagaggcggtgagggaggcgcgggagctggtggcggagctgtgccgccacttctacggccaagggtgggtcaccggaacggggggcagcatcaccgtcaaggccaacgacccggcgctccccctcgccgatcagctcatcgtcatgtccccctccggtgtgcagaaggagaggatggtggcagaggacatgtatgtgctgtcagcagatgggaaggtgctctcctcacctgtatcaaagccatggccaaacaagcctccaaaatgtactgactgtgctcctctgttcatgaaggcttatctgatgagaggagctggggctgttattcatagccatgggatggaaacttgcattgcaaccatgcttgatcctggtgcaaaagagtttaggatgacacatatggaaatgattaaaggaattaaaggccatggttaccgtgacgaattggtggttcctataattgagaacactccttatgagtatgagctcactgactcactggctgaggcgattgcagcataccctaaggcaactgcagtccttgtacggaaccatggaatttatgtatggggtgattcctggatcaatgccaagacacaggctgaatgctatcattacctttttgatgctgccatcaagctctatcaattgggtattgattggacaactcctgagcatggtccaataaacagtgccaaaagaccacgcagtgttctaagctctagtattccaaatggatgccctgattccaaatcatcaaagcattgtgttgttcttgacattgagggaacaactactccaatatcatttgtgactgatgtgatgtttccctatgcccgtgataatgtgcgaaagcatctgacttcaacatatagttctgatgaaaccaaagaggacatcaaactattgcgcatccaagttgaagaagacctgaaaaatggaattgttgggtctgttccaattccacctgacgatgctgacaaagaagaggttatcaatgcattagttgctaatgttgaatcgatgattaaagcagacaggaagattacgtcgttgaaacaactccagggccacatatggaggactggttttgaaagtaaagaactgcaaggagttgttttcgatgatgtccccgaggcgctaaagcactggcatgctagtggcatgaaggtctacatatactcaagtggcagccgggaggcgcaaaggctattatttggcaatacggcctatggtgatctgcgacaatacctctgtggtttctttgacaccacaaccggtaacaaaagagaaacaaggagctactttgagatttcgcaatcacttggggtggacagtcctgctcagatcttatttatcaccgatgtcttccaagaagctgttgctgcaaaaagtgcaggttttgaggtaataatctccattcgcccgggaaatgctccgctccctgagaatcatggtttccggactatcaagtcgtttagtgagatctgaagaaggtacgcaaagacaatgtcaggagtgctttgatggcgagctacctagcatatgtaagaacaatgcaaataataaatggaaaatccggaatggtggcaaaataaataaatttgtaaatgtgggcatattgttgcattattgtgccatccgtcgacggttttgtagctcttttttagcaaagaggaataataaaattgttgttgcc

SEQ ID NO: 14778 - DNA, 2208 bp, Oryza sativa
  ref <308>: DATABASE ACCESSION NUMBER: AK065322
  ref <309>: DATABASE ENTRY DATE: 2001-12-06
gttttctccctccaaggctccaacaaggccacaactcgcgtttctcgcacgcacgcagaggaggagcaatcgccggcggaggagaagcaggagcagtcggcggcggaggcgtacagcgggggagcagtaggcagcggatgcgcacagcgggggatgcgacggacggccaggcgaagcaggcggcgtcgcacggaagggttggaaagatgacagataatctaataggtgattgctcaacaagctcaaagaaaaggaagaaagcttgcaaaagtagaggagagacaagaaaattgcatgaagataacatttttgaagaggagtttggcagcttgaagaactctggtcaaggagcatggagtgaactgagtaaagtagtagcgtcaaacttatctgaaagtgttgtctcgctggcttcattcgatggggatattatgcattctgcatgcacaggcgtagttatcaaaactgatttatttggcacaagttacctgacttcagctagcctgattagatcttttgatgatgaaagcaagatcatgccatttgtgtctattgaagtacaccttccaaaaaaacaagttgcccatgggtggttatacaagtatgacttgcaatacaatattgctgttattgaaaccaagttcttccctggtctccgagcaataaatcttgagcatcagctgcaatttgagtctcacagtaaggtagttgctgtggggcgctgcttcaagtcaggcaaattaatggccaccagtggggtgctgactgacgatccaagcggagtttatcggaaagaactcatgatctccacgtgtgaaatcaccatggctggggttggagggcctcttattgatttggatgggaactttgttggcatgaacttttatgcgaagaaaaggacaccattcctgccaaggagtactattaccgaatgcatggctaatttcaagacataccggggtgagcttaagaaacttgatagcacaactggaaggagcacaaatgagatacaagaatctcctgcaacctccaagtcctatttggaaggcttggaaggatgttcggactcttttgagttacgtaactccagtaggaaacctgagaatgagcaggagtcgtcttcttctagtgattcagaagaaaacccaattgagaatgatccattttttatggagacggcctcccctttcttgccagttgctgatggtgatgaatttgggaaatttttaatcaaggaactaacgtcccaaggttatcctttgccagctgtccttgacggaggcatgcgtttggttaatacttttgaaaatgaatttgctgatgatatctggagtaaactcaccaaaaaagttgcttcaaacatgtctcgtgttgttgtctctcttgcttcattcaatggcgaagaacggatttttgcttgcacaggaatatttataggctgcgatgaatccaacacaaggattctgacttcagcaagtttggttaggatttctgatgatgaaaacaggattaatgataacttgaagattgttgtacaccttccaaacaaacaacaaactgtagggacattgcaacattatcatctgcattacaatgttgctattgtcagcatcaaaggttttcgttgtcttcgtacggaagaatttcatgatccagggctaattgagcgtaaggaggtattatctgtaggacgcgtcttcaagtcagccaaattaatggccacaagtgggatattgactgacaaaccaagcaaacttgactgcaaagaacttaaggtctccacttgtagaatcagtaaggctgggattggagggcccctgattgattgtcatggtaatttcgttggtatgaacttctacggtaggaaagagactccgtatttaccaagggatacaattctgaaattattgagctattttgatggagaaggggacatctctcctgagattatggacaaccaaaacagatggcctgtgcccaagttacgttggcattatccttccttctccagccatcgcaagatagagccgcgcagatatataaaatattagtaatttatatccatgcctatttagtcttgaacctgttgcattggttgctatctactatcttgaactcctgtgttgtgcaagggcagacctgacaaagcacttttgaaatgccgtaacactggattacttgaaactttatgaaattatgcttgtacct

SEQ ID NO: 14779 - DNA, 1833 bp, Oryza sativa
  ref <308>: DATABASE ACCESSION NUMBER: AK098924
  ref <309>: DATABASE ENTRY DATE: 2002-08-28
ggcctcctcctcctcctccctcctctctacccacccaccctctcgccgtcgcagatccgatccaggaagagctcgccgccgccgctgccatggcgctctccgtggagaagacctcgtcggggagggagtacaaggtgaaggacctctcccaggcggacttcggccgcctcgagatcgagctcgccgaggtcgagatgccggggctcatggcgtgccgcgccgagttcggcccctcccagccgttcaagggcgcccggatctccgggtccctccacatgaccatccagaccgccgtcctcatcgagaccctcaccgcccttggcgccgaggtccgctggtgctcctgcaacatcttctccacgcaggaccacgccgccgccgccatcgccagggactccgccgccgtgttcgcctggaagggggagaccctcgaggagtactggtggtgcaccgagcgctgcctcgactggggcgtcggcggcggccccgacctcatcgtcgacgacggcggcgacgccacgctgctcatccacgagggcgtcaaggccgaggaggagttcgagaagtcaggcaaggtccccgatccggagtccaccgacaacgccgagttcaagatcgtgctcaccatcatccgcgacggcctcaagtccgaccccagcaagtaccgcaagatgaaggagaggctcgtcggagtctccgaggagaccaccaccggtgtcaagaggctctaccagatgcaggagaccggcgccctcctcttccccgccatcaacgtcaacgactccgtcaccaagagcaagtttgacaacctgtatggttgccgccactctctccctgatggtctcatgagggctaccgatgttatgatcgctggcaaggttgccgtggtctgcggttatggtgatgttggcaagggctgtgctgctgctctcaagcaggctggtgcccgtgtcattgttactgagattgaccccatctgtgccctccaggcccttatggagggtctccaggtcctcaccttggaggatgttgtctcggaggctgacatctttgtgaccaccactggcaacaaggacatcataatggttgaccacatgaggaagatgaagaacaatgccatcgtttgcaacattggtcactttgacaatgagattgacatgctcggccttgagacctaccctggtgtcaagcgcatcaccatcaagcctcagaccgaccgctgggtcttccctgagaccaacactggcatcattgtccttgctgagggtcgtctcatgaaccttgggtgcgctactggccaccccagttttgtcatgtcctgctcattcactaaccaggtcattgctcagcttgagctgtggaaggagaagagcactggcaagtacgagaagaaggtgtacgttcttcccaagcacctcgacgagaaggtggccgccctccacttgggcaagcttggtgccaggctgaccaagctctccaagtcgcaggctgactacatcagcgttccagttgagggtccctacaagcccgcgcactaccggtactaggctgcccagcacgactagcagctgtggcatgagaagtgtcaacttgaagttcgccatgacgactctggagtatcctgctttgttttcatcatcttatatgccgtcccttaggaggatttgttgtggggtttatggtttgagactggtgaaggggaggaatgggaacccgtttgcttttgcccaaaaaaaatggggtaattgggtggagttggggaggtgtgctttggcaaaaacagttttgtcttgttgactctacttatctgaaatcatttgcaagcgttttgat

SEQ ID NO: 14780 - DNA, 1712 bp, Oryza sativa
  ref <308>: DATABASE ACCESSION NUMBER: AK065323
  ref <309>: DATABASE ENTRY DATE: 2001-12-06
ggtgttcccccatttgcacacccaccccccccttcactcctctcctcttcggccgctgccccgctactcgcttctccgaggcaccaaccggcagccatgagggagatcctgcacatccagggcgggcagtgtggcaaccagatcggctccaagttctgggaggtggtctgcgacgagcacggcatcgaccccaccggccgctacgtcggcacctccgacctccagctcgagcgcgtcaacgtctactacaatgaggcctcctgcggccgcttcgtgccccgcgccgtgctcatggacctcgagccgggtaccatggacagcgtccgcaccggcccctatggccagatcttccgccccgacaacttcgtcttcggccagtccggcgccggcaacaactgggccaaggggcactacaccgagggcgcggagctcatcgactctgtgctcgatgtcgtcaggaaggaggctgagaactgcgactgcctccaaggtttccaagtttgccattcccttggaggaggcactggatctggaatgggcacactcctgatctccaagatcagagaggagtaccctgaccggatgatgctcacattttctgtcttcccttcaccaaaggtctcagacacagttgttgagccttacaatgcaactctctctgtccatcagttggtggagaatgctgatgagtgcatggttcttgacaatgaggcactttatgacatctgcttccgcaccctcaagctgaccactcctagctttggcgacctgaaccacttgatcagtgctacaatgagtggagttacttgctgccttcgcttccctggtcaattgaactctgacctccgcaagctggccgtgaacttgatccctttccctcgcctgcacttcttcatggtgggctttgcgccactcacctcgcgtggctcgcagcagtatcgcgccctcactgtccctgagctcacccagcaaatgtgggacgccaagaacatgatgtgtgccgctgacccgcgccatggccgctacctcacggcctccgccatgttccgtggcaagatgagcaccaaggaggtggacgagcagatgatcaacgtccagaacaagaactcgtcctacttcgtcgagtggatccccaacaacgtgaagtccagcgtgtgcgacatcccgccgcgcggcctctccatggcgtccaccttcatcggcaactccacctccatccaggagatgttccgccgcgtgagcgagcagttcaccgccatgttcaggaggaaggccttcttgcattggtacaccggcgagggcatggacgagatggagttcaccgaggccgagagcaacatgaacgaccttgtctccgagtaccaccagtaccaggatgccaccgccgacgaggagggcgactacgaggacgaagaggagcaggtccccgaagacgagtaatctcgccggagtttctcctgggatcccatcttgagtgtcgcctgttgtgtcctaccctttgggcaatctttattattgtttcggtatgatgatgcttaattggttatgtgcttttgggtaatgtagtagtagtacaatgctgtgtggtccgtagcgccgctgatgctactgccactttaatccgtttcacctaccagaccatgtttggattcgtatgctatcgcatatgtttggggagtgtattggattcttgtactggttttgattgctcc

SEQ ID NO: 14781 - DNA, 1934 bp, Oryza sativa
  ref <308>: DATABASE ACCESSION NUMBER: AK098925
  ref <309>: DATABASE ENTRY DATE: 2002-08-28
ggtagtcatctctcgctcgcacacaactaataaccaacgaaaccacgagcagcggctgatcggtaagcggtagtggtagtagtagtttcgtttgtacgttgacccaagcagcagatgccaattgcagcagccgcggtcacctcgccaccggccgccgcgcaggtgcacggtgtcgtgccaaggcatgcctcgccgacgccacagcagcgggcggcgccgcggcgggagcagtcgccgctgaacccgagctcgcagtcgatccggtcggcctcctccggcaccgagctcgcaggttccgcggcgacggagacctcccgggcgcacatcgccaaccttgaccgggttctcgggaagccaccgcaggtgccgaggccggcgagccacgcggcggcgagcaagcaggagcggcagcagcaggacggggagctggagccgctcaacgtcaggcacggcctgctcaacgcgctcaacctgtccttcttcgtgcccatgcccgggatgcgggcccgcaccgccgccgacgagcacatgtcgcctcgcagcctcatgcacatgcagcagctcctctccgccgactccccgcgcgcctcgccgaggagcaccatcgcgccgcgctggcgcagcctccacggggaagacggctgggccggcctcctcgacccgctcgactccgacctccgccgcgagctcctccgctacggcgacttcgtccaggcggcgtaccaggcgttccactcgctgcccaccgcgtcggcgaggcaccgcgggctcatgctccccgaccgctcctaccgcccgacgcggagcctcttcgccacctcggcgctgtccatgccgccgtgggcgaagcgccccaacacccccgagtggctcacgcagcagtccaactggatcggatacgtcgccgtgtgcgagtccgagcgggaggtcgcccgcatgggccgccgcgacatcgccatcgtgctgcgcgggacggccacctgcctcgagtgggcggagaacctgcgcgcctcgctcgtgcctctcgacggcgagagcggcgaaggcggcgggcaggaggagcccaaggtggcacggggattccggagcctgtacaagacggcaggggagaaggtgaagagcctctcggaggaggtcatgggcgaggtgcggcggctcatggagaagtacaagggcgaggagctcagcatcacggtcgtcggccacagcctcggcggcgccctggcgctcctcgtggccgacgagatcgccaccaccgtccccgacgcgccgcccgtcgccgtggtctccttcggcgggcccaaggtcgggaacgccgcgttcgtggacaagctccagaagaacggcagggtgaacgtcctgcgcatcgtcaacgccggcgacatggtcaccaaggtgcccggcgtggcgccgcgcctgccgctcaccaaggagcagtaccagcacgtcggcgcggagctgcgcatcgacagcaagaactcgccgtgcctccgccccgacgccggcccggcgtgccgccacgacctggaggcgtacctgcacctcatcgacgggttcacggggacgggccgcccgttccggcacgacgcgcgccgcagcgtgatccggctgctgcagttgcagagggggaacgtgaagaaggagtacgtgaaccgcgcccgggagctcggcgtcgacccctcggcgccggtggacgtcggccggagcatggcgtacgggaactgcgccgtcgcgagcccctcctcgtgagacgacgagattgacgtcttcttccaagagcccttaattatgtaaatttttgtagaagcagaccaacaattctttcgttagtcaggggtgtcagcgggaaaaaagattttcccttgtcatttgacgtatgtatgtacagtacataaaaactattatacttgcaaaaaaaaggaaaaacattatgt

SEQ ID NO: 14782 - DNA, 1517 bp, Oryza sativa
  ref <308>: DATABASE ACCESSION NUMBER: AK065324
  ref <309>: DATABASE ENTRY DATE: 2001-12-06
gggaaggggagagtagtagaggttgcgtcctactgctacttcttcctcctcgatcttcctctacttgaggagagagagagagagagagagagagagagagagagagagagagagagttagttttgggtggatttgtgatggggtcgaacgagcagatccaccgggacaagctcatcatcgacacggatcccggcatcgatgatagcatgacaatccttatggcgttcagagctccaactgtggagatcatagggctcacaaccatatttggcaacaccaccacaaagaatgcgactcagaatgcgctcttgctgtgtgagagagcaggacatcctgaggttccagtagcagagggcagcgcagagcctctcaagggaggagagccacgtgttgctgactttgttcatgggtctgatggcctggggaatttgtttcttcctgcacccactagtaagaaggttgatgaaaatgctgctgagttcatggttaataaggtctctcaatttcctggagaagtttctatactcgcattgggacccctgacaaacgtggcgctggccatcaaaagggacccttcctttgcaagtaaggtgaagaaaatagttgtactgggtggtgctttctttgcggctggaaatgtcagcccagctgctgaagcaaatatatatggagatccagaagcagctgacatagtttttacctcaggagcagatgttgacgtggttggcattaacataacaactcaagtctgttttacagatgaggatctcctggagctaagaaactcaaaagggaagcatgcacagttcttatgtgacatgtgccagttctatagagactggcatgccgaatccgatggctttcatggaattttcctccatgatcctgtgagcttcactgccctagttcaccctgagtacttcacgttcaagaagggtgttgtgagagtagaaacccagggcatttgcactggtcacactttaatggaccaaggattgaaaaagtggaattcagagaatccatggtctggctacaagccaatctcagttgcatggacagttgatgtgccaaatgttctcgcattcgtgaaggaactcctcatggctccatgagcgattttacgcctatttcttgtgcttttggatacacaagcaaatttgacaaatacagagttgtgattagatcctggaaaccggaagctttctattcccctatgaataagaagatatggttgttttgatttcttgagttcaagtctggtggctcaaaacaacctggttccacctaagaacagaataaggactggtttgttctgggctagtaggcatcagacctgaggaccaaaacaatctgttatcttattatatgtaataggaggattagaagtttgcttcctagctacaagcaaaatatatgtagtaaattgaaattctgcatacgaaagacagcattattacaaactgtttcagacatttgtgccacagatatacatttcaaattcggaaatcagtttgccg

SEQ ID NO: 14783 - DNA, 1596 bp, Oryza sativa
  ref <308>: DATABASE ACCESSION NUMBER: AK065325
  ref <309>: DATABASE ENTRY DATE: 2001-12-06
gcgacagacagacagcccaccacaccacaccacttctcccaccatcgatccaacaccccaactgctgctaccacctcccccatctccgccgccgccggcgagctcgcccacgccctcgacgccatcaagtggggcaccgactacttcatcaaagcccataccaagccccacgagctctgggccgaggtgggagacggcgacaccgaccactactgctggcagcggccggaggacatgacgacgtcgaggcaggcgtacaaggtggaccgccgccgcccgggatccgacgtcgccggcgagaccgccgccgccatggccgccgcctccatcgtcttccgccaatccaacccgcactactcccacctcctcctccaccacgcccagcagctgttcgagttcgcggacacgtacagggggaagtatgacagtagcatagcggaggtgaagagctactacgcgtcggtgagcgggtaccacgacgagctcctgtgggcggcgctgtggctgcaccgcgccaccggccgcgccgcctacctcgactacgccgtcgacaacgccgacgagttcggcggcaccggctgggccatcaccgagttcagctgggacgtcaagtacgccggcgtccagatcctcgccgccagactgctgatgagaggggagcacgaggagaggcacagggggacgctggagaggtacagggagaaggcggagcactacgtgtgcgcgtgcatggggcggaacgcggccggcggcgcggacgccaacgtggagcggagccccggcgggatgctgtacgtgcggcagtggaacaacatgcagtacgtcaccaacgccgcgttcctcctctccgcctactcggactacctcgccggcgccggagacggagacggggacggcggcggcggcgtcgcgacgtgcgtgggcggcgggggcgcgggcgccggggaggtgttcgcggcggcgagggagcaggtggactacgtgctggggagcaacccgcgcgggatgagctacctcgtcggctacggcgagaggttcccggcgagggtgcaccaccgggcggcgtcgatcgtgccgtacaaggacagcaaggagttcatcgggtgcgcgcaggggttcgacgactggttcggccgccggggcgccaaccccaacgtcgtcgtcggcgccatcgtcggcggcccggaccgccgcgacaggttccgcgacgaccgcgagaactacatgcagacggaggcgtgcacgtacaacacggcgcccatggtcggcatgttcgccatgctcaaccggctgtcccggcaagagtcgccgtcgacgacaacgacgacgacggcgacgacgagtagcccggaaatgggcctaagtgtaaatagatagtcacacgagggggtctgtacaattttgcccctattcttttgttcattctttgtagatgggaggggctctctccccttcgcagggaaaaaaaatattatttgtatacgagggaaaaaaaattgggaggtggcatttggcaagcaaatgcaaatcccctcccggtaaatatcagagaaatcaataattaattaattatataagtcaagtagtttgactacc

SEQ ID NO: 14784 - DNA, 3579 bp, Oryza sativa
  ref <308>: DATABASE ACCESSION NUMBER: AK065326
  ref <309>: DATABASE ENTRY DATE: 2001-12-06
gaacaagggaagatcgttgttagctctgtcggtggtctcctttcctttcctcggtttggccaattgtgtgttgatgcgcctgccgcactaggaaatcgacggtgctaaaatcgtttttctacccaatgtccaaccgagaaattgtttatgtttagatttagtgcagtatcaatttgaaccgcactagggaatcgacggtgctaaaatcgtttttttacccaatatccaacttccaaacttctaatttcgtttgtgtattgacgaatgcgtgccctgtgttagacatgagcagacagcatttggaggatttactaccatacacaaatctgaacaattttaacaaaatgtgttcgcactccaaaacatgatttatgatgtaatacactgtttctccacaacattgacttcttgtgtgaattcttaatggtgatagcggtggatttgttgtgtgaattcttaatggtgatagcggttgatgctgctgagcttagcagatccgtgtgcttgattattgtttcgtttcgtagtctcacattcaggatcagttattttgtttcttaaggctactcttattagccgtctatctaaattttaacactaggaatattgatgtgctcccacatttatctaaaatactcaatgtaacaaaacaacgtgtctgaatttgcgatagcctgagcttaagctcaccagttaataatattacacatgggatgagagcaatcaagaaatttcgaagatgctggtggacaaataattcagtgttccctgattctaatacagtatattgccattatctcttggttataattattttagtcggtcactagatatgtgaagtagtggtcttttcggtgtatttgatttaattcaatatgccaaatgatgtagctaatccatcattgttgtgtccacatcactttccacaccttgttttttttttcaataattcacttgtcgatggaccttatcaaccacataaagttcactatgtcatggaagcatttattggagattgggatgggatgcctctcaggcttagtcaactctgctggtttattcgtccatagctgcttacctgaatatttctatagaatcaattagaagagaggcagtattaatctagtcaggacctgccaggctgccatccttgtctaagccgccgtttgtaaactgtgggtgcatattaaatgctaactgttttgtactatgccttttcttcccaaggcatagtaactttaagttggcaatgatggttaatcttaatagtattgactttgcacacataggacataagctgtttcatttccttgctgacaaaagttccccatttatcctgatagataatacttgtagcgtagggataagaatgtcatttgtgataaaaaataaagggcagtgtatctagttcctattgaaaaaattggataatccattccatgactgctgactcagcctgctaggaaagatgatggattcttccttgatgtatcaattgattactaaccaggataatattaagtagtttttttctggcatatagacacggagttttggagctttacctaacatctgcaccactcttcagacttgttaaatgtatttggatagacttcgctggacaggatgatgtggtgtgggccaaaaagctgcattttacctggacccgcttagtttcatataaatctgttggtaccatgtggcttgcgttgttccttccattctcatttctggtgtgttttaagtttttatttctgtacaatgattagtaaagtgggccccactcagtgatgctttacttaactacatgtcatatgcattcctagtgacatatttttgtttgttgaactgcagtgctgtgtttgctcgcaagggtcatcgtgagaatggaccagatttacatggctgctgtcaataacaagacttcattgcctgatgatgagccaatgaagaaaattagtggagatatgcctgtgactgctggaaacgcttgctttgactgcaacatttgccttgattttgcagcagagccggtggttactctttgtggtcatctctactgctggccttgcatctatgagtggctatgtccaggggttggatcgactgccagtaacaacagcagtttggcaaggcgacagtgccctgtgtgtaaggctacactctccccagacatgctggtgccattgtatggtcgtggggggagtctgaagaaatcactgaatggtgtgcccattccacgacgaccaaccgtgcagcgggaggcggttgagcatcaaaacacacacaataacatcgatgatcggcaccatgagaacatggaacccagccctccaccacaaccgctgcggcattcgagccatcattccagtgcaactgaatttgattttatttacccgccatcaccaattgggcgtggcttgatccactcgacggctggtggtgtgcttggggggatggcagtggcggtgctaccatgggcattccgtggccaggtgccaccgagcatgttcatgagtccccactatgtcacggcacacaatatgagctctagagcgaggagacatcagatggaagttgagaggtcactgcatcagatctggttcttcctcttcgtttttgtggtgctgtgcctgctcttgttctgaagcaagatggtggtgtattccttttgtaaatacgggaaggcaagacactaatgggtggatgcatatggtaaaagagggtggttaacactgttggtctgtatcgataagcatgtgcctaacccctcatccttccctctcatctcctaccgccacaacgtacgcctagctattcggctccaagcgtggtggtctcaccgcctcacctgaggtgaggtgattccacccgccgccgccggcagccatgcttccaagaagccagagcatcttccacctcggcgaggagggtggcgtcgtccactgccaccgcggcggtaaccacctcgtcgcggcgtccatggggatgggcggcgccggtggacactacggctccggcacgcgcggcggcggccgccgcgcgcgcgagcgcgagcgcctcgtcgtcgggctccagatcatcgtgcacagccagcaccaccacggccggcacgcgcacgcgcacgcggcgagcgtagtgctcaagcagatggtccggccgcgggccggccggagcggcgaggtctggctcgccaccacagccctcaccgtgcggcggcgcccgtccgtggcaggccaaggaagacactagccgtagcctagagttattactatgtagtgttaaagtacttactgagaagaggagcacgtactactactgttcatggagaactttgagaggaagttattagccaggtatgtcaataacagaaggactttgcatatgtgtatgcatgcataagaagaagaagatgtgataagagagttaatttgagtggtaatgaagagaggttaatcatggagtagtagaaaggggttgatcagaatattgggtcagtattttttgtttctattttttgcgtgttgtaatcctagaagggatatgcaacttgttgttagatctgtgtgtttgtttgtt

SEQ ID NO: 14785 - DNA, 1387 bp, Oryza sativa
  ref <308>: DATABASE ACCESSION NUMBER: AK065327
  ref <309>: DATABASE ENTRY DATE: 2001-12-06
ttgtcgccgtgatgcttcgtcttcccactctcctccccctaaaaccctcgcctcccaccaccggcttaaaccccatccacggccgccgccatggccaccaccccagccgcctcctcgcctcctccgccccgccgccgccaccaccacggcctcccaagcccgagccccgtaccagccacgagaacctaggcgacgacacccccgatttccccacaaccaagccccgcaagccgcgccgcgggcgccggagcgaggcggcggcggtggaggacttcgtgcgtggccgcctcgagcaggtcttcgcttccatccgggagcgcgaccccgaagtcctcgaaggcaagggcgacatcttgaagcgaaaggaggagctctccgacgaggagggaaaagaggggactggtgaggaagagggggagctgaaggctgtggttgaggaggaggatccctcctggcctctggacgccgacatcgggtgggggattcgggcgtcggagtactttgacaagcattccatcaagaatgtgacggtggatggtgtggagatcgattgggagagggaggtcgaggagggatgggtcaaagagatcaactgcttggagtgggagagcttcgccttccaccctagccccctcatcgttcttgtcttcgagcgctacaacagggcagctgacaattggaagtttcttcaagaattggaaaaggcggctaaagtttactggaatagtaaagatcggctacctcctcggacagtgaaggttgatatgaatattgagagagacctggcatttgcacttcaagtaaaagaatgcccacaattattattcctcaggggaaacaagatattatacagggaaaaagaactaagaactgccgacgaactagttcaaatgattgcccatttctactacaatgcaaagagaccatcttgtgttaatcctgaagctattgcacctccgtgctaatctcctgcatttcagcgcttatgtattgagacagtgccttaattctcaactcttggaaaatagtctaaatagaccagtgtggttatgatgcttgtatctgtaataaatgtatcacttgaagaggaaggagagaaacctcttactggctcatctcaagttgggagggggtcaggtatcaactatgtcatatattttggtatgctcatgtttttagctgtacactttcacctttgtactgtactctaacaaaacatacagttcatcaaatttctagatagaacaggagggaatgctagcttaattatctgcgtggccatcctgttaaggaggttgtaaagtcgattgtaaacttttgaggcgtagtgtaatgtcatttcacgccatagatgcaaaatgaaggcaggggggtcaacccatttgtc

SEQ ID NO: 14786 - DNA, 3042 bp, Oryza sativa
  ref <308>: DATABASE ACCESSION NUMBER: AK065328
  ref <309>: DATABASE ENTRY DATE: 2001-12-06
ctctctttgtcattcttgttactccagtatgtgtttttgtaagatccatctatgattatttttattgcaaggaaagaaaactcaagatactctatcacttattcaggtttattatgccgcttgacctgggagcaaaaggtagttgtcacataggtggcaacatttcaactaacgccggtggcctacgtttcatacgttacggttcacttcatggaagtgtacttggtcttgaagttgtcttggccgatggaactgttctcgatatgcttactactttaaggaaagacaacactggatatgatctgaagcacttatttattggttagtattggatacaataactattttcaactgttctctatatgcttacattgattattttcaatggttagtaatgaatacactaactaattccagctgttcaggaagtgaaggctcactaggaattgtcactaaaattgcaatacttactcctgcaaagctaccatcaactaatgttgcatttctttcctgcaatgactacataagctgtcaggtctggataggcggttcgtttctaggctctgtttgccctttatcttcatgtgtatgtgatcttgaagatagtgatttcttactgtttgtgtatccagaaattattactggcagccaggaggagcctgggtgagattctctctgcatttgagttcatggatcgtcattgtattaatctggtacttacatgagcaaatttttacgcatagtacacatcatagagaagaaattacatgcaaatatgtttatatattcattttaagtcccatgttgacattctgtaaagtagggaagttgtgagttcattaccaattttgatcaatttaatgtaatttattatatattgggttccttattcatgcaattagcagacgagaagaaactacttgcgcttctttattgtgttgctctacataagaaatacgtttcactaatcatgtatgcttgtgtatatagattggcttttgatagtttatttggttttgaaggctatgaaatatttggaaggagttcacaatcctctgcctgtatcaccgttcaatttttatgttctaatcgagacgacaggaagtgatgagtcatatgataagtaagtaagctcttgtagctaattctttattaccgtaataaactaacaatgtcagtagttgctactgctaattctaagttaccactgattttatctttaggagaacactactgcaatttaacttggttgttttcttcctgtgacgttttgatctatttaagactttcatcaaggtgtagggtgtcttttttctcttcttttagtgctttttgggctgcaaagaaagtgatttgagaaaaatgtggtcctgagtgtataagccaatggtccgtggagcatattctagtttgaatttttaacatatcagtcattatgaactgacatttactatttctacttgaaataacataaatgcagctatgctggaaaacaatttatgtagatttccacatcgcagaggtgctatcatccagtcattatgttgcatttcttttgtagagccaaacttgaagcttttttgttgcgttcaatggaagatggcctggtagctgatggagttatagcacaagatattagccaagcctctaatttttggagaattcgtgaggtgatcatatgtttagccttatgtgtaatttttctctttagttgaagcatctaataaacaaatgaaaccttacgtccttaccaccttgtaatgcaggtccaaagttagttgtatcaaatgtcctcaccttttaagattgctcgtgtaatcagtctaataatgggcaaaaatcattgaaattagtatgtctttgttgtagggtatatcagaagcatccgtcaaagttggggctgtctacaagtatgacttgtccatacccgtagagaagctatatgatattgttgaagaaatgcgcagccgtgttggtaattgtctacttggttgtgccattaatagtgtataagctactgattacctttcttttgtaggtgatatgggacaagtattgggctatgggcaccttggtgatgggaacctgcatctgaacatcttatcaacaaagtacagcgacaagatgctggcacaaattgaaccatttgtctacgagtggacctccaaacagagagggagcattagtgcagagcatggattgggtctaatgaaagccgagaagattcactacagcaagtcatctgaggcagtaagtccttacgtgttaccttccaacttggcatccaccaataagtcgttgtgtggaaggtctgtctcgaagaattttatgcaagcatgaactgcattttttcttagtgaacaataagtcatcatggactgcttatttatgttttttttcttagtgaacaataagtcaccatggactgcttatttatgttggcaaactacttcaattaagggctgttcgtcctgcttagggcctgtttgtttgttttcttcagagtaatcctcattgtgcattacttgaccaacctaactttgacattgaattctccattaagctctagctatgtattgccatttaattgtgcaactaatgttctaatgttgccaggtgcaactgatggcttccatcaagaagttgctcgacccaaattcaatcctgaacccctacaaggttctcccacagtccgtcctgtagctggaaacggttactacgagctacagaagacaaatcagtaaatacaatcctcgagagaataagatggtgattgcgaagaagttagtcattatggacagagagatcgcgggagagactgcctcactactcaactgatttacaataataaacagttagaacggcactggattgtagccaacccagcaagttaataaatttcaggtgctgtaacagtttcggatgtgctgttgtcggatgtacatgtactcatctccagtatgtgaacctggcaactagaaataaattctaccatgatattctgcttttcttcattcagttttgcgggatgcatacttcact

SEQ ID NO: 14787 - DNA, 2023 bp, Oryza sativa
  ref <308>: DATABASE ACCESSION NUMBER: AK065329
  ref <309>: DATABASE ENTRY DATE: 2001-12-06
gtattaatccatttgtttatatctccctcctcctcctcctctctctctctctctctctctctacgactcccacctccacctccgccatcccaatccgatctcccgcgagctccagatccacctcccgggtcgccgccgagctcgccgcggccacctcctcgccggaatcggccgctcgcgagctccagcccggtgcccgttttcgcgccattcgtgcgtgcgagctagcgagctaagctccaagagctgcgcctcctgcgctgcggtgaggtgcggcgctgtgtgagtcctctcgcattgggcttctggttgctcggatagcttgggaaggtgtcaccttgttagttccctcaaatttcattgggccctggtgtagtaacttcacatcataattaccagagtttgattactttgatggtggtaacttctagatgatctgaacatatggagaggagatagaagtgtcttgagtgttgcagtaggacagcaaggacatgactgtcatgccatctctgcgccaccgggctgtcgccaagaagcccaaatggataatcattcttgtgtcactggtttgttttgtattgattggggcatatgttttcccaccacggcggtattcgcaatgctacctcttcggttctggtgcatgcgcaactttcaaggattggctcccatctgtaacccgcagggagcggactgatgaggagatcatttcatctgtagttcttagggatatccttgcaatgcccatgccagtgtcgaaaaatccaaagatcgctcttatgttcctgacacctggtacactgccctttgagaaattatgggaaaagtttttacagggtcaggagggaagatactccatctatgttcatgcatcacgtgaaaagcctgtacatactagttctttgtttgttggtcgtgatattcacagtgacgcggtagtatggggaaagatttcaatggttgatgcagagaagagactattggccaatgcactggcagatgttgataaccagttctttgtgttgctttctgacagctgtgttccactgcatacatttgattatgtctataattatctgatgggaacaaatatcagcttcattgattgtttccgtgatcctggccctcatggaaacgggaggtattctcctgagatgctccctgaaattgaggagaaagacttcaggaagggtgcccagtggtttgcaattacacgaagacatgctctactgattctggcagacagcctttactacaaaaagttcaagttgtactgcaagccagcagacggacgcaactgtattgcagatgagcattacttaccaaccttattcaacatggtagatcctggtggaattgctaattggtcagttacacatgttgattggtctgagggaaaatggcatccgaggtcatatagagctgcagatgtcacctacgatctcttaaagaatataacagctgttgatgaaaatttccatgtaacaagtgatgacaaaaaacttatgacacagaagccatgcttatggaatggatcgaagagaccatgctatctttttgctaggaagttctaccctgaaactcttgacaacctactgaagctattcaccagctatacatctgtttgagctccatcaaattctttgtccttggcatatggtctcaaaatcccatgggcttttttttgctgtttctgtaaattgcaaaatcaatacctagactcttacacatggatctggacctagagactacaagactacacacgcagatcgtcatcgcagcaactgtgacggcttggagttcttagtcactgggaagggctgtggcgaaatttgtagcaatgacactgccctcactgtaatttattgtgctctctgtaatttttccattgatggttcttagtccattgactccattcctgttgaagaacagataattttccattttgtcataccattattatatgatccattttttatatagtcagataacaagagaagtacctcatcctatttttgcc

SEQ ID NO: 14788 - DNA, 2589 bp, Oryza sativa
  ref <308>: DATABASE ACCESSION NUMBER: AK065330
  ref <309>: DATABASE ENTRY DATE: 2001-12-06
ggggtgtacacatcatcctcatcaatgagtagagagaagagtagagggtagtagagagccaaaaaaaatcgatcatggagaggccatgtggagctcgccaagtgtgagcatttaccttcttggaaagaatcccaagctagaaatccacagaattatctgctctcaaacattggctcatctgctcaacaatcctatcctcctcctcctcctcactggcagtgattcccccaaccccatttctctctgaattgggcttgtttctttgctgaattattattttgctcattccactctggttgcttgttcagagactccatgtacaattagttgaccattcttctagttagcttctcttgtgttcttggagttggagctggtctgtccatgtgagccatgttgcagattgggctagctttgggagcaagagagtggtagatcttcttcttgccagatttattgtagatacaatacaatcccatttcttgttcagatttcttggtgaaaattcctagctagatccatactttctccagtgtagtgtgtagagaagaagaggccttgtgaatcttatcttgggaaaaagaggtatatccatccacccatctgtgtgctgttcttgattggcggcaatggcgatggagccgacggtgaaggtggcgctggggacggcggcgttcgggatcttctgggtgctggcggtgttcccggcggtgccattcctgccgatcgggaggacggcggggtcgctgctgggcgcgatgctgatggtgctgttcggcgtgatgtccgccgacgaggcgtacgccgccgtggacctccccatcctcggcctcctgttcggcaccatggtggtgagcgtctacctggagcgcgccgacatgttcaagcacctcgggaggctgctgtcatgggcggagccagggcggcaaggacctgctcgtccgcacctgcgtcgtggcggcgctcgcgtcggcgctcttcaccaacgacacctgctgcgtcgtgctcaccgagttcatcctcaagatcgcgcggcagaacaacctcccgcccaagccgttcctcctggcgctcgcgtccagcgccaacatcggctccgccgcgacgcccatcggcaacccgcagaacctggtcatcgccgtccagagcggcatctccttcggccagttcgtgttcggcatcctcccggccaccctcgtcggcgccgtcgtcaacgccgccatcctgctctgcctctactggcgccacctctccgacgagaagtgcgtcgaggtcgtcgccccggtccccaccgacgtcgtcgaagaggaggacgtcacctcccaccgcttctcgccggcgaccatgtcacacccccgttcctcctcccaccaccaccaccaccagcagcctggcagctcgctgtcgtcgcctgactgcgaggtgttcgagccagtgaagcccgtccctgtcaccagcaatggcgactccaacaacaagccggacgccgccgacgccgccgtcgtcgtcgggatccaccagaggcgcggcggcgtcggcggcggcgtgaggatgaaggaggaacatgcgttccggtgggtggaggagaaggaggaggccatggagcaatggaagagcacggtgtggaagacgggtgtgtacgtcatcacattgagcatgctggtggcgctgctgttgggtctcaacatgtcatggagcgccatcaccgccgcactcgccctcatcgtcctcgacttcaaggatgcccgcccctgcctcgagaaggtttcctatccacttctactcttcttctgtgggatgttcatcactgtggatggattcaacaagacgggcattcctagcgcattctgggaattcatggagccctatgcacggatcgatacaccgaccgggatagtaatcctcgccctggttattcttctcctctcaaatgtggcgtcaaatgttccaactgttctcctgcttggtgctcgggtggcagcgtcagcagcggccatctcccctgcagcagagaccaatgcctggctcatcctggcctgggtcagcacggtggccggcaacctctccctccttggctccgccgcgaacttgatcgtttgcgagcaagctcgcaggtcggagcagtacggatacaccctctccttcttcagccacctccagttcggcttcccggcgacgctcatcgtcaccgggattggcctactgctcatcagaagcaactgaaaaatggtacagaacatatatatgaagaagacatggatatcaggacatgtacaaaaagaatgtgaattttcaggtcaggtcgattgtatttctgcaaagattcaattgtgggataaaagaaaaatgtctatctttgcctcggaattaagcacggatatcatggtgcttggaggctttttgagctgtacatttgttagttcatattggggggagaagatgtatatgttgcagtagcaaggatcataaaagggaaatgtatatttttgttcagcattctacttgtaatccatatatattttttgaagtcgaataatttgtataggcaggagaagagaaaatcaatgaaatgcatgcccctatcgatgc

SEQ ID NO: 14789 - DNA, 3861 bp, Oryza sativa
  ref <308>: DATABASE ACCESSION NUMBER: AK065331
  ref <309>: DATABASE ENTRY DATE: 2001-12-06
ggtagggcccagccacccagcccaggcaagccaaagcacacccccctctcgtctcgtcgtctccgttgccggcacgcacgccgccgccgcctcgctcccctctcttctggcgcggttgcggtgccgccgccccgtcctacgaccctgctgcggggacgcggcttcaaggaggacctgacaaaatggcaatggggatgagagcccgggaatctgtgaacatgtcggaggacctaactcaggccattgcgccttatgctactgccctgcacgatgcgtcgctccagtcccactgttcgtcatgcttccaccgcataccggctcaatccccccacgacatgtcttgcacgatgtgcggttctgttcgatattgctgctcggactgcttgatctcggactgtgaagtgcattcatcttctggtgaatgttgcttctttgtgaaacatctcagggaagcctccccatccactcttaccgaagaaacgagcgatatccgtgctgctctccgccttctctattcgcttgagacgcgtggtcttgtttcatctgattcggtcagcagctccaataggatcggcgggctttctgcaagtggtattagggaggttctggaggagggtggggagattgccgagggggtgctggaggggagtttgttgatgttgtctgccagaaaatcgaggatgaagaactatgttggtctctccaatggcttgacgatagagaaggtggcattgtgggcagtgatgacaaatagtgttgaggtgcagattagcgaagagcagtctctggggattgctgtttatggccctagtttctcatggttcaatcatagttgctgtcccagtgcttcttaccgatttgtattggttccacagaatgaagggtgtacttcaaacaaaccagaatcatgtgtagttcctgttagcaaaggagctgcgccagatgcgtggcatgcttggcagaatgaagaagctggttttgctcatgctcaatgtaaatatggtccacgagttgttgttcgctgcacaaagccaatcaacaagggagatgaagttttcataacatacattgatcttcttcagacaagggaagcaaggctttcagatctgtggtcaaagtataaattcatttgttcttgcgagctttgtactgcactaccaaaaccatatgtggatcttattctgaattgtgatgctaggaacttgaaatcgccacataatgctgttacagacccagcaattgaggatttggacaataacttacaacaggcaatatctgaatactcattccttgatgactctaaagcttgctgtgatgtaattgaaagcatgctttcagaaaacttgatgaatgatttgcagcaagaggaactttcaccaaggaaatacatactacaccccctacaccatatcagtgtcagcagtttcatgatacttgcctctgcataccggtgcagtgccttcaaatcaagcactgataatttgcatggagaaaattgtgatttcattttcagaatgaccaaagctgcagcagcttattcaatagttcttgcaggggctacacatcacttgtttttatctgaatgttcctttgtgacccttctgtcgcattttttgctaagcactggacagtccatattagattttgctgaatgtattaagggagaaacaaggaaaaacatgcctgaagctatcttcagctttgcttcatgttcaacaaattcggcaaaacatgattctgtgcggtacaatcaattcagatcaacttgtgagaagtttggcaagcccttgttatctttatcgttgcagtgctggccatttttagcccaaggcttaccctgcctggaaaagataaagaaccccatagatttcagttggcttggtccagcaatatttcaggctttccagctttctgaggaagattctttcaacctttctggtaaacatgcgccagcaactctcatcgagcaacagaaagagtgcattctgagcttagctgtttgctgcatcacctacagcaaataccttgcaagtatatgctatggtccagaacattatttggcaaatcgtgctaaagatctgcttgaatgtatcaatcatgtacaatgatctctctgtgatatatctctggagctgatgtttgatgtgctctattgtctttatcaaggcagaagatgagtttaaagttacaacacctatcccataaaggaatcaccgaggtattggaagaatcatcatcagattgggctgtgaagatcttcgatttaaataatggtgcaaaagtttactcaagaataaaggctgagatgctcttcaagtgataacaataattgttttggacttggaagacaatgtgacagctgcttgctatgcataaaacagagtgtcttattcaatataattggacgaaattaccctctctgaagttattggaagcgacgttgacttgtaacagcttcagatccttacaaatggacagcaatcatggatttctgttgagtcatgtggaatattatcttcattttgccaagtgcgtaagcaaaatgaatggttatcagttgcagttcattctagtatccatatgaccacagtttgatgcagctgcaagcctgcagcaattattttgtgtttgttagttgctcattcctacatcaattaacttcttccgaaatggcagatgagtatgatcgcagcagctacagaaggtctggtgctgatgacgaggaaggtggctacaacaagaccaacactggagattatggccgcagcggtgacaactacggtcgtgacactggcctcttcaacgagtccggcaacgacgacaatgagagtggctacaagaacaccaacactgatgaatatggcagcactggtagctacaacaagtccaacaccgacgacttaactggcggcttcaacaaatccggcacagatgactacagtggtggcggcggctacaacaaatctggcgccgacgactacagcagcagcggtggctacagcaaatccggcactgacaactacagcggcagcggcggctacaacaaatccggcaacaatgactacagtggcagtggtggtggctacaacaagtccagcgctggcgactatggcagcgagtacaaggactccagcaccggcgactatggtcgtggtgacgaatacaagaaatcaagctcagacgactatgatggtggctacaagaagtcaagcagcaacgatgatggctatggcggaagcggctacagcaagccgagcaccggcgactacgacagtggtaagaacgcctccaacactgatggatatggtggcagtggctacaacaaatcaagcacagacaactctgagagtggctacaacaagtccggcaccggtgaatatggcagcggcggcggctacaacaaatcaagcacggacaactatgagagcggctacaacaagtccggcaccggcgactatggcagcggtggtggctacgacaagtctgacgccggtgactacactggtggctacaacaagtcgagcactgatgagtacgcaaccggaagaggcaagaccagttctgacgactactagataattatcgcttatcaggaaagcgaatcagggtactcttgatgctgaagtactaaatatgctcgaatacagttggtccttgctaaaaaggatttcgtatgtattccctcttatttacaggatgggttgatcagtttgtctctgatatgcaaggttgatcacacatctcagaggatgtgtgatgtgcgtaatatgctctgtatgtgtatgtacctgaacgaaaatgtaatactactctgctatgtttgcacatgaataaaacgtgatatatgcagtagtatcaagc

SEQ ID NO: 14790 - DNA, 1792 bp, Oryza sativa
  ref <308>: DATABASE ACCESSION NUMBER: AK065332
  ref <309>: DATABASE ENTRY DATE: 2001-12-06
ggtcttcccattccagttcccctccctcttccaggatccaaaccctagaaatctcctctgcgttcctctccccaaatcaccgaaccctaatcccgcttcttccaccccaccaacccaatgccactgcttcgcacatacagccggcgccgtcgccgtcgccgcgacagccgtctcagtcctactcgctcgcgcgcaccatatcaggaggaggaacatgtggttgagactgcatctgcaaaagcgcgcgccgatccgctgtatgcaaaggaggggcatgtgccatcttacatcgctgctacttcctcatcctgtcagcaagcagatgcagtagctcaggacaccgaggtcttgccaccatcaggaagctgcctttcctcatctccggcatcacacgtctgggcccgacatgtgaaagattggggactcatattttacatcagggttgatcttcagggatctttccacacatatcctgatgtgggtgggccatttcaaagctcacaggaagctgacaaggctattgatcgctatcttgaggaccatcgggatccaaaaatgcacatagggcaaaatgatgatatctcttcaatggagaatgttatacggcgatgcctttactggcctgatggcacaattaagaggcgtacaaaatcatttgcgacttgggaagccaaaaagagaatgcaccaattcatccaagcattagtggacaagtataatgatgatcacaatcttttgggggtttgctttctctctatctcattctctgtccttctgccttggttgcactgtcttatttatcttattatgtactccctccgtttcatattataagactttctagtattgcccacattcatacatatgttaatgaatctatacacttatgaatctatacacttatatgtctagattcgttaacatctataagaatgtggataatgctagaaagtcttataatatgaaacggaggaagtaggattgcctatctgatccatcctttttattttaggatttggcacttaaactcaaagacgttttgcactaccaaccactttgtgagaaccatatgtggtactatcatctcaatttcactgcaaagactaaagaagatgatggtttcgactctactagtgacaatctgttctttgtggaagtcaaatgtatgggaaaaggaaattatgaagaaatggtggtcagctgtttctgcgtgattaatcctattgataatggtaaaccatgtaaaggttgtaccaacaatggaactgctgacatgaagcaccctgacactggtgaatactttgctggtcacttggatgcatatttgccctatggatgttttggacagtggagtgactctgacgacgatgataaatacgtgaaagccaaggaggctaagttaaggcgtatgttcaagggccttgatgatccacgtgttacggagaaaatattcacactccctccgggtgtgactattgtggaagactaaaaagggatggaggaactactcacactacctttgggtgcggctattgtgcaagacaaatgggccaccggagtcaacgtcgcagcacgtgtagaatgtcggtatcaatgaaacacaaaggcggtatctaaaatattaaacgtctgctatgtatatatctcaaatgtccttggtttgcatgggttatctccgttggcgtgcagctccctgtgatgagatttgcatgacttcctgaatttggatgttgggagataatttctgtcgacggaatacctgcactaccccagtttttcttagaactgcact

SEQ ID NO: 14791 - DNA, 3337 bp, Oryza sativa
  ref <308>: DATABASE ACCESSION NUMBER: AK065333
  ref <309>: DATABASE ENTRY DATE: 2001-12-06
gactcgcgtctaggttatcctctcctcctcctcctcctcctcgctcctcgcatggcaccgcgtcgctgcagcctcaccggagccgtcttctttgccagccgccgccgccgcctccgtcgaccccttccgccgccgtcgaccccttctgcccccgctgccaccgccgtccccttccgccgctggacacgccagagccgacttcttcgtcgccatcgtcccatcgctcctcctctcatcctcctcgcctcctcgctcctacccgcatgtactaacgccgcgccaccgcagcctcaccagagccggcttcttcgccagccgcggccgccgccaccaccggccccttccaccgccatcgccaccgccgccgcgcactccacagctagcagccgtggtcttccccatcggccgcggatggagccgacgtcgtccccatccggcgccgccgtcaaactccatcgctgccacaggttacttgcatactgaaaaactgaaaatgtctgcaaatttttcaatgacttacattttgtgacatactgaaaatgtctgccaaactgccacaggttatattttgtgaatttttcaatgacttacattttgtgtcttactgaaaatgtctgaaaaagtgtgccaaactgccacaggttatattttgtgaatttttcaatgactttgaatgtggctcaaatacattctgtctttgattccactttaattcccctattgatgtcaacaacatgtgaccatgtgaactatctccagtggttgaattatctccaggaaatgtacttgaatgtctctggttaatctaactaatgattcacagcagttatacattttactgaatcaagtatgtgcagtttcacataataatttgcagtacatgtgtttgatttgatgcacgttatcttcaataggtccagaaggctggagctacacaatcagctaggtcttaccatggtaaattgtttccggttattctcaattgccgttcggtgggctcaggataaccgatcgaaattagagttgtgatagttgatttgcgggtctatggaggggaatgtggggtttgcgctcatgatttggagggggtttctgttcggttcatgcaccagcctcctatagtgtctttgttagatttatcttatttgcgcacataatgcaaaccatttaggtttacggtggtcgttggacagaagtagaatgtgtttacccatcggcgtgcccaatgcccacctacgtctattttcttgttagcgaggatatcgatcaattgactgctcaattaatcaattcatctattgtgtgggttattcaggtcaatcggctcctcccctcagcccacttccatggtcaatgcagtaagctctacatccggacctactgcaaggccaggtcaatacactccatattttgcttcatttgcaaatcggttttgcagctaactaattggatgagaacagatgtcacatgtatgtactgctcatatatcttgatatcatctcgatctcgcaaaattttgatggtttgcttctcaaattgttttttactgctcaatgtattttttgtattctgttttatagcgatttgtcatatacttctaatagatctcaacctgtattgctgatggttgcttcttccagctcaatgctttttctccctgtattccatactcctgatttgtcataggtttggagatctcaaatgcttcactatatgacaacatgtacagttcaagctgaatagtttacagaggaacataatagtagctgtctaggattggagataatttctgaacctcaagacctcattttttctacatatacggccattacgattgtttagctgtatattaatgtttagttatatatgattgtttaacttaattatatgcttaccaaattgctttgaattttatccaaattccacttggaacatcaggtcagcagccgtcaacaggtgcaatgaggacaaatttgtttggccaatgttaaattcactcgacatattttcaatagaaattttatttgtttaattctgttcatcgagccgtgccccgccgttggtcattgtcgtcatgcattgatacactatagtcgccagccagacttgtgagcgcgacggagggagcacgccactcttcaatctctacctccagcggcgaccctcaccaatggtaggagcagttgtgtcctcctccccctccttactgtgctttatttggggatccattcatgatacatctcagtctcaggttctcccagtctattgaatcacatgcatctttcctttcctttggattcaaatttcttttaggtcttggcactttagttaactaggaatttctgcaatgttgagcgatttgggtgtttcagtggcatatcttagtggaactcagtagttaatgtcttgctcagtttgcttgtaaattagacagacttcactgaagttggtctgaactgtttactctcacaaaattacaatttgagtgtttgcatccaaactatatttatgtaatttacagctgaagtagctccagtgaaacgtaatttcataatgcatcgagaataccttgtggagttattactggtcgcatgggtgaatgaactcatcacaagcattggcatcaatcaagttcatgttccctctggaactactaaggaaaaattcatgacaacaaagtttatacctgacaaccactgctcggtggataaggtgagaagcagcaaagattttgatttctcctttaatataaattattttgtttggttgaaatatttgtatactccctaaaatttattcccactattattcaagcttgaagcctcgaatgctgttcactaaaggaaagacatgccatgaatgttgtataatctattttctcctttggttttcaaggtaactgctacattgagagagactggtcttcaatcatcaaatttgatttcttggtattgaaataccaaaagcaatgacaagcaatgaatagtcaggtgatatgtgaggttttgcttccataggttgatggcttggtgattgaggatgcagtaatttgtagtgacatccatgttttggcttcattaattaggaggaaccaaagctgcaaaggaggtttttgagctcatgatgtcacagttttacgtacttctttgtgtcacagttgtcaaactgacgtctcaatattttcttgcgaacgaagctgacctcttaggcaatagtttttttcccttactgtgaatacatccgtccaattcctcttcaaattgggctcgattgcaatagttgttttttacatgaattcatttgaactgatgttgtgctctgatataattgtgcactt

SEQ ID NO: 14792 - DNA, 3343 bp, Oryza sativa
  ref <308>: DATABASE ACCESSION NUMBER: AK065334
  ref <309>: DATABASE ENTRY DATE: 2001-12-06
ggagtggcagagtgaagaacaagctagacaggatcgatcgatggccggcggcagcgagtttgatatccaggaagccgcggcgtcggcgtcggcgtcggcatcggcgtcggcgtcggcgtcggcgacggcggcggcggcgccgttgctggagaagaagatcacgtactgggaaggttgccctggctgcgccgtcgagcggaggaaggcggagaatcccggcgtcccctacctgcagttcttccacatctggatcatcatcctcgtctcctgtttgccaataacatttatatatcccttcctgtatttcatgataagagatttgcatgttgccaaaacaatagaagacattggattttacggaggctttgtaggtgcttcatatatgcttggtagagctttaacttcaactatttgggggatggtagcagatcgtatcggcaggaagccggttattgtgtttggaattttcttcacgttagaaatttttttctctatttgtattgcacctattctttgttaccttcatttgattcattgtattgcactaaatatcttaggctggtatttaatactttgtttgggctaagcacgcagtactggatggcaataactacacgttttcttgttggatcattgaatggtttacttggcccaataagagcttacactactgaagtttgtcggcctgagcatcaagctattggattgtcacttcacatcatgggcaatgggtcttattattggatcagttattggtggatatcttgcacagccaacggaaaaatatccaaagttatttcctggcaactcactattcggaaggtacccgtacttattaccttccttatgtatatcggtcttctgctttattatctttataagctgcatgtggctcccggagacactgcatgatctcaaagtccacaaaaaggacgatggaccaattgaatctccggttgcacattttgccaaatctgaagaacttcttgagcaacatattactccaactataaataagaatttgtttaagaattggccattgatgtcatctatcattctctactgtatcatctgctttgatgatatggcatatacagagatattttctctatggtctgaaagtgataaaaagtatggtgggctaagtttctcccctgaggatgttggtcaagtacttgcaatttcaggtgtgagtgttatgttgtatcaaacatttatttatcctaatattgagaaaattcttggaccaatcaatacttctcgtgttgcagcggttctatctatggttttgctttttacttactcacctatgacgcacctcccaagaccttgggttcaaatagtactaaatattgtttcggtacttaaaagtaatcttgttgtcaccattgttacttgcacgtacatacttcaaaatgattctgtgacccaagatcaaagaggaacggcaaatggtttagccaccactctaatgtcctttttcaaggcatttgctccagcaggagctggtattgtgttttcatgggcgcaaaagcgtcaacatgctttcttctttccaggtattgtgaactagtactatttgtggaaataactttaaaacttcacattcttaaataaataatattatgaatcttgtaatatgactaaaatttagggggtatttgacacagcttcagatctaagactttttagagctgggtattcctagctccataaatccatggatttgtatctacaatatatttataacatttggacgaatcattttatttaaattttagatgaaatataaaattttaaaccaatataatttaacatacaaacttcaaatcaagtgtggatctgagatctggagttgtgcccaataggaccttagacactggtacacactgtctggtttgttctcaaattctttccttcgccatatgataatttcatatcatgtagtctatttgatcttctctacccattttattgttaactttcttttttgggtatgtaggtgatcaaatggtgttcttccttttgttcattgtcgagtttgttgggctggtttggacattcaagccttttcttgttatgccagaaaaactttctttaaactattcctccaactgagatagagtttcttgagaagttctgtgatatggactacaaagagtttgtatctcctaggtaattaaggcagcctttgtccaccttcttctgcaatttggggagctaccgatagttgacaacaaagggtggacccaaaccttgggccacccaagcagtggcctggggcctggaagtgaagacacatataagctcatctgatttcaccatgtaaaaggatctgagctaaagttggagcggcccagggcctgtctaaagtatgggtccgctcccaaccatataaattcttgttgaagaattcgaaatattcagcaagaaagaaaaatggaagtacaagacgatgaacataaaaattgcgtagttctaagcacgcatccaaaaactgtttctgaaagtggaaaccatgtgtttttttaaaaaaaaataatttaaattgatagtgttgacactaggaaactggtggaaagcctgccgccggctagtaacctaatggactttggacgatcacttatgattgtttttcttcttggtcattgatctcataaagtttgtttcaatcaatgagatcagaatagtttgtttcaatcaatgagatcagaatattaatttccaatcagatatttcctttaccaaatttgtccatagaatagtttgtcatgttcgcgtaattgtaaacacgcatcaatttcggtcagcaattttaaataggtcggttcaccaaagaggcttgtgcaattaggattgtatatatcataccattacatatagatgcttgaagatctgactttaaaggtatatactagaaaatagatgctttaaacccatacactcaatcaagcggctactctcggggcattgattccaggggtgccaaggtgcaagatcgacggatcaggagatggctaccaaactccagcatctgccatggtaaaggtggaagcatggaggtctcggcatagccgtcacgtctgaccagcgagatggttgcggtggtgtgagcttggcaagcagggcgttcaccgccattgaggagtccaattgatcaacaagtcttcgatagcactccaatattcacggaagagccatttagtgcgagtgccatcgcttatacaatcaagtattgcagtcactgccaccaccattgctcctatttaatctcattgcgtagctcaattcttctttcgattgtcaactccttatttgatttaatcaggtaaatgattcccct

SEQ ID NO: 14793 - DNA, 1724 bp, Oryza sativa
  ref <308>: DATABASE ACCESSION NUMBER: AK065335
  ref <309>: DATABASE ENTRY DATE: 2001-12-06
gaatcccccacttttcccgactcctctccttcccggcgccatcgcctcctccctcctcccgccgccggcgccgccgcctcgcctcgcctctcctcgctcatcggcgctagccatggccgggaagaagcgcaagtccgcctcctccgacaagcagccgaagcagcagcagcagcggctcccactcggcgccgacgccgacgcggtcgccgacgcggcgaagcgccgccgctcgggggcgtcgaagaagcaccaggcggaggaggaggcctccataccttcctccctcagcgccaagatcctccgcgaggcgctcacccagcaacaggaggagtccctcgccgaccagcgctccgccgccgccgccaccgccgctccgtccccatccttctccttccccgtgcccaagaaagatggcgaggaggacgaagacgatgatgacgtcgacgagttcgatggcttcgacgcgcagagcgagtacgacggaggcgtgccggagattgatgaggaggacgagaaggctctcgctgcattcatgtcaaaggacacctcttcgaagcgctcacttggtgatatcattctcgagaagatcagggaaaaggatgcagaaatctcaacagaaggacggactcctgtgaagttggactccagtattattgaactttataaaggggttggggagttcttgagccgatacacaagtgggaaaattcctaaaggattcaagcgtatcccatcattggaatgctggccagatgttctgcagctgactgagcctgaaaattggtctcctaacgcagtatatcaagcaacacggctcttctcttcaaacatgaacgcgaagaacgctgtgcgattctatgaagctattttacttcctcgtgtccgtaatgacataaggaagaacaagaggcttcattttgcactataccagtctctgaaaaaatgcctgtacaagcctgcagcgtttttcaagggaatattgttgccgctgtgtcaggaaaggaattgcactctgcgggaagctgtaattattggtagtatcatctcgaaagtctccattcctcctctccatgccagtgcagctttaatgaaactagcagagatggagtactgtggcacaactagctactttattaagctatttcttgataagaaatatgctttgccatatcgtgttgttgatgcggtttttgctcatttcatgcggtttattgatgaggagagggtcatgcctgttatatggcatcaatcactcctagcctttgtggaaagatacaagaatgaattagagaaaaaggacaaggagaaacttgcacgcttgttggatcaccagaagcactatttggttactccagaaattcgtagggaacttcggatgagctgcaacaggggtgaaaaggacacaatcatgtcgatatgctccccagtttctgtgatcacgaaaccaattgaagaagacaggtggaatgttccggaagtacctatggaggagtaatcgtttgattcttaatactggtggggaggggcaattttccgtaccagtgttgtagttttgcttgccgaatgaacttttcaagaggtatttcagttctatgcagcaatggatcgatgccagcaagggaagttgtaatgcaaatttttgatcagtttggaaatgtatctgatagtaacagagtattcagcgtgtagctgtaatatacgtcaccagaattgtagtgttttgt

SEQ ID NO: 14794 - DNA, 2140 bp, Oryza sativa
  ref <308>: DATABASE ACCESSION NUMBER: AK065336
  ref <309>: DATABASE ENTRY DATE: 2001-12-06
gattctcgatagatccagattcggcatcggcaacagccgcccgtgcgccgcctgagccgtctgcgccgcctccgcacatcccacgccgctccctccatcctgagccgcctgcgcactccctccatcctgcttcgccgtcgcccgtccagcgtccagtggccgacgctcgctgcttgccggttcatgcccaggaaccagatggccggtccccaactgcggagctacccacgccgtgatgctcactggtcgctgtcggcctctcgatgagcaacccatgccgagtgtccctgtgcatcacggaggaggaagacgaggtgcagccgtgtaggtgtaacgtactaacatcctcctgtgatttgttcaactgatgattcatttgttgaacacttgactctgtgattcgttgcctcattactttgatacttagatacagttgcatacttggatttgaacgctggtttgataatctgaatttttattgcaaactttttggttttgttgtattggctcgcgagctgaacgagctagctcaagctagccgagctgatccagtcttctagctcgttagaataacgagctggcttggcttgttatcctagcaagccagaccgagccgagccggctcgatatccacccctatgtgggcttggtcgagatcggctcgttttagcccctgacgatagtaaaacaagggatcggtcggcggctcgcgaagcgaaagaaggaggaggcagttttcaattttcacacgactgcagcgccccaccctttcctactctttttatttccccacttgtcttcccccgtgcggcgccacacctcttctcatcttctcctcctatcaactccctctctctccaccgctccgcttgcctcggatcgcgctcgcgctcgcgcggagcagcgcccccaacgacgggcatggccggtgacagcggcaacagcgacggcggtagcaaccgggatgaggaggtccagatacagatcgcaggtcaatcaaatctttcccccccttcctctgtcgaaagcctcactgtttagctatgtccgattttcttcgttgagggagtgggggtgaggaggttagagtcgtcttgcgatgggcggcggtaaacgcagatgaaatgaactcgttcgttctctcgggcttatttggtgttcgatggtgtggggaagtaagcccgcgaggtgttcgatgaattgccttctcgtgcgtggcgtgttggatatggccatatgcccatatgggatttgttttttgtttatagaccatattaacttttcagactatcgtgacatcatcgagtggcagagtaggcatgtgagtttaattggcaaacccctgttgttcgcgtacatgagctggataagtggttgatgatagcaccagctatagtaatgcactgcatttaacaaaagtaaaatctttatattagtttttttatattagtgcaggatttccctgagattccaagtaactcgctttcatttgatagtttcaccaatggacaatactgtaaggatggagctatagtcttgtgttgctcgactttctctcaataaatttagagcttttggggtttatatggccaattgttggggggaaaaaaaggagaggagggtttcacttcactatgggaactttggtagtctattttgaataggaaaagaaagtttcagttggccgtgctatgcttaacacatgaagtttgggctaacctgttgatactgcctaccttctgtaacttgcagattcatccaaagctgcaacttcgtcaactcatgaagtacctatacagaactctcctgtcaagagttggcaatggtggctgatggtgggagttaacatgttcttcctcattgccggtcagaccgcatctacacttcttgggaggttctactacaatcaaggcggcaatagcaagtggatgtccacattcgtccaaactgctggctttccgattttgttcattgccctatttcttttccattcaaagacatcttctacacaaacagtcactagtagtcctgcccctacaatttctatccccaaaattactctgatatatgttgtcctgggcctcatcattgctgcagacgacttgatgtattcctatggcctactatatcttccggtctc

SEQ ID NO: 14795 - DNA, 1559 bp, Oryza sativa
  ref <308>: DATABASE ACCESSION NUMBER: AK065337
  ref <309>: DATABASE ENTRY DATE: 2001-12-06
tgacctcgaccctgaccgaccttctcaccgccgcgcctccgcctccgcctccgcctcaagccgccgcccgccgccgccaggagcggcctctccatggcggcagcgccgtaccaccagccgaccagcctggaggaggtcaggacgctctggatcggcgacctccagtactgggccgacgagaactacctctacaactgcttcgcccacaccggcgagttacaatctgtaaaaataatacgtaacaagctaacaagccttccagaaggttatggattcatagagttcatttctcatgaagttgccgagaaagttctacagacttacaatggcacacaaatgcctggaactgagcatacattcagattgaactgggcctctttcagctctggtgagaggcgtcctgatgcaggacctgatcattcgatttttgtgggagacttggcgcctgatgtcacagattacttgctacaggagacattccgtgtgagctatccttctgtcaaaggggctaaggttgtcacggatccaaatactgggaggtccaaagggtatggatttgtaaagtttgcagatgaaaatgaaaagaatcgtgcaatgacagaaatgaatggtatgtattgctcaacaagacctatgcggataagtgctgcaatacctaaaaaaaccactggatctcagcttcagtatggagctgctaaagccatgtatccagcagcaggttatgcagttccgcaagtccaaccagttctaccagatagtgatccgacaaacaccactatatttataggtaacttggatcagaatgtgacagaagatgaactcaggcagatctgtgtccaatttggggagcttatatatgtaaaaattccagccaataaagcttgtggatttgtacaatatgcatctcgggcatcagctgaagaggcagtacaacgtcttcatggcacaacgatcggccaacaagtagtcaggctttcatggggcaggagtcctgcgagcaagcaggatcaatcagctgtctggagtcaacaagctgatcctaatcaatgggcaagtgcttattatggctatggatatgatgcatatggatatgcccaggacccatcatatgcatacaattcttatgcaggatatacccagtacccccagcaggttgagggagcgaccgatatggcatcagcagctggaagccatgccccaggaatggaaaaggaggaggtgtatgatccaatgaacttacctgatgttgacaagttgaatgcgtcgtacatcgctgttcatggtagagccatgcttgggcgatccctgtggttgagaacttcatcattgcctcagtcagcttgagcgcctatttatcactcctcgttgccttttttactgaagactgcaatgccagtagagccagttggtagtttgcaaaaacggagaaactgtgacaggctgactgacagcttaatgtatgttgatttgtcatcacatgtatgattagggaaccccttttgctgagcctcttctaagttaacagattactgccaatgatgcggctactttatgatgcc

SEQ ID NO: 14796 - DNA, 1845 bp, Oryza sativa
  ref <308>: DATABASE ACCESSION NUMBER: AK065338
  ref <309>: DATABASE ENTRY DATE: 2001-12-06
gggctatggccatggcggcctccccattcctcatcttgccatccttattccccaagcccaccatcctcgccgcgcgcatccaccccagcatcttccgaggccgccatattcgctgctccccgaacggcgccgccgtaccggaatcccctgaacccgccccacgccgcgggcgcaggaagtccccatccccgtcgccgccgaaggcgaagaccacgaggcgcaggaccaagaagaatacgcaggagtctgattcagagggcgaggaggagccgccgaagcggcggggccgtcggacaaggaaatccaagcaagaggccgagcaggaggcggcggagaaggaggatgaggtccgggcggcgagccccggaacggaggattcgaagagagcggtccaagatgaggatggggaggcggaggcgacggggagcgactccgaagacggggaggattcgccgtacgactggccgccgctggtgtgctgcttcggggcgccgcggtgggagttcgtcccgacggtgcgggtgtcggaccggcagatgcacccggacatatactccacgtggctgcatctgcagtgggagcctccggagttcgcgcgcgcgccggggagcgcggcgagcaacgtggccatcgcgctcaccaggctcggcggccgcgccgcggtgctcggcaaggtcggtgacgacgacttcggccgcgagcttgtgtaccgcatgaactgcgagcgagtgcagacgcgcgccatcaggttcgacgacggcgcggccacggccactgcgcgcatgaaggtcgggttccgggaccgtgaggacggcagcggcggaacgaggcttgtggctgagacggtgaagagcgctgccgaggactccctcagcaaggctgagatcaatgtggatgttttgaaagaggctagagtgttccatttcaattcagaggtcctattgactccctcaatggaaagcacactcttcagagcaattgaactgtccaagaaatttggaagtaaaatattctttgatcttaacttgccattgcctttgtggaggtcaagggatgaaacaaaggagttgataaacaaggcatggaatgaggctgatattatagaggtgtcaagggatgagttggaattcctccttgatcacgagtactatcaatataagcgtgccaatccacctcagtattatctggatggttttcatctaacaaggaactggccacagtactaccattacacccccgaagaaattgctcccatttggcatgatgggataaaactcttgcttgtgacatacggaacacttaggatccactactacacacccaagtttcatggctgcgtgattgggacggaggatgcactcataactccatacacaactgaccggacaggttctggagatgctgttgttgctgctgctattagaaaattgacgtcttgtcctgagatgtatgaggaccaggatacattggagaggaatctgagattcgctgttgctgccggaatcatttcgcaatggactattggtgctgtgcgaggattccctactgagagtgctgcccagaacttgaaggagcaagtatatgtgccttctatgtggtgactggcggactggtaatcatttgtgattaaaagaacaatgctcatgatatacaagtgtatttcatgagtgctgcaacagaggtggtcaagggaaaagttttaccaaaacagcttacaggcttttcaggtatcatcctatcgtccgttccatattgtttcagtgttcagttttagttggaaaaatgtgtctgccacttggaggcttccattgctttacagttttgaagagctatgtttacctattg

SEQ ID NO: 14797 - DNA, 3140 bp, Oryza sativa
  ref <308>: DATABASE ACCESSION NUMBER: AK065339
  ref <309>: DATABASE ENTRY DATE: 2001-12-06
gagccgcgtggtctccgactcccctcccctaccctacccacgcccaccgatctgatccacctcgcccctcccctcctctccttgcccgcctcggcctccgggctccggcgatggcggcggggaacggccggatggaggcggcgctgggctgcctcgcggcgctccccgacgaggtgctctgcgccgtcgtcgacctcctcccgcccaccgacgtcggccgcctcgcctgcgtcagcagtgtcatgtacatactttgcaatgaggagcctctctggatgagcaagtgtctttcagttgggggtcttcttgtgtatagaggttcttggaagaaaacagcattgtctagacttaatctttgttcagaaaatgatgagatttaccagaagcctcgccattttgatgggttcaattccatgcacttatacaggagatggtacagatgttttactaatttgagtagcttttcctttgataatgggcacgttgaaaggaaagatgacctttctctagaccaatttcgcgctcagtatgatggaaaatgtccagttttgcttactaaactggctgaaacctggccagcaaggactaaatggacagcgcagcaactgacacatgattatggtgaagttccctttaggatatctcagagaagccctcaaaagataaaaatgaaactaaaagattatgttttttacatggaactccagcatgacgaagatccactttacatatttgatgataagtttggagaatcagcacctacactattggaagattacagtgtccctcatctatttcaagaagatttctttgaaatcatggattacgaccaacgaccagctttcagatggcttattattggaccagagagatcaggtgcttcttggcatgttgatccagggttgaccagtgcctggaatactcttctttgtggccgaaaaaggtgggcaatgtaccctcctggaagagtaccaggtggtgtcacagtacatgtcagtgatgaagatggtgatgttgacattgaaactcctacatctttgcagtggtggctagatatctacccaaatcttgctgagcatgagaaaccactggaatgcacacaattaccaggagagaccatatttgttcctagtgggtggtggcattgtgttttgaaccttgacatgacaattgctgtcacgcaaaattttgtcaaccaatcaaattttaagcatgtatgtttggacatggcacctggttactgtcacaaaggagtttgccgtgctggcttacttgctgctccagacaaatctattagagatattgaaaatcttcctagtataacgagtagattgaaccactctgacatggcctgtaaggaaaaaagactgaaaagttcagagcctataagaacttcaaataatgcaaatcagtgttctgcatttgagttctcagatgttcatgaaaacttgggggaccaagttttttcgtatgatatagatttcttatcccaattccttgagaaagaaaaggatcactattcttctgtctggagccctactaattcaattggccagagagaagcaagagaatggctacgtaggctatgggttcttaaacctgaattgagagaactaatatggaagggtgcatgtctagcaattaatgtagacaagtggtattcatgcttagaggaaataagtgcatgccatagtttaccaccaccttctgaagatgagaagcttcctgttggcacaggtagcaacccagtcttcattgtttctggcaatgtgatcaaaatttatgctgaaggagggttgggttattctatacatggtttgggcacagagcttgagttctatgatcttctgcaaaaacttggctcgccattgatcaaccatgtccctgagatcattgcaagtggctttcttgtgtacctggatggtgtctacaagacagttccatgggatggaaacggaataccagatgttctagctaaatactactctttggaggtgtcttatgcaaacggctcttttcctcttggattatggagcaagcaactgtttggattgagtaattcaactgatgctccagacagaccaatttgtccttacatggttaccagaaaatgcaaaggggatatttttgctcgcatacgtgataaattgaccaagactgatgttttgaatcttgcatcatccttgggagttcaaatgcgaaatattcatcaattaccccttccacatgtggaacacatatccaaatctgggaacgaagatatcaaagcaaaggaaaattcaatttctgatgtcactcatgttccgcctgaatggaaacaagtagtttctactctagacaggagaaagaaaagtataaagaagcatctaagtaactggggtggttcaattccacaggttctaattgagaaggctgaagaatatctccctgacgacatccgctttcttatcaagtttgttaaggacgatgatggtgattcagtctatgtggtaccttcttggatacattcagatataatggatgataacattctcattgaggggaccacagaaccaggaacttccactgattgcattgccgttgaagatctgaacaaaatggatgcaattcatatcattgatttcagtgatctgtccattggggatcctctatgtgacttaattccactgcacttggatgtattccgtggtgatattgatcttctcaggcagtttttacgaagctatcagcttccttttctgagagcagaatcaaataaagatatatacaagtcaatacaaaattctaaattcagcagggcatcgtatcgtgcgatgtgctactgcatacttcacgaggacaacgtcctgggagccatatttagcctgtggaaggatctgggcaccgcgacgtcatgggaagatgttgaacacttggtttggggagagctgaatcaataccagcagtcatgcagcgtgggcgaaattaactgacgcgatagagttttccatactaagataaaggcacaagaaatttgatttgtaacctgaaactgtaccacaaagtataccatcgaaacagtgtattatgttacactaacacatgcttgatatgcaataacaacgcatcgaaaggacaacttcgttcagatgcaacatatt

SEQ ID NO: 14798 - DNA, 1678 bp, Oryza sativa
  ref <308>: DATABASE ACCESSION NUMBER: AK065340
  ref <309>: DATABASE ENTRY DATE: 2001-12-06
gcttctctaaccccctgctgttgctagcagaagtccaggtggacaagaacgcgaggaggggaagaatcatccccgagatctcgctgccgctgctcatggcgttcgcggcgtcccacaccgcatcgccgtcctcctgcggcggtgtggcgcagaggaggagcaatgggatgtcgccggtggtggccatggcctccaccatcaacagggtcaagactgctaagaagccctacactcctccacgtgaagttcatctccaagtcaagcattcactgccaccccaaaagcgggagattttcgattcgcttcaaccttgggccaaagagaaccttttgaacctcctgaagccagttgagaagtcatggcagccacaggacttcctgccagacccttcttccgatgggttttatgatgaagtaaaagagctgcgggagagggctaaggagatccctgatgactactttgtttgcttagttggagacatggttactgaggaagctcttcctacctatcaaacaatgcttaacacccttgatggtgtccgagatgaaactggcgcaagcccaaccacctgggctgtttggacaagagcatggactgctgaagagaacaggcatggtgatcttcttaataagtacatgtaccttactggacgtgttgacatgaaacaaattgagaagacaatacaatacctgattgggtctgggatggatccaggaactgagaataatccctacttgggtttcctttacacatcatttcaagaaagagctacatttatatcccatggcaatactgcaaggcacgccaaggagtacggggaccttaagctggctcagatatgtgggacaatagcagctgatgagaagcgccatgagacagcttacaccaagatagtggagaagctcttcgagattgatcctgactacacagttcttgcatttgctgacatgatgaggaagaagatctcaatgcctgctcatctgatgtatgacggcaaggacgacaacttgttcgagcatttcagcgctgtggcacagcggctgggtgtctacactgcaagagactatgccgacatcctggagttcttggtccagaggtggaaagtcgcagatctcaccgggctgtccggagaagggagaagggctcaggatttcgtctgcacgttggcgccgagaatcaggcggctggatgaaagagcccaagcaagagctaagcaagcgcctgttattcctttcagctgggtttatgaccgcaaagtgcagctttgatcatgatcagtgagcaaccgagactgcatcctatatattggttctaagatatgaggttctctatatggaaaaaaatctaggttatctagctggggtagaatgcaattacctgtccatctgccctcacaaaatctgttgtcttttaagttgataacagtgtcgatgagtctggtgagaagctgatgtgagatgcaacagagtgaacttatgttgtattgatgtgagatgagtatggtgacatttatgtgtacttgcaggttttacatgacttgtataagttttaaagtaataatggagatttgtatacagacaagcgtgtgcactgtcgcatgattaagtagtctaaaatccagactatcttttgtgctctgaatttagcagtaataagattgatcggcttgttcgttttg

SEQ ID NO: 14799 - DNA, 1586 bp, Oryza sativa
  ref <308>: DATABASE ACCESSION NUMBER: AK065341
  ref <309>: DATABASE ENTRY DATE: 2001-12-06
gaagccaaggccgcgcttccgccgctgcagccgatacgggagattggatcggaagcttctagaagtttccgtgggcgatggcgatccgcgcgaggtcctcctcctacgccgccgcggcggtcgcgctggcgctcgcgctggcgtccgtcgccgctgtcgccggcgaggtcttcttccaggagaagttcgaagatggatgggaaagtcggtgggtcaagtcagaatggaagaaggatgagaacatggctggtgaatggaaccacacatctgggaagtggaatggagatcctgaggacaaaggtatccaaacctctgaggactacaggttctacgctatttcagcggagtacccagaattcagcaacaaggataaaaccctggtgctgcagttctctgtaaagcatgagcaaaagcttgactgtggtggtggatatgtcaagttgcttggtggtgatgttgaccagaagaaatttggtggggacacaccgtacagcattatgtttggaccagacatctgtgggtacagcaccaagaaggtccatactatctttactaagaatgacaagaaccatttgatcaagaaggatgtcccctgcgagactgatcagctgtcccatgtgtacactttgatcatccatcctgatgctacatacaccatacttattgacaatgttgagaagcaatctggcagcatctacgagcactgggatattctgcctccgaagcaaatcaaggacccagaagctaagaagccagaggactgggatgacaaggagtacattcctgaccctgaggacaagaagcctgagggatacgatgatattcccaaggaaatccctgaccctgatgctaagaagcctgaggactgggatgatgaggaagatggtgagtggactgcaccaaccattcctaaccctgagtacaagggaccatggaagcaaaagaaaatcaagaaccctaactaccaaggcaaatggaaggcaccgatgatcgacaacccagacttcaaggatgatccatacatctatgcttttgacagcctgaagtacattggcattgagttgtggcaggtcaaatcaggtactctgtttgacaacttccttattactgacgaccctgagttggccaagacattcgcagaggagacatggggcaagcacaaggatgctgagaaggctgcttttgacgaggcagagaaaaagaaggaagaggaggaagctgccaaggccggtgaggacgatgatgatttggatgacgaggatgctgaggatgaggacaaggccgatgagaaggctgactctgatgcagaggatggcaaggattctgatgatgagaagcatgatgagctctaagatggtgaggatgaagaatggaggccgccttcgcgacgatgccaggatttgctagttctcccattgttatgaagttccctttttcgtgatcagaaacttgacaagaaagtactctgtagatgagcattgctgaggaactttaatttggtctttgtagctctctctgtagtgtcatttttcccaccacaagaaaaagaactgataacttattgaacaagagaaatcttttgcact

SEQ ID NO: 14800 - DNA, 4189 bp, Oryza sativa
  misc_feature (1950)..(1950): "n"=any one base of a, t, c, or g
  ref <308>: DATABASE ACCESSION NUMBER: AK065342
  ref <309>: DATABASE ENTRY DATE: 2001-12-06
gagtggttcgctcgcgacgccaacacgaactcccgaaggcgaggcggctttgcacgcacgcacgcacgcacgcacgcgcggcctacctcctcggcgcgagttgctcagtcgcagggggggaggtgggagcggggcggggcggggcgggcgtcccggtcggggattgcgctggttcgatccccccgcgcgtgtgggggtgtgggtgcgtgggatcgatctctccctctcgctcgctcgctcgctcgccctagcacctcgcgggcggggcgtcgcatgcggcggcgcggcgaggcgaggcaaatgcgggtggattcgtcgctggcggtggaggagaggtgagggggcggcggcggcgatggcgatgcagacgatgcagacggagcagcagcagcagcagcggaggaagggttcgccagagatggatttcttcagcgaatatggtgatgctaacagatacaaaatacaggaagtcattggcaaaggaagctatggtgtagtttgttcagctattgaccaacatactggcgacaaggttgcaatcaagaaaatacacaatatctttgagcacttatctgatgctgcccgaatcctccgtgagatcaaattgctccggctattacggcatcctgatatagttgagatcaagcatataatgctacctccatcaaggagggacttcaaggacatatatgttgtctttgagctgatggataccgatctccaccaagtcatcaaggcaaatgatgacttaaccaaagaacatcatcagttctttctttatcagatgcttcgtgctttgaaatatattcatactgtttatgtactgcagctaatgtctatcatcgtgatttgaagccaaagaacatattggcaaacgctaactgtaaactcaaaatatgcgatttcggtctagcacgagtggcatttaatgacactcctacaacggtattctggacggtgtgtgacattgtacattcatatattgcattatctgcaatagtacatgcatagttttgctacgtaagttttattttctatttcataattttctttctttgttttttgcaggattatgttgctactagatggtatagggctcctgagttgtgtggttctttctttactaaggtaattaatctgcagttctcatgtgttgtttgttggaatatttgcttgggctacttccccagaagccctataacatgatttgcttggtctacttgatggtatattgctgaattatattttctgttaaaattcattgtcacatccctatacatgattttgctatggttttctgcatgctcttctgactgtacacattttatcatagagaaatgtaatatttttatatcataaagacataatatttcaatttaactagtgtaatacattgagtgttatgccaatagaatgataatggcagctattctagagcctagtattcatggccacacacactatactggtggtatgccaacatgctggtatacaatagttgtcacttgtcaatctgtggcccttccttgatatgcagccatttatgtcagtcatagcaactactgttgatgctaagtggacttcctaatatttagcaatcacaattcgaattaactagtgttacatatcgtcataaatcatacttcacattttgtggcctctttcccattcctccaagccttcatttggatctttgacaacgatcgtgtgactatattctgttttatgatgtctggctcaattttactttatcttgattaatcgggtgacttgattccaagctccctacagatatgcacatgttactgtttagaaacttcatatgcggtcattttttattttcctgaaaaattaatgtctatgtgttaaatttatcctgttgtacataaccctttttatgcacaagtacccccatagctatatgtgattttacatcaggccattcatccnctttgattccgatttggctttttaccagctggtataacagggatcattccttccaaattgtcttgttcagaagctgcattcataggcggcatttgctacctttttagtaggtattgccttcattgatcatcatagatagttttattagtattatttggttaggtttgaaaagtacagcattaccagtaacctgagagtttattcgtctgtttgacatctaggcgaagtgataggattaatgtagttagctgatattttcttcacttttacgccaactgttcaactaatatctgctcctctgtaaatttcaatggatgctaaatcgattgtactgtgcagtattcaccagctattgacatatggagtattggctgcatttttgctgagattttaactgggaagcctttgtttcctggtaaaaatgtggttcaccagttggatctgatgactgatctcttgggtactccatcaatggatactgttacaaggattcggaatgagaaagcaaggaggtacttgagcagtatgaggaaaaagcagccagtacctttttctgagagattcccaaaagcagatcctgctgcactcaaacttctgcagaggcttttagcattcgacccgaaggatagaccaactgccgaagaggcgttggctgatccatattttaaaggccttgcgaaagcagagagagaaccatcatgccagccaataacaaagatggagtttgagtttgagcggagaaaggtgactaaagaggatgtgaaggaacttatattccgtgaaatactggagtatcatcctcaacttcttaaggattacatgaatggaaccgaaaaaacaaacttcctatatcctagtgcccttgacaactttcggagacaatttgctaacctggaagaaaatggagggaagaatggagatgctgttccatcagacaggaaacatgtttcgctcccaaggtggctaaaaccgttttaaccatcaatggttttcttcccattgaaagtatatttttgttgattatgatgccaagtttgcttctgttaagaaaattgcatcaaatcaaacagatagatcgtacttgcatcattataaaactttgtttcatgattttatggtactataaaacctctgtacacatcagaaagtgggtgatttgaggtgatatcaataacagagaccaccgttggaatattggtgctgacctttaatttctaatttgcaggactactacagttcattctgctccaattcctcccaaagatcatcaaaatataacttcccaagtaccccaaaggattccaggtagaacaggacgaggggcttgccctgtaataccatttgagaatttgagtgcaatgggcccatacaatcaacgaagggtggtaaggaatccagtgcttcctccagccaccaccaacctatcagcatatgcctaccaccgtaaatcggatagctcagaaagagagctccagcaggagcttgagaaagatcgcatgcggtaccagccatcagagcatttcatggatgctaaggtggtgtcacatatgtcccatgatttgagagcttcctcttactacgtttcaaaggcgaaatctgatgtagcagacagagctgccttacaatccaacatgatgcagggaattggcccttttaatggcattgctgcagttggaggtaactacaataaagtcagtactgttcagtatggggtctcgaggatgtattagggtgcaatggccacttcaaaaatgctccgctgagctgattaataacatgaaagaatccaagtacccaagtgccttatcagccaaagattcagacaaagaatacaggaccaacaatctgatcgaggaagcgtcgaggcggtgaaaatgaaattacagaatgtggaaaagacaaacatcttgctagccattgatctagcctgccaagaaaggcatgccatattgccgtgccgtcagttatttgctgctaagaagaaaaagaaatgggagaaaagggaaaaagatgagcgagtgatctactttgaatgaaagagaacttatgggaataaaaatagcgagcttatgtatatacaataacttgattctatatattactgccagagacagccatttcttttgttccacatgtggacatgtggtggtgtgtgttttctttttgtatcactgggcgtctgagcacaaatgcttgcgagacaattcccttgtagaacaggagtacattttggtgtaac

SEQ ID NO: 14801 - DNA, 1676 bp, Oryza sativa
  ref <308>: DATABASE ACCESSION NUMBER: AK065343
  ref <309>: DATABASE ENTRY DATE: 2001-12-06
ggctggaagtccgggacggcgatggtcgccacgcctgtgcggtggccgcgggtgctgactccggcgcacctcgccggcgccatccgccggcagaagagccccctcgacgccgtccatctctacgccgacgcgccgcggcgctacccgcgctcctcctaccgccacaacgacgccgtccactcctcgctcctcgccgcggcctccgcatcctcctccgatctcctcccctccctcctccgccgcatcctcccgtcctccccctccgccgactccctcctcgccgcctccatcccgcacctccctcccgctgccgcagtctccgtcttccgctcctccctcccatcctccctcgccccgtcttggtcacgatccttctccgccctcctccgccgcctcctctccgatggcttgcttcccgaagcggcccgtctctttgcggacttcgcggggaggccggaagtctctctagcgtcagaagacctgaactcgctctgcaggtgcttgatgaaatgtctaaccagtgcctcgcaccagagaaggacgcttatcgcgcgatcgtgcctgcgctctgcgatgctggcatgctcgatgaggccacacacgttctctactccatgctgtggcgcgtgtcgcagaagggatgcgacgaagatgttgtggtgtaccgggcattgctggtggcgctctgtgcggctggccgaggtgagcaggcagagattgtgttggataaggtgattaggaaagggttgaggtcctcaggtagccggcgatctctccgtgttcctatgcttgctgggcttagtattgaggatgcccaggaaatcattgatcaggcattggttgttcgaggtgggcgtactgttgcaagctttgaagttatggttattgacctctatgatgagggaagattgaatgaggcagacaatttgtttaaggagatgggcaagaaggggttcaagccaacaatatacatgtatgaggcgaagatcacttctttatgcagggaaggcaggttggatgaggctgtgaaggtgttggaggaggaattacccaagaatgatctcattccgaccgtcacaacatataacttgctaatgaggggactttgcaactcgatgcaatcaatgagggcactcagataccttggaaggatggataaacagcttggttgtgttactcggaaagagacattttcaatcttgatcagcggcttgtgttcagaaagccggttcatcgacgcagcacagattatggagaggatggttaagggtcatcatagacctgaggcaggcgaatttaacaatgtcattgaaggtttatgttctgctggtagaacatatgatgcattgctatggcttgaggagatgatcgaccatggagaaacacctgatgttcatgtttggtcttctttggtttcagcagctttaggattaggagaaggccttacaactgctgctacgcattaagtgggattgggccaagtacattctttaagcacaaaaacatcactggtttgagcgtacagaattagcctcttttgtatgtaagtgaagtaacatttttatcatcctgttatttatgcagttccaaaaggaatatctgtaagctaattatttctgcatgtagtaacaatatatcttaaatctactttagtcttaataatggttgcgatgagg

SEQ ID NO: 14802 - DNA, 1516 bp, Oryza sativa
  misc_feature (1513)..(1513): "n"=any one base of a, t, c, or g
  ref <308>: DATABASE ACCESSION NUMBER: AK065344
  ref <309>: DATABASE ENTRY DATE: 2001-12-06
gacccacaacccccaagcatcagcatcacaacccaccaatcgaatcgatcgaacaagacacgacaccatgcgccgccgcgtctcctcctcctcctcctcctcctcgtcctcgtcgccggcgaggcatcacaaggcgcggcgcagcaggaggaagctcgccgtcgacgaggactgggaggccgccttccgcgagttcctctcccgcgaccacgacgacgacgacgacgaccacgacggtcagcatgtcgttgttgcgccgttgatccgtggtagtgacaagtgcgtccacggccacgaggtggtggcgtcgacggtcggcggtggcgcaagcggcggacgacgacgagccgacgacgacgacggcgagcggcggcggcggcggcggagggagaagcggagctacccgtaccgcggcatccggcagcggccgtgggggaggtgggcgtcggagatccgcgaccccgtcaagggcatccgcgtctggctcggcaccttcgacaccgccgagggcgccgcgcgcgcctacgacgacgaggttcgccgcatctacggcggcaacgccaagaccaacttccccccatcgccgcccacgccgccgccgccggagaagccagcggcggagaggagcccctcgacgacgccgacgacgaccacggaggactccggcgactcgcgcatactcatcgagtgctgctccgacgacctgatggacagcctcctcgccgccttcgacatgaccaccggcgacatgcgcttctggagctaacgaacaacagagcagattcaggtaattaaatccacacccaagcaggtctaaaagtttttaacaatttcatgaaacaaaattaacaacaaatccagtaagataaataggatttaacaaggattgcaatggtaattattgcacaattttaccatttcggtgctttcaactgttcaatcaccgaaagaaattcagcaacttttgaagggcactgctacgcgtacttaatttctttttttcttctacaaaacactttctaaacaagttctcgaatgttccatttaattagatgggagtaaaaaagaaatccagaattagttatagcatgtggcattagccatgaaagttttagtaaaaaaaatttgcacttttgaatgatctagatcatagaggatcagtcgaattctgtgtgttcatgccatttctagcatttacgtgcagtattaaataaagttactactatttttttcttgttttctctatgttactcatcatgattttacatttttctttcccttttgacaggacaacataaacggcacgtctttgcaaccttgacatgcgactcgcctaataatcttgtcaaacaagggccgccagcttaattagctttttccaaaggtggggaacaattttgggggatgcaattaggacgcacagagatgaccccaacttgtcaatgggaattgaactctgatgacctttgtaatgataatcaaggcaccacattgtggggttaaagcaagtttntgc

SEQ ID NO: 14803 - DNA, 3406 bp, Oryza sativa
  ref <308>: DATABASE ACCESSION NUMBER: AK065345
  ref <309>: DATABASE ENTRY DATE: 2001-12-06
gagttgaacctaacggcatgtcaattgcatgtgctatctcagcttgtgccagtttgaagttactaaaccaggcaaaggagctccatagccatgctattaaggttggcagtgttaacaacgtgctctcagggaactccttggttgacatgtatgcaaaatgtggagaaatagttgcagcttggagaatatttagtgggatacctgacaaggatatattctcctggaattcaatgatttcagggtatgcacaagcaggttattgtggcaaagcatacgagctcttctgtaagatggaaaactatggtgttcggcgcaatgtgataacctgaatacaatgatctcagggtacatacggaatggggatgatgagagagcttttgagctattccagatgatggaaagtcatggagtaaaaagggatacagcaacctggaacatactcattgctggatcagtgcataatggttattatgatagagccataagaatattccggcagatgcaggcacttctgaggaggcctgactacattaccatccttagcattattccagcattcacaaatctagttgcgtcctggaaagtacgggagatccatgcctgtatttttcaccacaatttagaactggatggcaaaattgcaaatgcacttatcaatgcatattcaaaatctggtaatcttgctagtgcgtgtgctgtgtttgatatgcattcatcaaggaacattatttcttggaactgtatcattctcgctcatgtgctgcatggttctccaaatgaagccttggatcttttctgtcaaatgaagcaagaaggtgttgtgccagatcatacaactttggtcactgttatcaaggcctatggtctcacgggaaaggtatctgaagggtctcagacatttttcaacatggccaatgattacaatataactccagaattagaccattatgcagcaatggtggatcttcttggtcggtcagggagactaaaagaagcatatgagcttattgacgagatgcctttgatacccaattcaacagtctgggacacatttcttactgcagctgtaatgcatggaaatgtaagactggctcacctggcagctagagaactgtctgcgattgatcctggagatcccagagtccaaaggttaggttctagtctgcaagatctaactggaaaaactgttgatgtgccagaggagatgacacccaacaaaggaagaaatttagatgaggtcgagagctgttcaatagaaatcaggaataaggtgtatgtgttctcaaatggtgataatgttggcttggaggatacagtagcagaattaaagtcgatgatgtttaagatgggacattctatgcttgacattggcattggaactctagatgttgaagaagaaaaggaagaagttgttggagtccattgtgagaagctagctattgcatttgggctttctaattccccacagttcaaaaacataaggataatcaaaactgcaaggatgtgtaaccattgccacacctttgccaaactagtttcagagaaatatggacgccatatactgatcaaggatccaaagtgtttgcataagtttgaggatggaaaatgctcttgtgaagattattggtgaatgatgaatacaactagtttatgtctactgggtaaaatatcttgccaagtgtccttttgcaggattacacgctgctaaccctgaacagaattcaaacacttggaggatagcctatccatcaattcaacccccagacaaaaatatccagtactatgtggtatcagaaaaggagactgttctgatgctattccagcttcagtttaggtttattttgaacggcttgggagacagtactggtggttactccattccatcattcaagaaacagtttggttcagaagcatgaacatggcaatgtaactttgagagttatagacttgaatggaaaaaatgaaattcttcaagtggttcctatttatacactgctggagcaaataagaattatcttagtagattttaatagcaccataaacattagggatagtgaggctagaaaatctattgtccacattcattaggtccaatctaatacggaaccatcatattacattacgcttcatttgcctcccgttcgatgacacaatttgttggatttgtttgcccctctgaccaaaggaaaccacgtggaaagcgtggttatcagctaatcatgtggaaggaggggatgaacagaggagaacgaagagatgctaagatcagagaagacagaggacgaaaagaatttaatagtaccactcactttgctcgattgcttccaacaatgttatgccgatgaggaggattatagtgacttgctcactttgagaattgaccattttgcccctgtacatttcctgtctggaactggtatagctatagttgagataaagtgtttagctaaagatggatgggaggatcggtgggtcaaatctgagtggaagaaggaggacaacacagtcggcgagtggaaccacacggccggcaagtggaacggcgacaccaacaacaagggtatccagacatcagaggactacagattctacgccatttcggccgagtaccctgagttcagcaacaaggacaagaccctcgtgctgcagttctcggtgaagcacgagcagaagctcgactgcggcggcggctacgtgaaattgcttggcggcgatgttggccagaagaagtttggtggcgagacaccgtacagcatcatgtttggaccagatatctgcgggtatgccaccaagaaggttcacgctatccttactaagggtgtgtttgaggagaaggagatagagaagattgggaaggtacgcaaaacgagcctaagaacggcaataaccatctgatcaagaaggacgtgccatgcgagaccgatcaactgacacacgtctacaccttgatcatccgtcctgacgccaaatacagcattctgattgataacactgagaagcgaactggaagcatctatggtgattgtgataatcttcctccaaagaagaagaaggatcctgaagccaagaaggttgatgtgatgggaaaggactgaagtttagatccaaactttggatctaaacacagcctgggacgacaaggaatcattcctgatcctgagtacgagaagcctgaggttgctttcctttgtttgcgcaactttagatgatatttctgtctgaagattaattgagtttttactaataccactctactgagtttctaaatgaaaatgggtggcagttttgtactgtatgttgtgagcttgctgctcctcagatagcaatagagtacattgtgttacaaaagcatcatgaggccatatttgatctcatcaaaggctcatcaaagagcaacaatggcacc

SEQ ID NO: 14804 - DNA, 1316 bp, Oryza sativa
  ref <308>: DATABASE ACCESSION NUMBER: AK098926
  ref <309>: DATABASE ENTRY DATE: 2002-08-28
gaactcatcttcctcttcatctccctcgtcggcctgcgctccaagctcgccaagttcatccccaagcccgtccggatatcgtcgtcggcggggatcgggctcttcttggcgttcatcgggctgcagagcagcgaaggcgtgggcctcgtcgggttcagctcgtcgacgctcgtcacgctcggcgcgtgcccggcgtcgcagcgcgcgtccgtggcgccggtcgtgacgttccccaatggcacggtggcgctcatgccgggcggcaccgtctccggcgggatactctgcctgtccggccggatgacctccccgaccttctggctcgccgtcgtcggcttcctcatcatcgccttctgcctcatcaagaacgtcaagggcgccatgatctacggcatcctcttcgtcaccttcatctcctggccgcgcaacaccgccgtcacggtgttcccggacacgcccgccggcgacgagagcttcggctacttcaagaaggtgttcgacgtgcaccgcatccagtccaccgccggcgcgctcgacttccggggagcccgccacggctacttctgggaggcgctcttcacgttcctgtacgtggacatcctcgacaccacgggggggctctactccatggcgaggttcgccggcttcgtggacgacgcgacgggggacttcgaggggcagtacttcgccttcatgtccgacgcgacggccatcgtgttcgggtcgctgctggggacgtcgccggtgacggcgttcatcgagtcgtcgacggggatcagggagggcgggaggacggggctgacggcgctcaccgcggcggcctacttcgcggcggcgctgttcgtcacgccgctgctggcgtcgatcccgtcgtgggcagttggcccgccgctggtgctcgtcggcgtgatgatgatgcgcgcggtggcggaggtggactgggccgacatgaggcaggccgtgccggcgttcctcaccctggcgctcatgccgctcacctactccatcgcctacggcctcatcggcggcatcgcctcctacatgctgctcaactcatgggactgggcctgccacgccgtcgcggtgctccgctcccggcgccggagaggggcgcgcgccgagacgaggagcgccgccgccggagacaatggggaacagaggaagaacttggaaatggcttaattagcttttttttttgcataatttcctttttaaaagatttagaaggtgattaggatttgctatatatactggaagatggttcaaaaggcttagtaggatgttcaagtaaagttattaatcaagtttcagtcccg

SEQ ID NO: 14805 - DNA, 3105 bp, Oryza sativa
  ref <308>: DATABASE ACCESSION NUMBER: AK065346
  ref <309>: DATABASE ENTRY DATE: 2001-12-06
gttttttcgataaggggactcatctctcaagtgcactgcttctcttcgtctcttcccccatctccggcgagccgtactggtccaactccggcggccaacgacccctcaactaccagctgtggaggagaacatggatgtgcaggtgaaggactggaggaacaaggtccgggaactgagctatgatatcgaggattgcatcgatttattcatgcacaaattgaatcgcggggatgataaggtcaacattgttctcaagatggcaaagaagattagaatgttatggtcaaggcatcagattgctaaccagatccaagaacttaaggctcgtgtcaaggaagagagtgatcgccgtttgaggtactacttcagcgagtgcaatgcacatgtcgacgggactaaaattgatccccgcctaccggcgctttatgttgaagaagagaagcttgttggtatccatggccctatggaagagatcattgaattgttgatgaaagaggatggttcggggcaaaaactcaaagtggtatccattgtgggttttggcggactcggcaaaactactctggctaaccaagtatacaacaaaatcaaggatcaatttgattgctcagcttttatatctgtttcgcagagtcctaacataaagaaaattttatttgatatgcttaaagatgtgaccagccgagacaactctgatgatgataagcaaattaaagttgttggggtcaaaggagataaatccgatgatgagaggcaactcattggtaagctcagagtattcctagagaataagaggtacttcatcattgttgatgatatctggagtgcatctgcatgggaacatgtgaggttagctttgcctgagaacagtctttgtagtagaataattacaaccacacggaatgtcaatgtggcaaaatcatgctgctctggttttcaaggttctgtttacaacattcaacctctaaatgagcaagactctaagaagctatttctgaaaaggcttttccactcagactccaattttcctactcacttggaagaagtttcacatgcaatcattaaaaagtgccatggctttccattagctattatctgtttagctagtctgctagctagtaaatctgatacaaaagaccaatgggagcaagtgcacaattctctcagttctgcgtttagttcacaagggatgagcgatatactgctgcttagctattatgatctaccctatcatctgaagacatgcttgttgtatcttagtgtatttccagaggattataagattgatagagatgaactgatatggagatggatagctgaaggtttcatcactgaagtgaagggtcaaacattggaccaagttggagggagttactttaatgagcttatcaacagaaacatgattcaaccaattgacatcaaatatgatggtaccgcaaatgcttgtcgagtacatgatatggtgcttaaccttatcatatccatttcatctgaggaaaattttctcaccgtagttgacgagcaagggtataaatatttgggtaataagattcgacggctctcattccagtccaactctgttgagaatgatgtgaatgtagttcaaaagatcatggacaacttgtcacaggttcgttcgctaagcttctttgaggtaccagagaaaatacctcctttcttaaaattccattcattgagtgtattggttttagtggattatgatttttgtcttggtaatggacacattaaataccttggaagttttttccaattgaagtatttgagagtcacttcttatggcattacccagctcccagatcaattcgggaacctccattatctacaaactctggatatacgtggcagtggaatcgaaaagtttccgccaaccgtggtccgtttgcataacttggctcgtctacttgttggcaataaagtgcaattgcctgatggtattggagatctgcaatccttacaggtgctgtcttctgctcggttgtataaacccctaaaacttgtggaagatctcaggagattgaccaaactaaggacgcttgtgatagttcttcatggcagtgatacacttggtgctcatgagatgggaaggtatgaggaagctttggagtcttctcttactgtgttgggcaaacacaaaattcagtcactcgaaatttcatgttgtgattacttgagagataaattactggatttgttgtgctgcactgttccaaacattcagaagcttgtaatatctggcaattgcataaataggccttctcagcagatgctatctcttgttaatctcgctcacctagacatctatttccagaggattaagcaggaagatctcagtgtccttggaagcatatctactctgctctacctccggttgaaactgcattttgtgcctgacgaaaggctctgtatcagcagccaacaattccagagcctgatggagttcagattcatatattatgaggggggtggcttgaggatgttatttcaacaggaagcaatggcaaagcttcgacggttacagattcggtttagagcagaggaaatggagtctaatgcaggtttcgagttcagttttcatcacctctcaagcctggaggaccttcatgccacgattagttgttatagagccactagaagtagcgtggaggctgcagaagctgccatcaggaatgcagctagtatccatcctggacatctaaaagtttcaatcataagagagtgggaaagccgcatggcggggctcagagagagatgaatcttgagtatagaaatgatgtaaggaggatgttcagaaagaggaccaaatggcagtttcttcagattttagaagtcctttcaggaccagcagattggccaaccacgtaatctgatatatagaggattagaatcagagatccatatcagtgtctgtcacaagaattaagaagctatgcaaggtattgttttccctctagagacaggaatggaattctttttaatgaatgagtagagtcaaggcgcgtgagttgctagttcgattgattgagcttgctacctggctatttgtatctccctaaatatttttcctcaaaattacttttggcaccc

SEQ ID NO: 14806 - DNA, 1549 bp, Oryza sativa
  ref <308>: DATABASE ACCESSION NUMBER: AK098927
  ref <309>: DATABASE ENTRY DATE: 2002-08-28
gggatgaggaggtttagggtttggcctccatctccatcgccatggccgctgctcgcttcccgcccttgccctcactcccaccaccatcgcagtcccttccacgcctccgccaactccggcgcccgccaaggcaattttattctacctggtgcaacggcagcaactcttgtcatgtttggtattctacatgctaggcgtatgtacgaagaccaaaaagttgttgaaaggaaggagaaaggaattgagccggaattctcaccagatttcaaggcttcatttctcaggcttctgccattgcgttcgatgtcacgtttatggggatccttgatggaagtggaacttccagtgttcatgcgccctgccatctataaagcatgggctagagccttccactccaatttgcaagaagctgctatgccactagaagaatacccttctttacaggcattcttcatccgtagtctcaaagaaggttcaaggcccattgatgcagacccaaactgtctggtgagtcctgtggatggtaaagttctgcggcttggagaacttagaggtccaggaaccatgattgagcaagtgaggggcttttcttattctgctgcttctcttctcggtgcaagttcatctcttcatggtgctgaagaagaagatttttctagagagcatacagaacaaagtaatcccgcagattcaaatgcaaaatcatggtggcgagtatcagtggctaaacccaaattatgggatcaaactctgctgagcccaaagaaaggcatcttctattgtgtcatttatttacaccctggtgattatcatcgagttcactctcctgttgattggaacattataaagcgccgacatttctcaggtcatctcttcccccaaaatgaacgtgccgtgcggaccatcagaaacttgtatgttgagaatgaaagggtagtacttgaagggcagtggaaggaaggctttgttgcaattgcagccattggtgctactaatgttggctctatcaaactatatattgaaccagagctaaggacaaatagggcagggtcgaagatactgaactcccagcctgagcctcctgatgatcgagtttatgaacctgtaggcaccggtgtgatggttaaaaagggggaagagatagcagggtttaagatgggatcgacggtggtgatggtatttgaggcacctgtagtgtccaaggcaagatggagagaggatggcagtggcacggtaacgtcagatttcgatttctgtatcaaggctggcgataggatcagggtaggagaagccattgggcgatggacatcgcgggaatgaatgaatgaaggcatggcatggcatctctctctatatatcttgtgttaacatgatggatgatgagtatcgtcgtcgtatcaatgtctctttcgtttttatttttgagctgcggtgccggtgcatgctactacaaaaagacttgtatcttctgtagggaagtaaaggaaactattgccattttgacttgacttgggcgatttgagagagaatgatattcttgttactcagc

SEQ ID NO: 14807 - DNA, 2556 bp, Oryza sativa
  ref <308>: DATABASE ACCESSION NUMBER: AK065347
  ref <309>: DATABASE ENTRY DATE: 2001-12-06
gattgttccactccacggttcaactaaccaccaaattaccagactacccctcggagctcgaggccaagggccgccatggatcgccgggacatggcgagccaccgcggccggagttccactcgtggccacggatggggccgaggctggcgaggtcggggagaaggccgcggccttggtctcagccgcggcgccggcccctcaccgccacctcctccttcctcctccacctcttccttcccggcggcggccagcgccaccgcggctggtaccggcggcgacgccccgccgatcgtgggcagctgccccgacatgtgcccagcgagggagagggcgcagagggagcggctgagggacctggcggtgttcgagcgggtgggcggcgaccccgcgcgcacgtccccttccctcgccgtgaagaaggtgagccatccatttttctccgtactcatgtggaggccattcctgattttttttttctttttgaacttgcggttgggtcgtggtgatgcttcactgctggtcatttttggtgcgtatctgcttggattgttctctccatgcaaatggacaggctatagcttggttccattccatgtggtggtttagtctgttttgattggatttgatatggagctggaagcttttttttgtgcatgcaactgtgcatgtatttttgcttaaaagggtgatcagttgccgttaagcatgtgttggaacaatcaacactttatgttagatgtagctatatagttacatatgccaccaataatgcaataacagcaatgcagcactaaatctgatctacgcttgtcttgtccaatcactgccagagtgtaaggaagctattcgggtagcctagccttcaagagattgaatgtacgatagtgtcagatttatatttattttgtttgatttctttttatagtttattggatgaaatataaccctacttagtacttaccttgtactagtatttttgcaggggtgaagatatgatgaaaggacaggattatcaattcatttaatacttatttttatcttgaatatgtggtcatgtttgcagataaaagaaagcaatgtgcaaaagcagattatgattttttttacattatttatttagcatgccattgttattaggtaaaaagagcttgtatcaacgaaaataatagttatacaatgagatatcatgttctgcacacttgaggtgaaactgtcggaattcatttacttgccactgcaaacttgagtaaaaatgccactgaaaaatcataaaaggtgtgtaagataatgaatctttaccaaccacatagaatagccaatttgccacctgaaaacactgttataattacaaatttgcactacagtttcatgtggtctgaaagatttcatgaaccgcgtgtgttttaagagaatcaggtagctatttgagaattctgtgtatctccgttccttttctaacacttggtttcctgctagttttgcagaactatctcttccacgagtgtacaggcatcagatatacgccctctcccagtcctgcgagaaacaatggattatcttttgcatttattggattcctcagagcatcagtttgagatagttcatgattttatatttgataggacaaggtctgtgaggcaagacctcagtattcagaacatagtgaatgcccaagcaattcaaatatacgaggatgtgataaagtttcatattctatcccatcagaagctttctaggtcttcccaggattctgatgcttcttccctgtgttacctaaacatggagcagctaatgaagtgccttctttctctgtttgatatgtatgatgtaattcacaagaacaattcacagagtagtaaagagactgaatattattccttctacgtgcttctacatttgggctgcaagatacccaaaatggtagattcactctctttgtggtatggccatctatctgcttcaattatacaatcaaaggaaatggtatttgctagatctatattaagattctaccacctaggaaacttcaagcgtttcttctgcgccatagcagctgaaggaaccgatcttcagctgcgtctgttagaaccttttctcaatgaggctcgtgttagagcattaatgtacttcaatcatagtggctacaaacttcaacaccaccctttgacacatttatcagaaatcctaatgatcgaggagctggacctggaaactctttgtagattatgtggacttgaaattagcaacaacgaagatacgaaagcttttgctcctaaacaggcgagtttctgcgtaccagcatcaattcctcaaattaatggcatttacatatcaagggagaatcaaaggtgaaaaaaatattgtagcgaatgtaaaatgtactccattcttcacttgttcagttgtgtgctaaagcacctatacttccaagtatccaatacggaaagcaattgatcccagtaaaagaaaattacgaatgataacagtacattttcttgtattctctccaacaaagtgtattttgtgagcttcgatgagtagttcagtattctcttc

SEQ ID NO: 14808 - DNA, 1644 bp, Oryza sativa
  ref <308>: DATABASE ACCESSION NUMBER: AK065348
  ref <309>: DATABASE ENTRY DATE: 2001-12-06
gatcctctccccccatccccaccccacccgcttcactctccccatcgaccaaaccgccaccgccaccgccaccatgctctcctcctcctcctccgccgccgccgccgccgtcgtgctcaccaccaccagcggccgcgcgcccctcctccacctccccaggacgccacgccctactaccgccgcaaggatcgccgccgcgcccgactcctccagagccagagccggtggcgcgcctctcctcctcggctccgccgttccccggcggcgtggctgggcgctggtatgccgggactcctccctccctggcccacctggagtggaccccgtggcggaggaggaagagaacaggaagaagaccgaggcggtggcggccgccgcggcggcccggattgccagtagcggcggcggcggcggaggaggaggagggagtctcagcgactggacgacgtcggtgcttatcttcggaatctgggcggggctcatgtactacatcttccaactcgcgcccaaccagacgccgtacagagacacatacttcttgcaaaagctttgtaacctgaaaggcgacgatggcttccgaatgaatgatgttcttgtgcctctatggtacataatgggcctctggccactagtgtacagcatgctgcttcttcctactggcagaagttcaaaaagcaagattcctgtctggccattcctaattctttcatgcattgggggagcatatgccctgattccctactttgttctatggaagcctcctccacctccgattgatgaggaagaaattggacaatggccactgaagtttcttgagtcaaaattgactgcaggagtaacgtttgctgtgggccttgggctgattgtctatgcagccaaagctggtggtgaagattggcaggaattcattcgatactttcgggaaagcaagttgatacatatcacctgccttgatttctgtttgctctcggccttttcaccattttgggtctacaacgacttgacagcaaggcgatggaaaaatggctcttggcttctgcccttggcacttatcccttttgtgggaccttcattgtatcttttgctgaggccatcactctcttctctgctagcagcaacaggtccatcagatgataaaacacagtaataacaattatgaagctgagtattgatgaggttttggttacgaggagatgacatggtagaaaggttaagaaccacttatggaaattggattggacagatttagatgccaatctggggcattccacaaagttgacttgttagtaatgcatttgaatggcaaaagtatgaataatgtccttactcagcatggtcagcatctgaattcgtcagaaaattttcaacttggaaggcattggagtaatcagcaatgcttaaatccctggtgaacattctgcattctccccagcgtacatatacaactggtaggaccttttgctactgttgtccatgtatagaaaattttgaccttgtgacagtggtccatatgtaagaagccatggtgctagtacatgatcatgaatgataggctacaaatttattgttacagccaaagaataacaggattcttttggcaccaactacacttagaattacattgcaacaggtgtttactgctct

SEQ ID NO: 14809 - DNA, 2634 bp, Oryza sativa
  ref <308>: DATABASE ACCESSION NUMBER: AK065349
  ref <309>: DATABASE ENTRY DATE: 2001-12-06
gagaggagttgtcgtcagagtatcggtaaccaaccgaaaatgtttcgttgatgtccggatgagctcaaaatatcggacgcttgttcttatccaaatctctcagccacctcctccaccacacattccctttcatgccttcttctctctcctcaaagtctctctcttctcaacgcctctacacagtggagttgcaagccatggcgaggcatcgttgtcggcagtcacacggcggcgtcgacatcggagcaaggtggcgcgcgatagggaggaggtgcttgacctcgccggcggccacatggcggcgcgtggttgggaggaggcaatggacctcatcggcagccacacgacggtggcggggcaaggtggtatgtggtagggaggaggcgatggacctcattagcagccacacgacagggtagacaacgcgggattgaggaggaggtgctggaccttgctggcggccacacgacggcggggtgtagacaacgcaagattggggaggaggcactggaccttgctggcggctacacagcagcggcggcgacgtggcagaggtgctagatttggctgtcggtgaggactcaaccggtcttgggcgaggttatccacatcgtgccgctattcttctcccgcaaacatcagttacttggttctagcagctaggggtagaagaagatgacgaaggtgggtttatttcattggagttttagtgatgttgcaacatattattttatttggttgcactttattgtattaaggtgttttattttgttttgattcagtgttgcattttactgattcttagtgttgcaaccagactatttcagatgttgcatttgattgaaacaattttgttcaagcaatgaaatatttttcctcgatcgatgaaacatctgaaacatttttcatcgagtggtgcaacatgtgaaacactctgtgataggcaacaccgtccgatcttttgcaatagatcggacgtccgatttgtagtagcatccctaaccatcatgtatctttcagatttcatacattttgattaatatattttttgcttccatatttactttctctccgtgtactttccacaccttctttcctgtaattactctattgtggagagttctcctgatccaatcaaccgattagttgatcagcgggtttcatagattataaacattattattttgtttctgcgtttcttgttttagaattaattcacctagctttgtctgggatttctgactgattagaggagtattttggtataagttgtagtatattccctagaaatgttagctagagagaggaactaacatagtcactagattggtgataacccgtttgtcctttacgcgcacattaattctagtgcattggtgttaaaaatcagggtagccgctcacccacaatggaaacgtttccatgtgccgaaagtaagcaatcttttaaagtggttctggtcgtgccaaaataccttttgactccgatagtcttctccagatctcttcaattagatagatgcttttacctagtgccattcgtgttgtgaattgtctattattacctgacttaataaggtaggaggaatgaatgttttaggccattcgtgcatcctttgggatatcaatatatatgataccacggaatactccttgaagtactacatcggtaatttcacgtgcttaggaaacttttttgtaggagcattagaaataccaatacctacaaagttgtttatattaaagggttaattgatattcatatatcagttactattactaaaaaagaacttactaatgtacaatatatgtaaataagttactcccaatttgatgcaagacctagattcatcaaacatatcaccatccctactaaatgcattatgtaacatacacatgtcgtttactttgacgagtttttttttccacatacctattaattttcacagacctcgccgacggggccgctgccccctcccccaccgcagctggcgccgcgtctccccctcctggtcacgccgtcgccgacagagaggggaggggagggggaggaggaggaggaagggtaggggaggacgcatctggagggagaggaggagacgcaaatgacttaaaaaggcgtggagatatcgaggagataagggcggggaggcgcacacgtgcgacccggcgtgttttttcggatttgtagtcccagttggtgctaccaatcgggactaaagtgatgatatttaattccggtttataataccaatcgggactaaagatccttggggcctgacacggcctatcaactttttgaagcgggacaaaaaaaatgatcttaccaaccaggactaaatgattgtatttacggttaatgatggtcgtggtggtgcgtatgtgatagaaaaaaaatcgaagtacatggagcagagccaactaagattttattcgcaaggggatggatataagaaggaaacaccagctttgctgagtgggacatcatttatcttcccagagaccaagggaggcgaggaattcacgatcttgggattaaggttattgctttgcttagcaagtggttacttaccagttaccaccgatgaaatgtggcaatagttgctacgcaataaatatttgggatcaatctatc

SEQ ID NO: 14810 - DNA, 2141 bp, Oryza sativa
  ref <308>: DATABASE ACCESSION NUMBER: AK065350
  ref <309>: DATABASE ENTRY DATE: 2001-12-06
gtatttgacgccatctgctcgtctgcctcctccccgatttcctctcctctctctctctccctctctccatccctcccggcgtccaatctgttctgcttctcgctgcgcccccggaattgtggtgaggttttgtgagggtgtgggggaggaggaggatggcggaggaggtgtatgtcgcgtcgatcgaccagggcacgacgagcacgcggttcatcgtctacgaccgccacgccaagcccgtcgcgtcgcatcagctcgagttcaagcagcactacccggaggctggatgggttgagcatgatcctatggagattatggagagtgtgaagatatgcatggcgaaggcacttggcaaagctgcagctgatggtcataatatggatgttggactgaaggccattggtattacaaatcagagggaaaccactgttatgtggagcaaatccacaggccttcctctatacaatgccattgtatggatggatgctcgcacaagccccatttgcaggagattggaaagtgatctttctggtggtagaacccactttgtcgagacatgtggattgccaatcagtacctatttcagtgctttgaaggtgttatggttgatcgaaaatgtggatgccgtcaagaatgcagtccgagctggtgatgccttatttggcacaattgacacctggttaatctggaacctcacaggaggcattggcgggacagatcgtgatggaaataaagtatttgggcaccatgtcacagactgctccaatgcatctcgcacaatgcttatgaacctgaaggcacttgactgggacaaaccaacacttgagacgttaggaattcctgctgagatattgcccaaaattatcagtaactcggagagaattggtgtggttgccaatgggtttcccttggcgggcgtccctattgctgggtgcctaggagaccagcatgctgcaatgcttgggcagctgtgccagaaaggtgaagccaaaagcacctacggaactggtgccttcattcttctcaacacaggggaggagcctacccaatcctcccatggtcttcttagcacgattgcttataagcttggcccaagcgcacccactaattatgctctagaaggctccatcgcaattgctggtgccgcagttcagtggttgagagacagccttggaatcattagcacagcagctgatattgaaaagttggctgatactgtgcaggattcaggtggaatatactttgttccagcattcaatgggttgtttgcaccatggtggagggatgatgcaagaggcatatgtataggaatcacacggttcactaacaaggggcacattgctcgagcagtgctcgagagtatgtgctttcaggtgaatgatgtcctcagctccatgcacaaggatgctggggaggcaggagaagtgaagagtgcagaaagggagttcctgctgcgcgttgatggtggtgctactgtcaacaatcttctcatgcggatccaggctgatttattgggtagccctgttgtcagacctgctgacatcgagacaactgcccttggagctgcgtatgcagctggattagctgttggagtctggtcgaaggaacaaattttcgctggtttgcacaaggagaacaccagagtcttccgcccgaaattggatgaggcccacaggaggaagagagcagactcctggtacaaggccgtttcaagatcatttgatttggctgacctttctctttagaatgacgagggatttgtgaattacttctggattgtataaggtgcttagcacttgttatgtccatgaataagttggtcaatggaacatccttcaaaagaattagttgattccccacgctttgctgctggaattattaagtaattttcaatatacttttttaacaattgagataggagtaaaaagaaaaaataatgaaatgtcagtgtttattcagtacttatcctgaaacaaacaaatgatgcctgcgctttaatgtggaacatgttgatgagtatatgttaaatattataaaaatgatagatagatttattaaaatattgtaaaaatgatgtaagagatgattggatatgtttgtatgttgatttgtaaaattaaatagattatagatgatattgc

SEQ ID NO: 14811 - DNA, 3275 bp, Oryza sativa
  ref <308>: DATABASE ACCESSION NUMBER: AK065351
  ref <309>: DATABASE ENTRY DATE: 2001-12-06
gacgactagagagagaattgtggcgtgggggagtcactgaaaccgtgaaacgaaagctgattatggatctggtcgtcggcgcgtcgagcggcgccgtgaagtcgctcgtcaacaagctgggcaccctcctggcgcaggagtacaccctcatctccggcgtccgcgacgacatccagtacatcaacgacgagctcgccagcatgcaggccttcctcagcaggctcaagcgggacgtcgcccacgacgagcagcgtcaggactggatgaagcaggtgcgcgaggtcgcctacgacatcgaggactgcgtcgacgacgtccgccaccgcctcggcggcgagccccgcgggaccggcacagttgtctccctcaagaggacgtggtacctgctcaccacgctgtaccagcgctgctgcatcgccaccgacatcggcaacctcaaggtcagggcgcagcatgtcagcgagcggcgcaccaggtacggggtggagaacctcccagcaaacagaaatggtggcggcaacaacaactccggcgctcccggagaccatccagctcctctcccccggctgattggcaccactgaacctgtaggcatggacgacgccatgaacgaccttcaaagatggttcatggtctcaaagcagaacagccaaatcagttaccttgctatcgtcggatccggtgggcttggcaaaaccacactcgcaatgtcattttaccgcaagtttggagatgagtttgattccagagcgttcatgctcgcgtcgcagaagtttcatctcccaacagttttgagaagccttgtcagccagttccatcagaagcaggtcagcgcttctgaggatgctcttcacggaattgaggaatggggagttgaagccctcaagaagaagctcgctgatcaactgcaaggcaagaggtaccatatcttgattgatgacatatggtctgtatcagcatgggaaagtattagggattcattacctaagaataataagggtagttgcgtaattgtgactaccaggtttaactctgtagctgaagcctgccgccgtcaaaatggtcatgtgcacaagctcaaacagctcgatccagtgaactccagcaaattgtttcttcaaataatatatgctaatgatccgtgtcccactccaaccattaatgatgagattgtcgtgaagatgtgtggtggtctgcctttggccataatagtagtgtcagggctcattgctagtgaactgaaatcaaagattggaaagccattggatcagaaattgattgaggtggagaaggctttaagggcagagttgggaaacaatctcaccacagaagtagtgcagataattaaccactgctacaaaaatctgccacctgaccttaagacatgtttgctctacttgagtacatttccaaagggccgcaatattagcaggaaacgattgataagaagatgggttgctgaagggttcgttactgagaaacatgggcagacggcagaggaagttgcagaagacaacttcaatgagctcattggcaggaacttgattcggcctatcaacaacagcagcaatgggaaggtgaagagctgtcaaattcatgacatggtccttgagtacattgtctccaaatctggtgatgagaatttcatcactgtaattggtagccactggcagacaccgtttccaagctacaaggtgcggcggttgtctgtccataaaagtgataggcaagaaactgatctagtagagaggatgaagttgtcgcatgtccgatctttgactgtgttggagagtttcaaagctcttcattctactatgctcaaattccagatactgcaggtgttggatcttgaaggatgcaaggacttgtcgtcaaaccagctcaagaaaatatgtaatatgcatcagatgaagtacctaagcttgcgtgggacggacatatacaagataccgaagaaaataggcaggctggagtatttggaggtacttgacataagggacacggatgtcacaaacttgcctgcatcagtggagaggcttcaacgaatggtccatctattggctggcaataaaaccaagcggagagcattgagattaactgaaggaatcacaaagatgaaaactatacagacactgtctgggattgagatctctggaaggtcaaccaggacagcagctggggagcaggcaccagttcttgaagtcatcagaaatgctacaaccaccgatgccaaggatggagatatcgcgggcttgcaaggtacccgtaaggaaggcagcaaggtggatatgccaaaacaattgcgtccgctagcagccttggagaagctcaccaaccttaagaaacttgccatttacaggcttgttaatttccaagcgaaagatgatgaattgttgctctctgctattgagcatttgagcagttgttctctcaagtttcttgcaattgatgacagtttcacaggctttcttgacagatcactgagttcttcacaagcacaaccagaacacctttacacccttgagctttctggcagcttgtttaaagtgccagaatggattgaccgcttgcacaaccttgagaagcttactctgtccatgacttcacttacgacagatactttggtgactcttagtaggcttcctgagcttttctctctcattttttcacttgatgcagcaaatggtatttcaaatatcctcaaaactgtgcagaagaatacattggagtcaggtggtaaaatctttgtgccggatggggggtttacaaagttgaggttgctccgttttacggcaccagtgctaccacctctgagcttcctagaaggggcaatgccagagcttcagaggcttgagctgaggttcagaatcattgagtttgtatacggcctggaaaacctttcaagtctccaacaggtatttctgacctttagcagccaggcacctgaagatgcgaaagagaaggtctctcagatcaaaggactggcaagcaagattcgaaaggctgattcctccaacattagtgtggtgatagatgagtacaacgaattatcaaaagaacaatagattacctagtcatgatctccacagttggagggaaccagtgtgttatcgatgtgttgtacctactccatctacagtctgtttttgttttatgattttcagatctatttacaattttttgtactgtttttttgttgagctgtggcatctttgttttgtctgctgtactcccaaaactctgctagtgaaaaaaaatatatcttctgttttcct

SEQ ID NO: 14812 - DNA, 2566 bp, Oryza sativa
  ref <308>: DATABASE ACCESSION NUMBER: AK065352
  ref <309>: DATABASE ENTRY DATE: 2001-12-06
gctatgagatttaccagattatggcctgcctcccagttttcatctccttgctgttcctcatctcttcctgcaaaggcgatgaccagctcacacaggcaaatcgactgatctcccccggcgacgtactcatctccaaaggcagggtcttcgcgctcggcttcttctccccaacagcctccaaccagagcttcttcctcggcatatggtaccacaacatctccgagtccgagcgcacgtacgtttgggtcgccaaccgcgacaacccaatcaccaccccttcattcgcaacgctcgccatcagcaacagctctaaccttgtcctgtcggattccggcaatcacaccctttggacgacgaacgtcacggccaccggaggcgacggagcttacgcggcgctgctcgactcggggaacttggttctccggttgccgaatggtacaaccatatggcagagctttgatcacccaactgacacccttctgatgggcatgaggtttttggtgagctacaaggcacaagtcgccatgcggtgcatcgcttggaagggcccagatgacccctccaccggagacttctccatcagcggtgatcccagctcaaaccttcagatcttcctttggaacggtaccagaccatatatccgctttattggatttgggcctagcagcatgtggttttcggtcttctcattcagtacctctctcatctacgaaacatcggtgagcacggatgatgagttctacatcatatacacaacctctgatggctcaccttacaagcgtcttcaactggactacacgggtaccttgaagttcctggcttggaacgacagcgcgtcgtcatggacagtcgtcgtccagcgcccatcacccaccatcgtgtgcgatccctacgcctcgtgtggtccattcggctactgcgacgcaacggcagccatcccgaggtgccaatgcctcgatgggtttgagcctgatggctccaactcttcttcgagaggatgccggaggaagcagcaattgagatgccgaggcagagatgatcgcttcgtgaccatggccggaatgaaggtccctgacaagttcttgcatgtccggaatagaagcttcgatgagtgcgcggccgagtgcagccgcaactgctcgtgcacggcctacgcttacgccaacttgaccggagccgaccaggcaaggtgcttgctttggtcaggggaacttgctgacactgggagggccaacattggtgagaatctgtacctccggttggccgactctactgttaacaagaagaagagtgacatcccgaagatcgtacttccggttataacaagcctgttgatactcatgtgcatatgtcttgcgtggatatgcaaatcaagaggcatacaccgaagcaaggaaattcagaagaaacatagactacaacatttgaaggattccagtgaacttgagaatgacaatctagaacttccatttatttgcttagaagacattgtcactgcaacgaacaatttttctgatcacaacatgcttgggaaaggtggttttggaaaagtttacaagggagtgttggaaggtggcaaggagattgcagtcaaaaggcttagtaagggttctcagcaaggtgtggaggagttcagaaatgaagtagttctgattgccaaattgcagcatagaaatttagttaggcttatcagttattgcattcacgaagatgagaagttactcatctacgaatacttgcctaataaaagcttggatactttcctttttgatgctaaaagaaaatcagttctcgattggacgacccggttcatgataatcaaaggtatagcgagagggcttctttatttgcaccaagattcaaggttaacgataattcacagggatctcaaagcaagcaacatcttgttggacacaaatatgagtcccaaaatatcagattttgggatggcaaggatctttgaaggaaataagcaacaagaaaatactaccagagtagttgggacatacggttacatgtctcctgaatatgctttggaaggctccttttctgtcaagtctgacacctacagttttggggtgctactgttggagcttgtaagtggcttaaagatcagttcgccccatctcataatggatttccaaaatcttataaccttcgcgtggagtttatggaaagatggaaatgcaatggatttggtggactcatcaattcgggagagttgtctacttcacgaagttttacgatgtattcaaatagcactttcatgtgttcaagatgacccaactgccaggccactcatgtcatccattgtgttcatgttagagaacgagacagctgctcttcctaccccaaaggagtctgcttatttgacagctagggtctatggaactaaagacactagagaaaacaaggaaagatctgtaaataacgtgagtatcacagcactagagggacgttaaatgtttattacaccattccctgtttagtctataaacttctgtagcttgtagttgtacacttatacattagcaattcaaatttatacacagaaaatgttctgagc

SEQ ID NO: 14813 - DNA, 2779 bp, Oryza sativa
  ref <308>: DATABASE ACCESSION NUMBER: AK065353
  ref <309>: DATABASE ENTRY DATE: 2001-12-06
catcaccattctttgcctgtaaataatacccgtgtaaaaggacctgcctattctccttcaaattctcccagtatccatagaaaacatgacattccagttgctgcacctccaaagcaacattccagcaatttaccaccttcacatcataggccccacaaaggtatgctgacagtaaaaaaaaaaaaagtactcatctcactaaggcaatgtttgctgcaggatcctttcctgtcataagccctactccacataaagctgataatgcttctgcgacgaaacatggacgttctggcttacaccatagtcctgcacctgcacctgtaggcttgcctccatctgaaggaaatgcacgaggaaatcctgcgtatgcaccacgtcatccccatgaatatcactcgccttcaaattctccagaacctggtctaccacctgtgaatccgcccgacagtcatgcatttaaaaagcccaagagtttggcaccagcaccccaatcatttccgccaccgcctccgagttcatattgcatggcgttaaattgtcaagatcctctgaccaatagtctccctggaactacatgtctttgtgtgtggccaataaaagttgagcttcgtttaggtatagctttgtacacattctttgcattggtatcagaacttgcacaagatattgcatctggagtgctcatgaaacaaagtcaagttcgtgtaatgggagcaaatgctgcaactgaggacccagagaaaacagttgtccttattgatcttgtgccactgggagaaaaatttgacaaggcaacagcacttttagtatttgaaaggttttggcacaagcaggtcaacataaactctatgcattttggaaactatgatgtgttatatgttacctaccaaggtcttcctccgtcgccaccaacagctcccaggatgaacaatggtcttagcaatgttaatgatccaaggttgcatccacttgctgttgatgtgggaaaccacagagaaacaaaaagcaggggcataattgttataattgttctttcaagtgtctttgcttttattttatgttctggagctgcgttggtaatttgtttcaagattagaaaccgcaaccatttaactgaagagtcacctatgccaccgaagcctgcaggtcctgggtctgcagttgttgggagcaggctaggaagcagacctatttcagcatctccatctttcagctcaagcatagtgacatataaagggacagcgaaaacatttagcttgattgagatggaaagagctacacaaagatttgacaactccagaattattggcgagggtggttttggacgtgtttatgaaggtattcttgaggatggagaacgggttgctgtcaaaattcttaagagggacgaccagcaagttacacgggaatttttagctgagcttgagatgcttagccgattgcatcacagaaacctggttaagttgataggtatatgcacagaagaacatatccggtgtcttgtgtatgagcttgttccaaatggtagtgtggaatctcacttgcacggatcagataagggaactgctccacttgattgggatgctaggcttaaaattgcacttggtgctgcacgtgctcttgcttatttgcatgaagattctagtccccgtgtcatacaccgtgacttcaagtcaagtaacatcttattggaacatgacttcacccccaaggtgtcagactttggcctagcaagaacagccataggtgaggggaatgagcatatttcaactcgtgttatgggaactttcgggtatgttgctcctgaatacgcaatgactgggcatcttctagtaaagagtgatgtctacagctatggtgtcgtcctccttgagcttcttaccggaaggaaaccggtggatattttgagacctccagggcaagaaaatttagttgcatgggcttgtccttttcttactagcagagatggcttggaaacaataattgatccgtcacttggaaatagcatcctattcgatagcattgcaaaagtagcagctattgcttctatgtgcgtgcagcctgaggtggatcagcgcccatttatgggtgaagttgttcaagctttgaagttggtatgcgatgaaggcagcgagttcaatgaatcaggaagtttcagccaagatttacatattcaggattctgggattataagtagagcaagcctggatgtggacgtagaacctgttgtatctgctgagctgttcaatgcatcagcacattatgacactcttgatgcatctggttcttttcgacgatattcaagttcaggtcctcttagggtaggtagaaccgggcacaatagggagaggggtttatcaactggtagctcaagcgagtactgtggtacacaaagattcaggatagattcagagtagtcagcttgcaggcttcttttgacgatgtggggctgtgttcattggcttcttttcgcaagccacatttcatattcattgtgaatatctgtgaagagcactgagcaatatcaccagcttctgccgggacaaggaccagttttcgaagagcactgagcaagactgcaagagtaccaacatctcgtcccgtcccgtctctgtttatacagttctagagatctataaagccggttccttttttttagtggaaagtaaagccggttcatcaactgcggttcatcaactgtaaatgttcatgtaccttcccaagtgtagccattcctttcgcatggaaggtaagtgaaatatcagatgaaatgaagggt

SEQ ID NO: 14814 - DNA, 2844 bp, Oryza sativa
  ref <308>: DATABASE ACCESSION NUMBER: AK065354
  ref <309>: DATABASE ENTRY DATE: 2001-12-06
ttctataaagaccaatttgtaaaaaaaaagaacggttgtatttgcttcctccgttaattttgtttcctgtctgtggatctgtgatgcatacattcaagttatgccctgacagctgtggccaggctatgacaaagagatgctttgtgacgatacatttaattgccgccgcgatttggatcctatatcattcacgtaaataagactaactaaaatttctaatatgaatagtgatagaggttctgatctgatttcatttggttggctcagtgtacagctgccgtctacggcggtcgattcagtgaaaaatgacaggttcgatccatagctaaattttttagtaatttttagttcttaagtatgtaccataaggtaccaaaaatttagtataaaatttggtacctaggtattatgaggtaccactttttctattataaatttggtaccttcttacggaccgtaaaattactctaaattttttttatttagctagaactagccagcactatactgattgtacattatttcctatggtcgcacacttttagcaggataatcacttatttctatgactaacatcttgtatattgatgcatttatagcatagatatgtatgtaaatcctgccatgactctgaatcctggactctaaaagtatccagttgatgtcaatgggtgtatatgcatatttcatgatttttaagattgctaatgcgatgaagaatagaaaaatggaggatctagcttctgagttaatagcttctacaattagacatagccaaatgatgtaagaaccaaatttgttacagtgtagttattggcagaatgaacgtacaaatttgtcagtcttttctgcttcatataacagtggtttatgccattatatgatagtagaaatatataaggagaaataatgtctagctgcgaagtgctaaggtgcctctcatttaaattacttctcattggtcaagcatacacaataacatggtatttgtaggattttacatgcttggcaatagttgaaagaacgtgctctagcgagagatcattagactagaatagttcatttcggtcatggaactgtatttcaccttcaatgttacagtggtacatatgattatcatgatcattttccatttggtgctcacgataatcataagctcactagaccgggcttattagtgagcgagcagctcatggattggattgtcaaaactcatcggccaggctgactccataatgctgagctaggccaactatcccaacctggtagcctattctgctgtgtcttttcattgcgtaaagctatctcgtattttggttatatagtctctaaaattgaaatggaatgggtgctggaacctttggagtcatgcacgatgttcattataaaatggattaaagtgataatttctttcttggttagttttttgtccagttccatgaaagggatcaattaagccactaaatggttggacaaactaattttcggaaaagtggtcagtgtttacattctgaacttctgaccagactgaagaaacaccgtcttattccaataataagacagttcttctgcctccgacgttggccgccttccagtttgcaatattttgttcttcctcatcctatcaggttctgttctgtatagctatatctttcactgctaccactgttgatgacttcttcagactctgagttaacgaaaagtgcagatcaattcagatttttatgttttcaggaatcattctggctgctcctgcccaagatgctaggtgtacatctacattaaagcagtcagagctggcttccagtaaggattcatcatttacaattcatttacacaaggtttatatcctatgtctgaaatgaaaatatgttttaaaccagaaagaatcattatctaaaaataaccagaaagaatggttataattcaaacaatcaatgtcttttgttagtgaagtgtgactaatgaatacagcatcacttgttagcatgatgtatttgagatgattttcttgcatgatccgtatagcacaactagacaccatcaactggtcgtgatcttggtgtgtgggtggataagtgcctgaacatgtttgctataagagcatcgtcaatttaattcgacacatgttgtattccagtgagaagtgactgaacgtattttcagcacacataagctaggtggtcctaggatgtgttttgccaattggtcaggtatgagttcaaatagtaaggtggactggttaatcacaaatgaaattttaaggtgcatctcaagcgttggcgtgaacaaaaattcagagaagaggaaaatttttagtgaaatgggtaattttgtttccctgtattgatatttcattactcactgtaagagacatgatggcaaaaagatagtttactcctaatggttcaaaaaaggttttggatgcattgtatggcacaaagtgcttatggttaattagagaaaacacagaaaactcctccccatcagaatcgatgagacggatgagtttaggcaggccacgcacattgcaaaatggttgcataaactcggtgggctgcagatcaagccattcccaattgcctcaacagagcagttgaaagatggccagttggagaaaaataaactcaaggtttatgactgcaaagcatattgaaggtgtacacattaagattgtctggcaaagaggaaagaaacagattaagattgtctggcaaagaggaaagaaacagattaaagaaaacatagcataattgaaattgagatttttttaacagggtatttgcgttgttgatctgtacatgaaatgatatttatgaattaaataaactttgaaaaaattct

SEQ ID NO: 14815 - DNA, 1395 bp, Oryza sativa
  ref <308>: DATABASE ACCESSION NUMBER: AK065355
  ref <309>: DATABASE ENTRY DATE: 2001-12-06
gagtcagctatagtggcttctaacgcaaacaagcgaagcgtccgaagagacgcgacgcgtggcacagtactctagctagctaccgcctcccaaggaagaggagaaatcgaaggcatccaaccattcgtcatgcatctagcttccacaaactttcgatcgatttcactacaagaagaaccctagttagttagcaagtataattagctcactagctagtactagcagccatggttgttcaattgatgctcttcttccatgacaaattcatggctccaatggcagaggagccactgcccttcgtcctcatcatgatcatcatcttgccgctgctggtgcttcttcactactacctgtctgcatcaaccagaagatcatcggcggcgagcaagagcaacgatgatgtcctgccaccgtcgcctccgaggctgccggtgataggccacatgcacctcgtcggctccaaccctcacgtctccctccgcgacctcgccgagaagcacgccgccgacggcttcatgctcctccagctcggccaggtgcgcaacctcgtcgtctcgtccccgcgcgccgccgaggccgtcctccgggctcacgaccacgtgttcgcgtcgcggccgcgctccgccatcgccgacatcctcgcctatggctcctccaacatctccttctccccctacggcgactactggcgcaaggcgaggaagctcgtcgccgcccacttgctcagccccaagaaggtccagtcgctccgccgtggccgcgaggaggaggtgggcatcgccgtcgccaagctccacgaggcggcggccgcgggcgccgccgtcgacatgagggagctgctcggctccttcaccaacgacgtcctgtgccgcgccgtgtgcgggaagtcgtcgttccggcgagaaggccggaacaagctgttcatggagctcgccgccggcaacgctgatcagtacgctggcttcaacctggaagactacttcccgagcttggcgaaggtggatctgctgaggcgagtggtgagcgccgacaccaagaagctcaaagagaagtgggacagtgttcttggtgacatcgtaagcgagcatgaaaagaaatcgtcgctgcgtcgtgacgatcaagtacagatggatgatgaccgtgatgatgatcaggaggagcaagagtcagatttcgttgatattctgctcgatcgtcaacaggagtacaatctaaccaggcacaatatccatgccatattgatggtaattaatcacttatacatatgttcttctgaatttttctttcttttttactattaattctatcatctagattaatcgaaaattaggtaattgagttttgtacatgtgtttcttccaaacaacgttaatataatatatatattttgagttg

SEQ ID NO: 14816 - DNA, 1278 bp, Oryza sativa
  ref <308>: DATABASE ACCESSION NUMBER: AK065356
  ref <309>: DATABASE ENTRY DATE: 2001-12-06
gtccctgaattccgtcgcccccctcctccgcactcttgcggtctcgccctcctcgcgatcgactcccctcgccccgactcaccgccggtctcctcccctccgccacagattcctccctccctcctctttgcaattccaccatcctctttccagaggggctctcacccttgctccctcccctaaccctaatctcgcccgcgcccccaccagcttctaccgctgaccgtcgcgccgtgccgccccgcctcgccctcttcaaccgccgaccgtcccgtcgccctgcatcttgcccgcgccgccgccgtcgtgttatcccgccaccggtactgcggatccccaatctccgtcgcgatcaacagcaaaactactcttcaagaactgtaacctaagaacatgagtgtttgtgcaaaatttagtgggttattggggtaaccactaggtagtgccctgtccccctgtgttcctgctgcaaacacctgggaggctggtaggttgatgtattttgtgatttctatcttggatgctccagtgattcaatgacaaccaatgtgttgcgtttagtgaaattttgggatttcaacctttggtcatttcattaactgcactttttttggccatgagaattatcaactttaattacaatgtatatgagcataattttctgtagagtgttttgtagctgaagacaactttaagcaaatatctcatttaccattatattgaaggcctgctccatcaagtcttacaaatttatgtgtaccataaactagctccagtattctgccgaatttacctacttcagacctgcttgctctatatgtcaagtacctacttcagtacttgccatttctttaatttgttgagggtatatatgtgttatttctttgttttcagcagaattagcatggatcaggcaaaagggttgacgtgctccagtgtaagaattgcttgagactcggttgtcaagagcgctgctttgacgacttcctcctcggcctccgcctcaactgccaccgccgccactgccgcgtcgtccgacaatatttggtaatgcacttgaggtgatcgactgctgattatatctctttaaagtgaaagtacctctattactttgtaagcacagtaaaacatctcaatgatatgatctgttttttttgcaaggtaaataattgctcaagctacctaataatatttacagataatgaaaatgatatttaattggaaccaatcctttactaatacgaactggttgcacatacttctttttcttccaatgcc

SEQ ID NO: 14817 - DNA, 1645 bp, Oryza sativa
  ref <308>: DATABASE ACCESSION NUMBER: AK065357
  ref <309>: DATABASE ENTRY DATE: 2001-12-06
gctttgggtttcttccccttctcttctccgggcatcacaggatcgaggcgataccggaggagcccccgccatcggccatcctccttcgcgtcgcgcctccggatcccgagcttccagaaagccgaccggttcgtcggccggtcgccggagatggaagccaatcacgcctcgcgggggcgccgcaccctggaggagatccggcagaagagagccgccgagaggatgcagcagcagcacaacccggccgccgcggcgtcccttgtcgacccttacgggaacccaggagccggagctgagcttcttggtcgagttagagaacttgaaaatgggaacatagcattggagagggaaaaccaaatgctgttatccaagattgctgagaaggaagtcgagaaggattccctcgttaaccgcttgaacgaccttgagcggaatatagtaccctccttgaaaaaggctgtgaatgacatttctttggagaaagatgccgcagctgttgctaaggaggatgctctcgcacaactaaggagcatgaagaaacgactgaaggaggcagaagaggagcaatacagggcagaagaggactctgcatcattgagagcacagttaaataccctgcagcagcaagtaatgagcaactcttatactggatttccagttggtgtatcaaatgagcacattcttgctatggaaaaggaggtagaaaatttgcaggctcagctgaagcaagaatcattgctaaggcagcaggagcaacagaaactttctgaagagtccctattaaggcaacaagagcaacaaaagctaactggagaacagtctcatgctgcttccttggttgcggaaaagaaagagttggaagaaaaaattgctgccttgacgaagaaagcatcagatgaagcttctgaatttgctgcacgcaaggcattttcaatggaagatagggaaaaacttgaaagccaattgcatgatatggctttgatggttgagaggctagagggcagccgccaaaagttgttaatggagattgattctcaatcatcagaaatagaaaagctgtttgaggagaactcagccttgtctacttcataccaagaagctgtagctgttacaatgcaatgggaaaaccaggtaaaagattgtctcaagcaaaatgaagagctacgctctcacttagagaggttaagacttgagcaagctactctattgaaaacaagtaataccactatccagccagatgggcagaacgagaccagcatttcattcccgccagagtttgtaactgagaatctctccctaaaggatcagctcatcaaagaacagagcagatccgaggggttgtcggcagaaataatgaaactttcagctgaactcagaaaagcggtgcaagcgcagaataacctcgcacgcctatatagacctgtgttaagaggcatagagagcaacttaatgaaaatgaaacaagaaacatatgcaacgatccagtaattttggatgaccgattattttccccccttacctgcctacacacaaaaggcagagcttacagcaagtaacgatcatttgtagagttacaatcaactatagtcaacattgttgtacgtgtacattcggttcactgttgtattatattggaaatgggggc

SEQ ID NO: 14818 - DNA, 1618 bp, Oryza sativa
  ref <308>: DATABASE ACCESSION NUMBER: AK065358
  ref <309>: DATABASE ENTRY DATE: 2001-12-06
gaaaggcccatcacctgcatcgttccaagcgcagctcaatctttgcctcgtcaggttttgctcattggcgtctccatggataggctcctcgcctgcctccttggcttcctgttgatcgcttcagtaggaagccatgccgctcggactccggagcaatactggaaatcagctcttcccaactctcccatcccgagctcgctctctcagcttctcagcactgcaggcggaggcacgtcggtgaacgtcggcgggggcggcgtccatgtcgacgcggggcacggcaagcccggcggcacaaccgttgatgtaggcaagggtggcgtcggcgtgaacgtgaagcctggttacggcaagcccggcggcaccacggtcggcgtcgggaagggcggcgtgggagtcaacgtcaagcctggctatggcaagcccggaggcaccagcgtcggcgtcgggaaaggaggcgtgggcgtgaacgtgcagcctgggtacggcaagcccggcggcaccaccgtcggcgtcggtaagggcggcgtcggcgtgaacgtgcagccaggctacggcaagcccgggggcaccaccgtcggcgtcgggaagggcggcgtcggcgtcaacgtgaagccccggggcaagcctgtccacgtcaacgtcgcacctttcatctacaactacgccgcaacggagacgcagctgcacgacgaccccaacgtggcgctcttcttcttggagaaggacctccaccccgggaagacgatggccgtacatttcacggccaccaccgccggagagaagttcctccccaggagcgaggccgacgccatgccgttctcctccgagaaggtcccggagatcctcagccgcttctccgtgaagccgggctccgtcgaggcggcggagatggcgcagacgctgcgcgactgcgaggcgccgccggcgcagggcgagaggaaggcgtgcgccacgtcgctcgagtccatggtcgacttcgccacgtcgagcctcgggaccagccacgtgagggccgcgtcgaccgtggtcgggaaggaagggtcgccggagcaggagtacaccgtgacggcggtgaagcgcgcggcggccggcggcgaccaggaccagctcgtcgcctgccacgcggagccgtacgcgtacgccgtgttcgcgtgccacctgacgcgggcgacgcgggcgtacgcggtgtcgatggccggcagggacggcacgggcgtggaggccgtcgcggtgtgccacgccgacacggccgggtggaacccgaagcacgtcgcgttccaggtgctcaaggtgaagccaggcacggtgccggtctgccacttcctgccgcaggaccacgtcgtctggacacgcagcggctagctgatgatcggctgccaatcttggcgcctgatcgagttggttgcttatgctctagaatctagctaggctccatgcagatgctatactgtatggtgtcttactatcttacatatttgtatgcacgcaatttggttctttgttatttggatggtgttgccagcatcgccagcctgctagtagatgatacgggtgggcttgctgtttgatgtatagttttagcatgcgggtgcaataaacagacaagtatttactt

SEQ ID NO: 14819 - DNA, 2034 bp, Oryza sativa
  ref <308>: DATABASE ACCESSION NUMBER: AK065359
  ref <309>: DATABASE ENTRY DATE: 2001-12-06
gagaaaccacacacgcgtaaacgacgacacgcgcgccggcgccatgggcctccccggccggcgcaacccgttgctgagcgcgaggcgcgcggcggcgtccctccggaggagcagacggctgcccgtctatgtcgccgcagtcttcttcgtcgcctccgtcctcctcatgttccgcgacgagatcctttatctgacgacggcaaggtcgccgtcgtcgtcgttgccgacaacgggaggatcagccggcggcgccgggctcgcccggaaggaggagctagtatctgtcaacaagccagtcttgcttggtcacggcggcaaaccggagaagcaccacagcgtgacggagaggcaccggccgaaggtcagcgcgaagaggcggccgaacaagaaggcggccaaggcggcgaggaagaagttcatggcgtcgccgtcggtcgccgccggcgccgaggtgaacgtgccggagacgtgcaacctgtccaagggcaagtgggttcgacaacgcgacgtacccgctgtaccgcgagcaggagtgcgagtacctgacggcgcaggtgacgtgcacgcggaacgggcggcgcgacgacggctaccagaagtggcggtggcagccgagggactgcgacctcccgctcgccttcgacgcgaggctgttcatggagcggctccgcgggaagcgcctcatgttcgtcggcgactcgctgaaccgcaaccagtgggagtccatggtgtgcctggtgcggccggcgctgtcgccggggaagagctacgtgacgtggtgggacggccagcgggtcgtcctccacgcttgggagtacaacgcgactgtggagttctactgggcgccgttcctcgtcgagtccaactccgacgaccccaaggcgcacagcatccgggaccgcgtcatcaagcccgaggcgatcgccgcgcacgccggcgactgggtcggcgtcgactacctcgtcttcaacacgtacatctggtggatgaacacggtcaacatgaaagtcgtgaggccgacggggaagacgtgggaggagtacgacgaggtgggtcggatcgaggcgtacaggagagtgctcgacacatgggcgacctgggtgaacgacaacgtcgacccggcccgcacgtccgtgttcttcatgagcgtctcccctcttcacatcagcccggaggcgtggggcaacccgggcggggtgcggtgcgcgaaggaggacgcgccggtgcagaactggcacggcccgctgtggctgggcacggactgggacatgttccgcgcggcgaggaacgcgtcccgcgccgcggggcgcgtcccggtcacgttcgtggacgtgacggcgatgtcggagctccgcaaggacgggcacacgtcggtgcacaccatccgtcagggccgcgtgctgacgccggagcagcaggccgacccggccacgtacgcggactgcatccactggtgcctccccggcgtccccgacgtctggaacctcatgctctacgcccgtatcctctccaggccgccggcggcggccggtcacgtggcgtgaccgaccatatgtgtacagatactgtttgtttgtttgttcgttcgttgatgggttgccagctgcctgcacggttagttttagtttttgcctttcgcttttgttgcttctcgattattattttctcatatgcgagatataaaggaggtggttggtggcgatcgaggtgattgatggtcatgtgacgcaacattcttgaccggattgtgtggcacgagttaagcggggaacatctgcagtagtagtagttacatggttgaaggggcgtgcgccgtggcgcgacgcgaataaatgtcgtgtgacggtgtgagcgagtaccgtgtagatagaagggcagaatagatattccaacactcagatttacacagcttattacttctgtaatactccatgaaatttgttattcttttatcaatactagaaaaatgcccgtgcattgtaacggataaatgcgttgttttttttccagtggtacgatctatcaagatcagtt

SEQ ID NO: 14820 - DNA, 2095 bp, Oryza sativa
  ref <308>: DATABASE ACCESSION NUMBER: AK065360
  ref <309>: DATABASE ENTRY DATE: 2001-12-06
acgactttatgaaagtttgaaaagcaagctggaaaaaaagcactggacttttgatggttgccctagaggttcaatgtatgatttctacgaggagtactggcgtccttttggtgcccttcttgtcaagatggaaacagctggaatgctagtcgaccgtggttacctttcagaaattgaaaaggttgctgttgcacagcgaaaactagctgcggataaatttcggaaatgggcatctaaatattgtcctgatgcaaaatacatgaacgtgaacagtgatactcagattcgccaactgttctttggtggtatagagaatagatgcaaacctggtgaaactttgccaaagagtagaactattaaagtaccaaatgatggaagccttattgcagagggcaagaaaactccaaagtattgtactattgaacttttcagcattgtggaagatctgaaaactgatctatttactgcaagtggctggccttcagtaagtggagatgcattgagaagtttggctggtaaactgccaactgatcttgtttacacaacagatgatgtagaggatgatgacagtggtgattcagaaatttctgagcatgatctaaacgacactgcctcttatggaactgcatatgaagcatttggaggaggaaagaaaggaaaggaagcatgccatgccattgcggctctctgtgagatttgttctattgactcgttgatatccaactttattcttcccttacaggggaatcatatatcatgtgacgaggggcggatccactgttcattaaatataaatacagaaacagggcgtctgtcagcaagaacaccaaatttacagaatcaacctgcactggaaaaggatcggtataaaatccgtcaagcctttgttgcagctccagggaactctctcatcgttgctgattatggtcagctggagctcaggatcttggcacatcttgctagttgtaaaagcatgttagatgctttcaaagctggtggtgacttccattccaggacagctatgaacatgtaccagcatatccgtgatgctgttgaagaaaagaaagtacttcttgaatggcatcctcaacctggccaagagaaacctcctgtgcccttgttgaaggatgcctttggtgctgagaggcggaaagctaaaatgcttaatttctccattgcatatggaaaaacacctgttgggcttgctcgagattggaaggtctctgtcaaggaagcaaaggataccctgaaactctggtacagggatagaaaagaggttttagcttggcaaatgaaacaaaaagaattagcgcaggagaagtgtgaagtttacactttgctcgggcggtcgcgccgctttcctaacatggctcatgcaacttctggtcaaaggggtcacattgagcgagctgctatcaatgcaccagtacagggcagcgcagcagatgttgctatgtgtgctatgctcgagatagatcggaatgctcgtcttaaggaactcggttggaggcttctcttgcaggtgcacgatgaagtgatactggaagggcctacggaatctgccgatctggccaagtcgattgtggttgaatgcatgtccaagcccttctacggcaccaacatcttgaatgttgaactggctgttgatgccaagtgtgcgcagaattggtatgcagccaagtaggttgccatactcttccccaattaactcctaaggctgcatagttgcatctcgggagtgcttcaaactcaacgatgaaatatgttctcagctggtatgagctgccagaacagaggtttgccctggtgtccgggaggcatgcataaccattcggctaaccagggcaatgagcagtctgcagcgaaggcactgtacaatgtaggctgaatagcttgacttccacattcttccaagtaggaatgtcatttttgtgtcacgtgtagtaatctggagactggactcttggagggaagtaggaaaaactaggcatgcgttgtttataagatttgtttagcatgctgatgtagtattaggttagctgaccaattctgcttatgtctgactctgctactacacaccgcagcttgtttgacg

SEQ ID NO: 14821 - DNA, 4008 bp, Oryza sativa
  ref <308>: DATABASE ACCESSION NUMBER: AK065361
  ref <309>: DATABASE ENTRY DATE: 2001-12-06
gtggtgatcggcaacctgtgtattcatttttgggattgactcctactttaaaggcttcacttcgcctcatttttttcctgactgttcaatacttgtgaatggagtacggtaatttgcgacgtcaagcagcttccttgaaaaagagcctcttcgatcagggttacttggatgagcaattttgtcaggttgaggatttgcaggatgaagcaaatccaaattttgcagaggaggttgtttccttgttttttaaggattcaaccagggtaatgttgaattttgagcaagctattgagaagcatccgaaagacttcgccagatgggacacacacatgcagcaattgaaaggcagctgttctagcattggtgcctccagggtgaagaatgaatgcacttcattcaggaatttctgtggagaagaaaacgccgaaggttgcacgagatccttccagaaagtgaagagggagcatgccgtcctcaggcagaagtgggagtcctacttccagctgttgcgacaagctggtcctgctgggaccgcgactaggcctgcgggcaagtaagctataagcagccggctattgaattggtctcgggctgctgctgccgtggatgcgactaggctgattgcgatgggtttatatacagctataaccacagatgaaactgtccggctgtgtcggtgaccattgctatgctggagatagtgtgatcggccgacaaaagtttatgaagcggatcggcgtgcggaagtgattgaatggctcaatgcgttactcccggagtactgtttgccactggactcatcggatgacgagttgcgggagctgctcagtgatggcacggtcttgtgccatatcgtgaacgcactcattcctggtgttctcgaggagtcgtggggtgcttatgcatcgtcagatcaacatgcaggccatgtgaagaagttcctcgcagtggttgctgatatggggttgccaggcttcagtgttaaagatcttgaggagggttcaatgtctggggtagtggactgcctcttggttctgagggaaagtgtgagttctggattacgtgatggtacttccaaggctcctttgaggaaaaaatggcgagttccagaaactggtgaacctcttgtccctggtgtggcacaagggaagacatcccctggagaggacaagaggaatggccttccagaccctaagtctcagcagaaaactcccatctttaatggacgaaagcttcgtgagattttccaattaaaacgtggatcctatgctgatcttccggctgccaagatttcagaaatgatgcattctaacagtttagataatgcaccaacccaatcccttcttagcgtcgttaatggcattttggacgaaagcattgaaaggaaaaagggagaaataccacatcgtgtagtgtacctactgaggaaagtagttcaagaaattgagcgtcgtctttgtattcaagcagagcacataagaagtcaaaatgtgatcattaagacaagggaagataaataccattcaaaaatcaaagcacttgaaatattagtaaatgggacaaatgaagaaaaccagatggctataaaccggcttcagataattaaggaagagaagtcaaaaatagaagagaaaaggaaacttggtgagcaagatgttgctcggctaatgaaagaaaaagaaatttctgaaaacacaatagctagtcttaagaaagagatggaagtcatgactagcatgcatgagcaacaacttcagaaaatcgaactgaccgcaaagcaaatggaagaacatttaactaccaaaattaaggaggttgagtctcttttagtgcaatcaaacaagaaaattgaagaagttgaggctgcttccctgttaaaatcacagttgtggaataagaaggagggcatttttcagaaatacatgaatagtcaacaactatatgtcaagggtttaaggatatcatcatggtctataaaaaatgagatgcatgcccttgaaatggagttgagagatgagatgtccaattttggctctggtttaaagtgtttggttgatgctgctgaaaactaccacaaagttcttgctgaaaatcaaaagttgttcaatgaagtgcaagaactaaaaggtaatataagggtgtattgtcgtgtaagaccatttcttcctggtcaagataaaaaatcaaccactgttgattacattggtgaaaatggtgagcttttgatctcaaatccatttaaacaaggaaaggatggacatcggatgttcaagtttaacaaggtttttagtccattttcttctcaagctgaggttttctcggacattcaaccgctgattcgatcagttcttgatggattcaatgtttgtatttttgcttatggtcaaactggttcaggaaaaacttacacaatgagtggacccagcacatcaaaacaagattggggtgtcaattacagggctttaaatggtttatttgatatctcactaagtaggagaaatgctttctcttatgaggtgggagttcagatggttgagatatacaatgaacaagtgcgggatcttctgtcaaatgatattgcacagaaacgacttggcatatggagcacctctcaacctaatggacttgtcgtcccagatgcgagcttacacccagttaaatcaacatcagatgttttagacttgatggaaattggacaggcaaatagagctgttggttcaacagctcttaatgaaaggagcagtcggtctcatagtattctgactgtacatgttcgagggttggatgtgaagaatggatccacttctagaggatgcctacatcttattgatcttgcagggagtgaaagggttgagcggtctgaagcaactggagatagattgaaagaggctcaacacattaataaatcactgtctgctttgggtgatgtgatttttgctttggcgcaaaagaatgctcatgttccatacaggaacagcaagctaacacaagttcttcaaagctctttaggtggacaagcaaagacactaatgtttgttcaaataaatcctgatgttgagtcatattcagagactataagcactctaaagtttgctgaaagggtttctggagttgagttaggtgctgcaagaagtaataaagagggaaaggatataaaagagctgctggaacaggttgcatctttgaaagacactattgtacgaaaagatacggaaattgagcagctccaactcatgaaagacaaagtcaaatcgccaagttttgcagtcgatataaatggtgctagcatgccaaaaaattctaactctgacctaagatcagtattgtcaatcacaacaaaccaacagagccaactatcagatcctcagagttatgctgaggtgaacagagatggtggacctacttcatacactgacattacaccaacatgcttggatgaagcagattttgaggacaatgcatcagaagatggtttctctggaggaaccgactattctgttggctgtgctgccggtgccagcgttttcccaaattcctgctcagatagaaccgcagatacctccattaggagaatttcatcacgaatagctcgattcagtctcacaaagaatggacaaccagcaacatccagaccaaaaccaaaggatactgctccgaagactccaaatcaaacgagagttcaatcgagccaattgataggaggctcttcactgagggcatctaaaaggtggcagaagtagagcacgctccggttgctcagttgtattttgtatgtccagaatgtgaaaataggcgaagtagctgtaggagacaatgtacttgtaagttgtaactctacagatgtgagagcattctgctgacgaaggacgagcagctgatgactcatcctttgctcatacagatcaaatatccaggaaaggattcccttttctgttctccatgtttcccctgtacttcaatttttgtcatggttactgcatctctggaatcaaacgtttccaattttgg

SEQ ID NO: 14822 - DNA, 1287 bp, Oryza sativa
  ref <308>: DATABASE ACCESSION NUMBER: AK065362
  ref <309>: DATABASE ENTRY DATE: 2001-12-06
ggtccacacatggctaccaccgccgcgacgaccatggtggcggcggtgcaccacccccgcccctgcttccgcgtgcgcgccgcctgggacatgaacccgagcgcctcccccaagcccaaggccaagcccccgcctcccccgccgccgccgttgccgaccgcccccgcccccacccacgccgacctcttcgcccgccacagcaacagcgagggccaagtgccaaagaagaccacaagtatgggatttgaaaggtggtggttaccacctccgccagaggtgaagaagccccgttcgctctacaacgctgcatcattggcgtacttgggggactgcatatatgaactttatgctcggagacatttcttctttccaccactgagcatcaatgactacaacaagcgtgcaatggatgtcgtgaaatgtgaatcacaggaccttctgctgcacaaacttcttggagaagattttctaactcaagaagaaagggacatacttcgttggggaagaaatattgttagcagcaagacacgtaccagaaaacgtgctggaattgcagtttataatcgagcatcttcacttgagacactgattggatatctttacctcacaaatttcaagcgcttggagcaattgatgttccagttaggatttacaagtggtgcttcctcacatcatattgcagatgagctagtctcaggctttaagaaaaagaactccacttctgtacaatctcagcaacaagcagcgcagtgaatagtttctgtattgcagcaaacatggtatgatctaaacaatagttatctggtgacgacaaccagcacaaaaattcatttagttttggtgtatgacatccaaaagtggttgctcaatgaatgaatagcaattaccgtttgtctgtcaaacaagtatcgagtgaattgagcaatgtacatgtatgcaaatatcattcagtgcaagaaaatggtgtcacttccaggagggtgtggcggttctgatctgtagattctgaggtggcaagccgttgtgttattactactcattaggttgatataggtcgtggtatctttgacaccttgtgtatgaaggagctgcgaaactgcaagatatgctgaatgatttgatgcagagttttagcacgacttcagaattaacctgttctatgtgcttcatggattcagtgcactaccattatgagacagatgcctttgctttgctgtttgttgtgatctaatgtaaacaacacaatgtggaagtatttgaggccataagaaaagtggcagagttggt

SEQ ID NO: 14823 - DNA, 3746 bp, Oryza sativa
  ref <308>: DATABASE ACCESSION NUMBER: AK065363
  ref <309>: DATABASE ENTRY DATE: 2001-12-06
gagcgagagaaaaatacacgcgcgaaatttccggataagagcagcgccggcggcggatgtaggcagcgtttgctgttgctgtttttttccctttttttccgtctcgttttgctcccacttcgctgctcccggatccgcgtagggttcttgtgtcgtgtggtggggttatgacccgcggcgctgctctgctttgctcgatttgctgtgcttgccttggaggtcgcctgcttggctgcttttgagagtgagtgtgtgtgtgtgtgtgttttttttttatacctcttttctttttctgggagaatttcccgttcttgggtttggtcttttttgcgaacctttgaaccctttcttgttggattctggggggaagtttatttatgcttaatttggcggttcttgttttgtttcggggagtttagaaaattttcgaggctttgattcgttttgattttgggtggggggaatctcgtcgtgcgaaaggattcgatcgggagagcctaccggagtttggattctcgcgtgcaccaccgcgtgaattatgaggggagaagtgagcttctagctagcatctagaaccttctagactctcctcgccatggagacgtccaccataagcttctcctcctcgtcgccgccgtcccctccgccgccgcagccggctccgggcgacatcgacgccgtcagcctcggccgcctcagcaggaacctcgagaacctcctcgaccccgcctttctcaactgcgccgacgccgagatcgtcctcgcctccggaggcggcgaccccggcggcggcgccgtcgtgggcgtccaccgctgcatcctcgccgccaggagccgcttcttctacgaccacttctcctccgcccccgcccccgcccccgccaccgccggcgacaagccgcagctggacctcgacgggctggtccccggcgggcgccacatcggccgagacgccctcgtcgccgttctcagctacctgtacaccggccgcctcaggtcggcgccccccgaggccgccgcctgcctggacgacggctgcagccacgacgcgtgccgcccggcgatcgacttcgtcgtcgagtccacgtacgccgcctccggcttccagatctccgagctcgtctccctcttccagcgccgattatctgattttgtgaacaaagctttggctgaggacatactgccaattcttgtggttgcctccacctgccatcttccagagctgctaaatcaatgtatccagagggttgccaactcgaacctggacaatcgttacctcgagaagcggcttccggatgatctgtacgccaagctgaaggagtttcgcgtgcctgatgaaccacacagtggcattcttgaccctgagcatgagaagagggtcagaaacatccacaaggccttggattccgatgatgtcgatcttgttggcatgcttctgaaggagtccccggtcaccttggatgatgcattcgccatacactacgctgcggcctactgtgagccaaaagtgttagcagaattgctgaaactggaatctgcaaatgtgaacctgaagaactcaagtggatacacgccgctccacatggcttgcatgaggcgagaaccggatatcattgtttcgcttatagaaaagggggcctctgttctggaaaggacacaggatggacgtgatgctcttaccatctgcaagagattaacaagggagaaagaccgcaacgagaaatcagaaaaatgcaaggagagaagcaaggcttacttgtgcattggcgtcttacagcaagaaataaagaggagaccacaaattttggaggaccagatgtctgcagaggagtcaattgctacacctctgctggttgataattttcacatgaggctactaaacttggagaatagagttgcctttgcaagaatatttttcccttcggaagccaaacttgtgatgcgcatagcacaagctgactcaactcaagagtttgctggtctcacatctgctaatttcagtaaacttaaggaggttgacctaaatgagacccccacaatgcaaaacaggaggttgcgagaacgccttgatgctttgacaaaaacagttgaactcggacgacgatacttcccacattgttcagaagttctcgacaagttcctgaatgaagaatccaccgatttgatcttgcttgaaagtggcacagcagaggaccagcaaaccaagaggatgcgcttttctgaactcagagaggatgtacggaaggcctttaccaaagataaggcagccggcgctgcaatatcttcctcaacatctgcgtcttcatcaccaagttgatttgatccaagatgagtcgacctcgctcctcgtttcaacagctcgtggatgaatcatcgtctgacgatgacgatgattttttttttgccacggcacaaatcgtccatagctattggcactctgtcaatgcaccaagacatggtgggtcagtcatgggacatgaagtgattgatcgcaacagagaagcacggcacttgagattataccaagactacttttctgataatcctacctatggcccagttttattcaggcgcaggaatagaatgagcaggcctctgtttcttcgcataatgaatgcagtagaggatcacgatgactattttgtgcagaagagaaatgcagctggtttaattgggttcagttgtcatcaaaaggtcactgcagcaatgcgtcagttggcttatggtatagcagcagatgctttggatgaatatctcggtattgcagaaagtaccgctatagagagcctgagaaggtttgtgaaagcagttgtacaagtttttgaacatgaatacttaagatcacccaatgagaacgatacaactcgattacttgaacttggggaggacagaggtttccccggtatgttaggctccatagattgcatgcattggaagtggaagaactgccctacagaattgcacggtatgtaccaagggcacgtgcacgagcctacaataattttagaagccgttgcttcaaaggatctctggatttggcacgctttttttggtatgcctgggtctcataacgatatcaatgtacttcatcgatccccgctatttgcaaagctagctgaaggcaaggctcctgaagtgaactatagtataaatagacacgattatatgatgggatattatcttgctgatggcatatatccttcttgggccacatttgtgaagaccataccagaaccacatggcaacaagaggaaatattttgccaaagcacaggaagcagtaaggaaggacgtcgaacgagcttttggggttctgcaagctcgatttgccattgttcgagggccagctcgacattgggatgaaaagactctgggatacatcatgaaagcttgtgttatcatgcataacatgattattgaagatgagggagaagttgattgggaagaacggttcccagagggaggagaaaatgtcagagtgtcccacgatgaaatacctgatcttgatgattttatccaaatgcacaaaaaaataagggacgacgaaactcactatcagctacgtgaagacctagtggagcacttgtggcaacattatccggataaatattgaggttttatttatatgtttgaattccatgtaataaataatatacatatgtgaggatttgccaaatcatcttaatttgtttttcatgaattgaataaatggtgtactgttcggtttaagaatagtacaggagaatt

SEQ ID NO: 14824 - DNA, 2195 bp, Oryza sativa
  ref <308>: DATABASE ACCESSION NUMBER: AK065364
  ref <309>: DATABASE ENTRY DATE: 2001-12-06
atttttttatcccctccgtacgaaggaattcgccggcggcgagcgcgagcgcagtggtcagtcgagtgatccacccgacatcggaatccaccggcgcttccccacgcttgcgccgcagccacctcgtccactccacacttgcctccgcgccacctctgcctcttcttggttccgcctcaagaaacaaccctaagccgccggcaaatcgccgtccgtttcctttgagggatctggatacctgctgaaccttgagattacctaactagcactgctgcgtttctcaatggagcatctctcggaggaactaatcatcgagattctcaagaagattacaaggacaagcgaccttaattctctttccctggtgtcgaagcagctctacactatcgatgcagagcaaagggctgctatacgccttggttgtggacttgcaacagaagatttcttagcactttgttcccggtttcctaatttgctcaaagtagagatcgattactctggttcaacacctggtaatgggaaccatatcgacaaccaaggtctctttgttctttcatcttgttgtactttgcttaatgatattaccttaaccttctgctcaaaaatcaatgatgctggtattgtttgcctatcttactgcaagaagttgatatctctaaagcttaactccctaccagaagtaacttcaagtgggcttctcatgctattttttggttgcaaggccctatcttctctcttcattaatgattgcaagggaattgctggcagcactgagtggctggagtaccttggcactgatggatcattggaagaactcgtcgtcaacaattgccaggaaataagccagtatgactttttatagtttggtcgaggatggatgaagcttaagaaatttgagtttgaaaataaggaaagcttgtggaaacactttggccccagccatgactcctcgcacaatgctaactgtgtgtatagatatgatttgtgctgtcagaatttggaggacttaaggctggctcgagttataacagagccagaaggcccagaaactggactacgttttctgctgaggaagtgcaaggcgttagagagactatgcctggagtatgttaacggtgttattgacaaggacatgattgtgctatcccagagctgcaagaaccttaaaagcatctcactttggatgatacctggactctaccatgaacctgatggcatagttttcagaacggatcttacagatgaaagccttgaggctctaaccaacaactgtcctttgcttcaggatgttgagctcgcgtttacaggtgttgatcactgggagcctccagaaataggcttcatacaggagggacttgtgaagctcatgcattattgtccaatccgtactctcacactaaacggtgccctcttcttcaatgacaaggggatgaagggactctcatctgcaccattcatggagacactcagcctcgtcgattgcaaggagattactgattctggaatgtgcttccttgtgcagtacccatgcctgactgatctcaagctccagcattgtcctggtttgacagatgttggaatagctgagcttgtacatgcgcagaaattacagtctctggttgttgatggctgctgtaatatatctgaaaatgctgtgcagtgtgcagctagatcagtccagtactttgtcaactctgccggatcatgtgctgcccattttaaaagactgcattgattgaagctgttaattcgttgctgaccgcacaccatcggtggatatctcagatggagctgttgcttttgctgttaaaccatatcgtctctgtgatctgatttttcagttttcactgtcatttttgaacttgattttactttgccccttttgttcctgttattctctctaagcataagagcaactgagcaaaccatatgatgatgtactctgcaggcatctcatcactctgtgtccacagctaatgttcagaagagtagtctccagcgatcggaatttttcactttggcgtcaaacttgttggtatcctttgcatttatcgtggttttcaacttgttatagttttagttgcaaatatatctttcatcaaatttgggaatgcctgatcagttcttacacataaacaacatttggctggtactacgtgtaatgtgtaatcttatcctgagttgacccacactcc

SEQ ID NO: 14825 - DNA, 1748 bp, Oryza sativa
  ref <308>: DATABASE ACCESSION NUMBER: AK065365
  ref <309>: DATABASE ENTRY DATE: 2001-12-06
ttggtctctgtctcactctctctgtctcgcggttctcgcctcctcctcctctctttcctttttcctctctctgctcctcgttgttgcagtcacctctcctctccttgttcttgcagtcagctcagctccggacgcagcaccagttttcttggagtgccatcagctcgcgggagagttgccggaagagaagctcgccgccggcgtacgacggtgaagggggaacgtacgagcgcgagtgcgggggtgtggtgcgccgccgctgtcgaggtagctgacgcggcctctggaaggctctcagcctctcaggcaggcacaatagtttgtagggagtacaagtagcagaactggtgtgtttgggatccaatcatacgcgatggccttcttccctaacattcccgaggcaaagcaggagattcagtccttgtacagaaattatgcacatttgtttgacatgtcatcggataatgccggtgtagactcccgcataatgcggcgccagcctgccatgttgatagatcgttctgttttcctcactggaagcgcgatttggactattgccctccactacaaggctcacatttacagatggttactgcagaagttttctgccatccagggcgcaccaatttattgtgccatgatattgcgatccttatgtcgacgtagctccttgcctttctttgttggcattagtgttctgacagccaggatatataactacgttacgattcacaatcatatttattccccacaactctgcgctggccatgacgctaaccttcggagggatttgttcattcaagacactgaattgtgcaataagcaagccctcgattcaggtttccttggcagcaagcatgattgtatccgtctagcacttcattttatttgcagcactgccaatttaaaggtttatacaacaccaaaacagatcggtttcgatgggaagtgcaaacaaaagaataccgagagaggccgattttggaggatcttatcaacaaatgagcaatatctgacttatattggggcactagtgacactacaactgtttttacaactgagcagagcgaacattaccactctgctcctgccaatgctatatcagacaacaagctcccagcgcaatgctgcagttgtcggtaacatcgtgattgttttggtgaactcctttggcattcttgggtctgacttcacaacaaagcaccacggacgggaggtcacattcaccgtgagcgccattctgatggtgttttgccagatcacaatcccattgcttgtggaagcgcaaatcgggctgggcggtggaactcggatactgacgggctacaccacggcgacattcctgctcacatgcgtcgtctcctatggtctcagctggtcatggggctcattgttctgcactattcctggtatgaagattcagtcagctgggcaggttatcggcatgggtctctgtttcgggctctgcttcgtgcaaatgcagtacttcctgctgatgctgtgccggctgaagaacgccatccttgcatactacgcaatgtggatttggtcttgatttaaactaggatctcaagagaagagatgggacagatggctagatgtctgcccgttttactgctagcgtttgatggatgtaaatatgctcattttctttgcctgttctgtacagtttttgtattggttgctatctcagtgtagattctcccaagcagtttctgcgactatgaggcaattaacaaatgttatgc

SEQ ID NO: 14826 - DNA, 2276 bp, Oryza sativa
  ref <308>: DATABASE ACCESSION NUMBER: AK065366
  ref <309>: DATABASE ENTRY DATE: 2001-12-06
gtctcacaaaccacgcaggaaacctcagaaaatcaccgtacgcgacgcgggcccaagaaaaccccgacagaaaccgcgcagcagcaacaccaccaccggcgtcggagatggcgttccggctgagcaacagcctgctcgggatcctgaacgcggtgacgttcctcctgtcggtgcccgtgctgggcggcggcatctggctggcgacgcgcgccgacggcacggagtgcgagcgctacttctcggcgccggtgatcgcgttcggggtgttcctcctcctcgtctccctcgcgggcctcgtcggcgcctgctgccgcgtcaactgcctcctctggttctacctcgtcgccatgttcgtcctcatcgtcgtcctcttctgcttcaccgtcttcgccttcgtcgtcaccaacaagggcgccggcgaggccgtctccggcagagggtacaaggagtacaggctcggcgactactccaactggctgcagaagcggatggagaacagcaagaactggaacaggatcaggagctgcctccaggactccaaggtctgcaagaaactgcaggacaagaactgggatcggacccagttcttcaaagccgacctctccccgctcgaggtaacaacaatttaacagcaagttgttcgcttcagtttctgaatttttacctgaacaattataccgtttcatcatcatcaacaacaaaacagagattaattgcagttggttagtcgtcgcgtacttgttccaattgaaaaacagttgacatttcacgtgttgttcaatcgtttgtgaggataagaaggaaactgctagtgtcactgtcaaagaaacagagttttgcgagagtatatatcttatctaggggacgatgttaacgtgtacggttgcaccagtagtaaaccacgggtagtatttttctaatggaaattaattctgataaggtcatttgggtgcattattagctacgcaaacatcgtttcttttttatctgtcatactgctcacgtactgtttataagagtacctgaaaacaatagcctaaaatatgaatcattctcaagaaatacagattcaattgtcgcatagtcgaataatcagaataattttttgaaaaaaaaacatatttggaatgcttagattaggaatcactaggcattttatactgcttcatgactcgtggtgatattgtcaacgggaggattagactatcttgtggtggagtttcttcaactcaaagcatgccttttctctgaacacttcccaaagttctgaccatcaaggggaaaaatttattggcgccatcttcaaaattcaacggtccggtgccctttcaccaaacttttaggtcgcaaaactcaactgcctcacgaaaatttccatttgataactatcggaacagagtattctatcggaagatgtctgaaattttcagtcctgaaatagtagcacacgttttctaatatccactttaaaccatttgatctgtatgagtaggttaagaaagaattatataactgcaatattatgaaaaccatgttccatgagaaatataactgaaaactttgaagtaatcatacaaagtagaatttgcacataattctggtaaattttggtgtgtgttgatacaattctgaactgatcaaacctcacatctctttccttctcatctgcgtgcagtccggatgctgcaagccacccagcagctgcaacttcctctacgtcagcggcacgaactggacgaaggtgcccaccaactcgtcggacccggactgcaacacgtgggtcgacgacggcacgcagctgtgctacaactgccagtcgtgcaaggccggcgcggtggcgaccctgaagcgggactggaagcgcgtcgccgtcgtctgcatcgtcttcctcgtcttcatcgtcatcgtctactccctcggctgctgcgcgttcaggaacaaccggagggacaaccgcggcgcctatcgcggtgccgcgtggaagggcggatacgcctgatttcattcgatcgatcgatcgatttgcacggcgtaattgattggcatgttcatgcgatcatgtcagatatctgttcataggcttagctctgatattctagccctgtacaggcgagattattctgggttctgatcatctgcttgttactctttgatcaggagtagtaggtttctgtatgcagttctttgatgcaacttagttgcaccctacatcatatttgtactcgatcggatttatttcatatatgtaatatagtattcctttttatttgtttttc

SEQ ID NO: 14827 - DNA, 1826 bp, Oryza sativa
  ref <308>: DATABASE ACCESSION NUMBER: AK098928
  ref <309>: DATABASE ENTRY DATE: 2002-08-28
cttgcataaaagaaaatcccccgtctcgtctcctccgctccttgtgcctgcgcccatcgactccatctggcgactcgcgagagcagagcaggggagggggaggggaagggcgccgtcgtcctgttgttcactcctgacctgcatcacatctggagatgtctttccgcagcatagttcgtgatttcagggacagtttcgggactctatccaagcggagtttcgaggtgaaaatttcaggcttttcgggccgtcacagagggaaatccattggaccatcaagcgagctggatgacacgcccgtggtagctcagcaaagcaagtgggctggtcttcctcctgaattacttcgcgacgtgatgaaaaggctggaggaagatgatagcaattggccctcccgcaaggatgatgttgcctgcgcttcagtttgtacgacttggagagacatgtgcaaagatattgtcaggaaccctgaattttgtggaaagcttacatttccagtgtctcttaagcagcctggacctcgagatggagtaatccaatgtttcataaaaagggacaaatcaaaactaacttatcatctctacctgtgccttagctctgctgtgcttgatgagactggaaagttcctactatcagctaaaaggagccggcgaacgacacacactgactacatcatttctatggactccaaaaatatctcccgatcaagtagtggctatattgggaagttgaggtcaaatttcctcggcaccaaattcatcatctatgacacgcagcctccatacaatgctcggacactttgctcacaagaacggacgagccgtcggttctcctctaggaaagtttccccaaaagttccaacgggttgttatcccatcgtgcaggtgaattatgagctaaatgtgcttggaacccggggaccaagacggatgcaatgcgctatgcattccatcccagcatcagcagtagagcctggtggcattgtgcctggccaacctaaagagctcctcccaaggttatttgaggagtccttccgcagtatggcaacttccttctccaagtactccatcacagatcattcgacagacttcagtagttctcgcttctctgagtttgggggaggggctctgcaagggcaagagcaagagcaagatggcgatgatgtgaacaaggagaggcctttggttctccggaacaaagcaccaaggtggcatgaacagctgcaatgctggtgcctcaacttccgtggccgtgtgacggtggcttcagtgaagaacttccagctgatagctgctgcacctcagccatcttctggagccgcctctgaaccttcacaggcagggcaggctgcacaacagcaaacccaaccttctcagccatcgagttcgtcgtcgtcgtcatcatccaaccatgatacggtgatcctgcaattcggcaaagttgcaaaggacatgttcaccatggattaccggtacccattgtcggccttccaggcttttgctatctgtttgaccagctttgacaccaagctggcatgtgaataaatgagtagaatagcgatcagaaagcactccagtgtacctgaggacctaagccactccaggcgtatggtattttaggataggagaattctgtgtctagtcacttgtgtgtattcatgtgcagttctttggttgaatccttgtgttcctccggcgtgcgtgtttgttagaagtgtaaaaaggggattgaagtgtagatgtctgtaagatagaacaagatcttgtttcttgtatgttgggcttaaaaagttttgagcaagagaatgaatgaatggttgagggagc

SEQ ID NO: 14828 - DNA, 3773 bp, Oryza sativa
  ref <308>: DATABASE ACCESSION NUMBER: AK065367
  ref <309>: DATABASE ENTRY DATE: 2001-12-06
gggctgcttaactttgcccaccggccaccgttcaggggccattaatggcgtgcagggccgctgctgctgctgcttgctcttgctcttgctgctgggtggagtgagcgagagatcccatgtggcattggagcgctgtctcctgctgctgcacagtctactctcacctgctccgcctctcccctcgttaattcttggcggctgtgtggcgaggaagaagaagcggtgatggcatgctgatgggctgcgggttcttggatgcatttgggtggatatgcggacatggtggaagctgtaatttgagagcgatgggagcatcttcttagggatcctcttccactggctagcctacagctgtttttctccttcattggtactccaatcttggctggaattttgaatcttttgtccgggaagtgataaaatttagaaagacaacacaaccattggcacttcttacagttgtgagcgctaagctgagcctccaatggcgtggcattttactgcggctttcatgatcgcaacctgtttgatgttattcccaagaagcgagcagtcctcgcagggtgaggtgctgcagcagctaaggaagcagctggagtacccaaggcagctggatgtatggaataacccaaacagtgacccctgctacacccagcctacttcggtggtcaccgtggcatgcgaggggaacgccattacagagcttaagattatcggtgacaggatcaccaagccaccaaagttcagtggctatcctgtctccaatatcaccctctctgaagcctttgttctcgattcgtttgttactacattggcaaggttacctgccttgcacgttgttatcctagtatccttggggctatggggtcctcttcctgacaagattcaccggctgtcatctcttcaagtgcttgatttgagctccaatttcctttatggatcgattcctccgaagctgtcagccatgccaaagttgcacaccttgacattggatgggaacttcttcaatggtaccatgccggactggttcaacttgtactcgaacctcacggttcttcgcttgcagcgtaaccggttgaaggggcccataccagcatcaattggtaaagctaccatgcttagtgagcttgctcttgctggcaacagcatcgctggcgaggttccacaattaggcagcttgaataagcttgagatgctggacttgagggacaatgagttggatggggagctcccagagctgcctacagcattggtaacaatcctactcagcaaaaactcactcaagggcgaaatccctgagcagtttggtcagttgaaccgacttcagcacctcgatctctcattcaactttctcgtggggaagcctcctgaaaagctcttcgctcttccaagcatcagctatctcaacctagctgcgaatatgctcagtggatcattttctactagtttaacatgcagcagtacccttggctttgtggatttgtctacaaaccaactcacaggtgacctgcctgtctgtcttaatgttaatgtcaataacagggtagttaagtttgatggtaattgcttcagtgacgaccctgaacaccagcatgaaactaagtattgtcaacaacctcacaaggggagaggatcaaacaaggatgttggacttgtggtcactgttgttggggtggtgtttattgtgcttgtgctttctcttatattaatggcttcaaacagaagaagctgtcagagagttttagcagaacaacagttacttcaaaagcaaatgcaagataattcgacatcaggaatgtcaactgaactgctagtaaatgcaaggtacatatctcaagctgtaaaattagggacacaaataatgcccatgtatcgagcattttctttggaagagctcaaggaagcaacaaaaagctttgagaggtcggcatttttaggcgaggggtcaattggaaagctgtacaagggaaaactagagaatggaaccctgattgccataagatgtttggcattgcaccaacgatactcaataaggaatctaaaacttcgattagatctactggcgaagcttcgtcacctaaatttggtttgcctcttggggcactgtattgatggcgaagttgatgaatcaagtgtgaaaagggttttccttgtctatgaatatgtacctagtggaacgtttccttcatatctttctggtaaggaactaaaaataaaatgaggaattaaagtcgtacgaagtgatagcaatcgaatttgtaacttgtggttcgtgaatgcctttgctgtggtaggctctagtccagagaagactctgaactggtgtgagaggctccaagtgctgatgaacattgctaaggctgtgcatttcttacatactggaataattcctggttccttatataaccggttaaagccttctagtattttacttgatgaacaccttgtggcaaaactgagtgactatgggctatccataattacggaggagatatacaaacatgaggcagcaggagaagggcagagatgtgtagaagacaatggtggagaattggaaaatttggaggatgatgtgctttcttttggaggtattttacttgaagtacttatggggccaaaacgtcataggaaagatctctctgtgctaagtgagctggtatgttccattttgtcttttgcgtaaagataattaatcaaatatccagatgatagttataataatgatacttcgatcaatatcacggtgatacatagctcgagcgctgtctggactgggctaatttcatgttgtattaagctatctatcaactcaatacagatattttgttggttgggtatgaccgtataactttcgtcctcattgtgctctgcaatccatgatatcataagctgaattatgacaccacacactaataagttctgagtatgaaatgtatgtttcaagcacttctgcttccctgcattagcccaacaaagagcattacatgcacaaatattaggagcaatgttgcttgcagagtaagaactacaaattttaatatccggattaatttggcatgataaaacttcaactgataggatccttagctctctaaaaccctacatgactcatatgctctgatcataccagaacaatcaaaattttacctgtatctgcaggttctgtcaatatcaaaacaggaagagcgcgagcaagttcttgatccggttgagctgagcacctcttcgcaagattctttgtcgatggtgatttccattactgtcaaatgtttatcagttgaatcttcagccaggccttcgatcgaagaggttctctggaatctgcagtacgctgcacaagtccaggcaatatctgatggggaccagagatcagaagtttcctcgcagacctgttaggctaactgaacataaaacaccttggaggttattgtccatatctgggaaaagacggcgccgcacgtgcaagctaatttgatcttggtgtgcagaagagaatgaccaaactgactgatctcttcctgggagtaatcctgcatttgctgctacttcaacagcatttctgacacatcaacaagttaattaacatgtcaaatgctgtatgctaaacacagatatggtcacgttacgtcctgtaaagagtttttttttttctcgattctagcttcccattgctgtgaaagcatccctatgagcagttcttgatttccaaacttccaatcgttgtattagggcattctcatataattaagtagtaggacgagtgatgtgatagc

SEQ ID NO: 14829 - DNA, 1688 bp, Oryza sativa
  ref <308>: DATABASE ACCESSION NUMBER: AK065368
  ref <309>: DATABASE ENTRY DATE: 2001-12-06
gactctattcatccctccaacactaacctcgacggcggcggcggcggcggagggagaggatggaggcgatggccggtgagctggagaggctgcgggcggagagggaagagctcgatagccgcatacgcctgctagagtcgcagctcggggctagccctacgcccgcgggagagggcgacgcggcggggacaggggcaggaggcggaggcggcggtggcggcgccaccgcgtgccccatacgccgccgtgggaatgggttcgccgccgccgatggcctcccggccgatatgatctaccggtacagccgccacctcctcctcccggacttcggggtcgaaggccagcgtaagctctcgcagtcatcgattttggtggtgggcgctggaggattgggctcgcccgtggcactgtacctagcagcttgtggtgttggttgcttgggcattgttgatggagatgatgttgagcttaataaccttcaccgacagataatccacaaagaagcatttgttgggaaatcaaaggtgaagtcagcggctgacgcctgccgtgagattaattcgtctatcaacgtgatggagtaccatcatactttgaaaccttccaatgctttggaaatcgtgagaaaatatgatatagttgtagatgccacggacaatcttcctactcgatacatgatcagtgactgttgtgtgttgctgaataagcctcttatatctggtgcagccttaggtttggaaggacagtccatgctatcgatgccttttcccaaatccaccaccagtggcagcctgccagagatgctcagacagtggagttcttggggttgttcccggagtgattggctgcctgcaagctctagaggctataaaggttgctactgatgttggtgaacccctaagtggaagaatgctactctttgacgctctatctgctcgtatcagaattgtcaagattcgaggaagctcgactgtttgcacggtttgtggagaaaattcagcttttactcaagatgattttcagaagtttgattatgagaacttcacgcagtctccaatgtctgataagtcagctccaagtttggacatacttccaggaagtgcccgtgtcacttgtaaagaatacaaaaggcttgttgataatggtgaacgccatcttctgttggatgtacgacctgcacatcacttccaaattgcttctgtttctcaatctctgaacatcccgctctccgagttggaggagaagcttcagatgctcgagacctcgttgaaggacacgacggacgcctcctcatcagacaaaccgccttccctttatgttgtttgccgaagaggcaatgactcgcaaatagccgttcagcttctacgggagaaggggtttctttctgcaaaggacataatcggtggcttgcagtcctgggcacaagatgtagaccctgatttccccgtgtactagtgaaatggatatagtggtagtcacatttgagattacatgctcaatttttaaatctgacacgagatttttactggcttgtcatgagtatgtaaaatatagaaccgttaacttttcatccttgaccaccctaatagagtggtttgggatgacatgttaattgacggagcaatatggcttaaggctgaacttttttatcaaatattttgaactagtaataaattccataatgagcg

SEQ ID NO: 14830 - DNA, 3839 bp, Oryza sativa
  ref <308>: DATABASE ACCESSION NUMBER: AK065369
  ref <309>: DATABASE ENTRY DATE: 2001-12-06
gatctagtttggatatattcatgttattgctaaatttatgaaatggcttttgaaacaaattttgtgtatggaagttctatatcgcatatttgcattggaccttagaggcgaacaacgaaatgttcatatattctttctggctctgggtcatttttgttttctggtgggaagaggctgggcaagcaagggtgatggctacccgttagatattttcccctgatatatcttctcttctcttgctctactaaagtagccacttgcacatagaaaaagggatgatggaagaataaactgtagcatatattgtgaatataaaatgagatgggtaggccattaattggaatatagcacagttgtctgtagcatgtgggtacaaaaatttacaacagggagcatcacggttttagccaggcctttttattttttaccaccgggctaccaattaatacttagtaactttagtcttccattggcatatatcatatttagtggtcgcctgctagtgctctaggaggatatattatactggattagtaagactttttcctcctctcttggatggtactggaaaataattaactatgaatgtattcacatgacaaattaacattgaatttggacaccaactgtgaaatttgatccgtattaacaatatggaaagctattattggtgacaaccttataagtgtactacagtactacacctgcaagggttttcagttgacaagtagctgattatggtcagtttcagaattcggaactcaattttgagcataaatggaagttctggatgtaatatgaagataaactttgagaaatttgacttgggttgtaaatgtttgaacttgattttcgtgctgtactgcttaaggctgtcttcaggaggcaaggtttacctcctgacacggaaaacaatgtaagcgattagagcgagattagttaagtactagcctaaaaaaaattaaaaaatggattaatatgattttttttaaagcaactttcctataggaaaattttgcaaagaacacaccgtttagcagtttgaaaagcgtgcgcgcagaaaacgagagatgtgagttgggaaagaaggggaaagtcttttagggactcattccgtaaatgtcgttttaccattttgtggtgatttgctctaatcgtccacgtcgaatggtaaatattcttgtgtgcagtctgcacaattagcctctcttttgtcagattatgaaaattcttgaaaaacaatttattgaattgcttacatgatgcaagaacttgtctcttatattacattttgacatatcatgccatcacaaacaattccaaacatattaattttatttccaaaagattcattggatgagtttagttaaacctgtgttccatcataagtactccctccttccctaaatgtttgacacggttgacttttttaaacatgtttgaccgttcgtcttattcaaaaacttttgtgaaatgtgtaaaactatatgtatacataaaagtatatttaacaataaatcaaatgataggaaaagaattaataattacttaaattttttgaataagacgaacggtcaaacatttttaaaaaagtcaacggcgtcaaacattttgggatggagggagtagtttggacattcagcaatcagcataagctctaggcattggctaacataattaagtattcaatgtagggtttttttttttttttttgcatttcgactaaagtccaacaaagcataaaaaaaatagctggactagtttctgcctaatgtttagcaatgttagcaattagcactaggttaacagaatacatttgaaaccaaacaaaaagccacattcttcttcgttgtctgcgacaaagctaatagacaaatgcatgttctctatgcttgaattgctgttattctactatcatttttcatttatacgagttgttcaactgtatcatatttgcatcaagctaacagtgacataacttgacagagggcctagagaagcttctcacattactctgttgactcaaacttgtttcagccgattcttacaattccgggatccacgtgcccaaagacgacatccgcttgttgatcccatggttgtttcagagatccggcgatgcttgaatgagggaattgagttccaaggtgagctattgaattttcggaaggacggtgctccactgtacaacaggctaaggctcattccaatgcatggggatgatggttttgtgactcacgtcattggaatccagttgttctctgaagctaacattgatcttagcaatgtatcatatccagtgtataaacaacagtccaaccacagacccaacattcaagagatcaaccctgcttctcatgaacatattcctaagattcaaagttccgagtactgctgcatcctccagctctcagatgaagttctggcgcacaacatattgtctcgcttatcgccaagagatgttgcatccatcggatcagtctgcactagaatgcatgagttgaccaagaatgatcacctgagaaagatggtatgtcaaaacgcgtggggaagagacgtcactgtgaggcttgagatgagcaccaagatgttaggatggggtcgtcttgcaagagagcttacaacccttgaggcagcttcatggaggaagtttacagttggaggtcgtgttgagccttcccgttgcaacttcagtgcctgtgctgttggtaatcaccttgtcctgtttggaggtgaaggagtcaacatgcagccaatggatgatacctttgtgctcaacctggaatctgcaaagcctgaatggcgccgtgtcaaagtttcagcttctccacccggccggtgggggcacactctctcatggctgaatggctcatggctagtggtctttggaggctgtggacagcaaggtttgctcaatgatgtctttgtccttgaccttgatgccaagcagcccacctggagggaggttgcaagcgagggcccaccattgccgaggtcatggcacagttcatgtaccctggatggatcaaagcttgttgtctcaggggggtgcactgaatccggtgtgctcctcagtgacacattcctgcttgacctcaccaaggaaaaaccagcatggaaggagatcccaacatcctggtcaccaccatcccgcctcggccacaccttgtccgtctttggtaagaccaaactcttcatgtttggtgggttggcaaagagcggctctctccggctacgctcctgtgatgcctacactatggacgctggtgaagacagcccacaatggaggcaactggcgacaaccgggttcccgagcatcggtccacctccgaggctcgatcatgtcgcggtcagcctcccctgtggacggataatcatattcggtggctccatcgctgggctgcactcgccctcacagctgttcctcctcgacccagcggaggagaagccgacatggaggattttgaacgtccctggccagccacccaagttcgcctggggtcatagcacatgcgtggttggcggcaccagggttcttgtcctgggtggccacactggggaggagtggattctcaatgagctccatgagctgtgcctcgcgagcaggcccgacgaagatgagtgattcccaactccattgcttgttcttatttatttagatcctatgattattactgatatctgttgttgtcacaaccctatgtaatagtagtaaaaaagaaacaaaaagaggattactggtagttttcatccttagaagttaggaaaaagatctgaaaaaaaagttatgaaataaaggtttgttctagttttttttttttgttttcttcagtttgcgc

SEQ ID NO: 14831 - DNA, 1008 bp, Oryza sativa
  ref <308>: DATABASE ACCESSION NUMBER: AK065370
  ref <309>: DATABASE ENTRY DATE: 2001-12-06
ggcaccgcaccgcacccgcaagcgcaagcccagccgcctcgtcgtgttcgcgttcgtcgcgcggctccgacctccaaagccgccgctacccttcccgtcttcgtcgtcgccgcgcacgcagatcgcgaaccagcccgcgcgccgcgcagcagcgccgcggagaggaaaggagagctccgccgcgcaccccccgccaccatcttgtagggagagatggggctcacgttcacgaagctgttcagccgcctcttcgcgaagaaagagatgaggattctcatggtcgggctcgatgcagccggtaagaccaccatcctctacaagctcaagcttggcgagatcgtcacgaccatccccaccatcggatttaatgttgaaaccgtggaatacaagaacatcagcttcactgtttgggatgtcggtggccaggacaagatcaggcccctgtggaggcactatttccagaacacacagggactcatctttgttgtggacagcaatgatagggagcgtgttgttgaggccagagacgagcttcacaggatgctgaacgaggatgagctgcgtgatgctgtgctgcttgtatttgcaaacaaacaagatcttcctaatgccatgaatgcagctgaaatcactgacaagcttggtttgcattccctgcgccagaggcactggtacattcagagcacttgtgctacatctggtgaagggttgtatgagggtcttgactggctttccaacaacattgccagcaaggcttgagcgttttggcagctggatatctgaacaattcactagtgctggtttacatattatataacatatacaccctaccacacatagtgtgggtgcctgtgaaggaaaaaactcctttgtggaggctagtaccagattgttccttttcgtgggcactataagtgcttatattttgtttggttttacaacatttactgtgctgtccatatgtacccgtttgttctgagatagtctagtaaattgatatgctttgtc

SEQ ID NO: 14832 - DNA, 1955 bp, Oryza sativa
  ref <308>: DATABASE ACCESSION NUMBER: AK065371
  ref <309>: DATABASE ENTRY DATE: 2001-12-06
gatccacatcttgattcttccatcgtagagaagctactgcctaaaccagacactagtaccatgcactgagcctgtaaagtttttgcaaatctactgcaaaggaagcacgatacagatggcgctctctcgctccgtcgaggtggccgtgcccgccgatccggccggcgatggcgatcgagataaaattcggctgcggcagctcggctacaagcaagagctgaagcgcggcctctctgttctctccaacttcgccttctccttctccatcatctccgtgatggccggtgtgacgacgacgtacagcacggggctccgctacggcgggccggtgtccatgacgctcgggtggctcgtcgtgtccgccttcaacggctgcatggccctgtccatggccgagatctgctccgcctacccgacctccggtggcctctactactggagtgccaagctcgccggcaacgactgggctccctttgcttcttggatcactggctggtttaacatcacgggacagtgggccgctaccacgagcgtggacttcgcgttggcgcagttggtccaggtgatcgtcttgctcagcaccggtggagccaacggcggtggctacatggcctccaactacgtcgtgctcgccatctacggcgccatgctcgtcatccacggcgctatcaacagcctcccgatccagtgcctctcttggttcggccagcttggagctttttggaatgcggcaggtgtctttgtgctggtggccttgatcccggctgtcgccacggaaagggcgagcgttgagttcattttcactcacttcaacacagaaaacggcatggggatacgcgacaaggcttacattttactcatcgggttgttgatgagccagtacgcgatggccggctacgacacatctgctcatatgacagaggaaacgaagaatgcagattggagtggcccgatcgggatcgtaacctcggttgctctctcgaccgtgttcgggtggatctacatagtgtcactcacgtcggcggtgacggacattccctacctgttgagccccgacaacgacgccggcggcaacgcggttgctcaagctttctacaccactttccaccggagatacggcagcggcctgggagggatcctctgcttgggagtcgtcgctgtcgccgtcttcctctgcggcctcgcctgcatcactagcaactcgaggatggcgtatgcgttctccagggacggagcaatgccgttctcgaaagtctggcaccgagtgaacaagcaagaggtgcctataaacgccgtatggctctctgtggtggtggcgttcatcatggctctgacatcgctgggaagccaggtggcattccaagcaatggtgtccatcgcgacgatagggctctgcatctcctacgcgctgccgatcttcttccgggtgacgacggcgaggggatccttcgttccggggccgtttcaccttggcaagtacgggatcgtcgtcggctgggccgccgtgctctgggtggccgccgtcaccgtgctcttctcgctgccggtggcgtacccggtggcggaggagacgttcaactacacgccggtggccgtcggcggcgtgctgctgctcaccgtcggcgcgtgggctctccgtgcccgcttctggttccaagggcccattactaacactaatgacggcccgctgtgacggcccataactgtatgggccgatgcatgtgtgctacggcccatggagttctacggctgacaaggaagcccacgtacatgtagccttgttgggcggcccagtaagaggccgttctttattttgattcgtattcccatgtccttggatggaaattcaacggtctacgattcggctgattatgttagaaaaagacaggcatgaggtacagaactatactaaaaaagcagcatgcgtgcaataattcaagcatagtttaaacatg

SEQ ID NO: 14833 - DNA, 2294 bp, Oryza sativa
  ref <308>: DATABASE ACCESSION NUMBER: AK065372
  ref <309>: DATABASE ENTRY DATE: 2001-12-06
tgtttaagcacgatgggatctgaagaattaattgacaagttgaagcaagatttaactgggaagaagtacctcattgtccttgatgacctatcgactactactgagtgggattcaataataagaaacttgcctataaacaacaatggtagccggatcatactgactacaagatttaaacttgttgcgcaacattgttccaagaaagaaatgaacatgcacaatattgaaggtctaacagacggagatgctcttgagctattcttaactaaggtacgcatggatggtgatgaatcagaattgaaacctgacttgaaggaggaagcaaaaattatcatcaagaagtgtggccgacttccccttgcagtcgctacagtgggtggtttcttgtctgccagacctcgaaatatcatagaatggagggagtttagtgatcgcatcagtgaagaatttgataacaacccaagtcttgagatgataaagaaaatacttgcatcaagctatgagggtttaacttaccacttgaaatcttgcttcctatatatgtcgattttccctgaagactctgacatcagatatagacgattattgaggcgatggactgcagagggttactcaagagcaacgagaaacaggagcaacgagaaagtggcagaagaacagttcacagctcttctcaacaagagtatgatccaacaatcaaaaacgattgccagtgggaagacaggtttctgccaagtctataatctcatgcatgaaatcatcatttcaaagtctgaagaagaaaaccttgttcttgttctagatgaccacatcacctcgcgctctaaagataaagtacgccaccttgttgtgagcaagagctggagcagagaaaagaacgatatgcaaaatatagtggatgtgtcccacatacgatctctgacagtctttggggagtggaaatcatttttcctttctaagaagatgaggatgcttcgagtgcttgatttagaagatgcagaaggtcttcaggatcctgaccttgtgccaattggaaagcttcatcatttaaagtacttgtctctacgaggatcttttggagtcttcaatcttccaaattcctttggtaacctgttgaacctggagacactagatatcaggggaacatgggttacaaagttgccagcaaccattggtaggctccaaaacctgaaatacgtccatgccggatctttagatgatgaggatgatcagccgataattaaactactgcatcagttcagatcaatccgagaagagatgggaaccaggttcgctgtatcatatatcatgttgttcatcaccgcttggttaagaaacctggatgtatgtggtgttaaagtgccaagagggattggacggttgaggtccattcacacactgagcatcgtgaacattgcacggggaaaggccttgctcaaaaacctcaaaaagctaacccaactgtgtaaactaggtgtgactggcatcaacaagaataactgcaaagagctctgttctgccattgccgaccatggccgcttgcagtccttattactgcgggcagagggtaatgctgggttagaaggttgtttggataacatgtcccagcctcctaaagaccttaagagcctccagttgtacggcaatctggtgactttaccagaatggattaaggatcttaaaattctacaaaagctgagccttcgcaacaccaatctgaaggcagatactaccatggaagtgcttggaaacctaccaatgctagccattcttcgtctccaggacaatgcgtgtgaggaggaagaactctgtttcggtcccgagcgtttcacaggtctgacgtcattggagcttctcaattgggagagcctcaagtcggtgaaatttgaacgaggagctactcctaaactgaaggtgctactgctgcactactgttggcaaatacacaatggtgggttttctggcatagaaactctctcgaccctaaaggaagtttcaatcttgggctataattatgaccagacctacaccgaattcaaggaacaattacagaagcaacttgacatgaacaagaacaaaccaaatctaagtattctgtagtccaaaactgccactggctttcatagaattgctccctccacactcaaatatgtggcattgtgtcattcaggtagtgtttcaaatttcaaaatcatgtataattatgacaatttcaacattaagttttactcccttttttctcctcatgtaccatacgctttaagtaattaagtgtataagtttagtttagtttc

SEQ ID NO: 14834 - DNA, 1631 bp, Oryza sativa
  ref <308>: DATABASE ACCESSION NUMBER: AK065373
  ref <309>: DATABASE ENTRY DATE: 2001-12-06
ggtccgcctccctcctcctcttccccccctcttcttccccaactcgccgccgtcctgcccgcctccaccctttcgcctcctcgttccccgcacccaaaccctaatcctagccgccgctgccgctgccgctgccgccgccatggccagcagcaacgtctccacggtctatatctccgtcatcgacgacgtcatctccaaggtccgcgacgacttcatctcgtacggcgtcggcgacgctgtcctcaacgagctccaggcgctctgggagatgaagatgctgcactgcggcgcaatctccgggaccatcgaccgctccaaggcggctcccgcgccgtccgcaggcacccccggcgctggaaccaccccgccggtacacgacctaaacgtgccctacgaggccacctcggaggagtacgccacccccacagcggacatgctgttccccccgacgccgctacaaaccccgatccagacccctcttccaggaacagatgcagggatgtacaacattcccactgggccttcagactatgccccttccccgatcagtgacgtgaggaatggcatggccatgaatggagctgatccaaagactggtcgcccgagtccctacatgcctccaccctctccctggatgactcagaggccgctgggcgttgatgtgaatgtcgcttatgtggagaaccgtgaggacccagataggaccggacagcctccgcaactaactaaggattttctaatgatgtcctctgggaaacgcaagagggatgaatatcctggtcagctcccttctggttcttttgtgccacaacaagatggaagtgcagatcagatagttgaatttgttgtctcaaaggacaacgcacaacaactttggagttccattgtgaacaagcaaggaacagcaacaaaagaatcttccacaaaggaaacaataattgctccaacgattcctcaacgggatgggatggatgactataatgatccattttacttccaaggagttccaactgaggattacaatacccctggagaatcgtcggaataccgagctcccacaccggctgttggaacaccaaaaccgagaaatgatgtaggcgatgatgatgagcctccgcttaatgaagatgacgatgatgatgatgagttagatgaccttgagcaaggggaggatgagcctaacacacagcaccttgtcctcgcacagtttgacaaagtgacaaggacaaagaaccgctggaaatgcactttgaaggatggaatcatgcatttaaatggccgagatgttctattcaacaaggctaccggcgaatttgatttttgaattttgtgacaaagaggagctattttagaagctgctgtatcgacatatctttgtctttgacataagagtggggaatgacaaaagcactggtggggggtgggtttgttcctgtggaggctttgctctacccagtgggtttgttaccgtaactgttatcgctgtaaaaaaaaatgctacagttgggactgttgtagacattttcctgagatggttatcttaaagttggcggaggattaccttgtctgatttgtgttatctgtttcaatttctgtaagatggtttaaagaagtaaattttctgttaccgc

SEQ ID NO: 14835 - DNA, 1884 bp, Oryza sativa
  ref <308>: DATABASE ACCESSION NUMBER: AK065374
  ref <309>: DATABASE ENTRY DATE: 2001-12-06
gcctcgatcccccctaacagcagcagaatccgcgtcctctcgccgccgccgccgcccgccgcggcgcgcgtgcgtgcatgttccgatccatggggacggggacggggacgaagccgccggcgatgacgacggagcggtacgagttcgggccgctcgtcggcgagggcaacttcgccaaggtgtacctcggccggcacagggccaccggcgaggaggtcgccatcaaggtgatggacaaggagaagctcgtcaggctcggcgccacggagctgatcaagcgggagatcgccgtcatgcagcggctgcgccacccgaacgtcgtccgcatccacgaggtcatggtcaacaagcgccgcatctgcgtcgtcatggagtacgtccgcggcggcgcgctctaccgctacttccgcaggggccccagcggcggcgccgccggcctccgggagcacgaggcgcgccggttcttccagcagctcgtctccgccgtcgcctactgccactcccgcggcgtgttccaccgcgacatcaagctggacaacctcctcgtcgacgagcaggggaacctcaaggtcgccgacttcggcctctccgcgctcgccgacatggagcggcgagaggcccacctccagaccgtctgcgggacgccgctgttcctcgcgcccgaggtgttcaagcgccggggctacgacggcgccaaggccgacgtctgggcatgcggcgtcgtcctctacgtgctcctcaccggccgcaagcctttccccgacgagcacgtctccaggctctaccgcctgatcgggcagaaccagttccagtgcccgccgtcgttcagccctgaccttgcccgtctcgtgcgccgcctcctccagcccgaccccgaccgccgcatcaccataccagagatcatggagatgaggtggttcaagaggggattcaaggaggtcacctactacatcgacagcaacgaccgcctccgcagcctcgacggcctcgacggcgagccggagctgtacgactccgacaccgacacgatcgagtcctcgtcgtcgtcggaatctcccaccccggtggccggaacgccccgcggcatgcacacctcggtgtcggcgccggctctgtccgagctcgaccgcatggaggacagcgcgtccctcccgctcccgctcccgctcccgccccggccgcgcatgccgcggcccaagagcctgaacgcgttcgacatcatcgcgtcgtcgccgagcttcgacctgtcggggctgttcgaggagcgcggcgagaggatgcgcttcgtgtccggcgcgccggtggccgacattatcgccaagctgcaggagatcgccgggatggtgagcttcacggcgcggaccaaggactgccaggtgagcatcgaggcgacgcggaacgggcagaagggcgcgctcgccatctccgccaaggtgttcgagctcacgcgggagctcgtcatggtccaggtgtgcaagaaggccggcgacaccgccgagtaccgcaggttctgcgacaacgagctcaaggccggcctgcgcggcctcgtcgtcgacgccctgccgcctccggtggagggcggcggccatggcggcgcggctgctgcggctgaagccgaatgaatgatggatcagttggctcgaaagaattgatctttcaacaaggattgatcccagtatctttaattgtttttcattttattactcatcattgattagtttattagtctagtttagcatttttgacagtgattgtgtggtggatcctgatgaatgtatcatgtggcactgttgctgtttaattaggctgctaaatgctgctactaataccctgttctcgtagttgtgctcattaaatttgggaaagattgttcattggcaagcc

SEQ ID NO: 14836 - DNA, 2969 bp, Oryza sativa
  ref <308>: DATABASE ACCESSION NUMBER: AK065375
  ref <309>: DATABASE ENTRY DATE: 2001-12-06
cagcagccagtgtgtctccagtattggacagtggggatccagatgcagctgaggttgatgtagtagtagggatgcaagaacaagctgctggttcagcgcttgccatgttggtaacttacggggagactgatacctcagcagtcagtgtatctccagtactggagagtggggagccagatgcagcccagattgatgtagtagcagggatgcaagaagaagctcctggttcaatgttggccatggaggtaacgtacagggaggttgatgctgcaacagtcagtgtgtctccggtattggagagtgtggagccagatgcagccaagatcgatgtagtagcaaggatgcaagaagaagctcctggttcaaagcttgccatggaggtaatgtacggggagactggtaccgcagcagtcagtgtgcctctggtattggagagtagggaagaggggtcacttcaagaatcaatgcagagaccatcttctcccacaatgaacattgagcaagagtcaatgcagagaccattttctcccacaattggcactgagacaagttcgccagagatggctcctgctggatctgagaactgtaaagtatcatggttgccgttgccccctcctacaccacttggcgaatcaatgccctccttgccagtcgcagctgcccccaaggttttattggtgatgccggaggaagcggttgagtcagtcccttcatcggaagctctggatgttgaaaaacctgcctccatcacacaggctgagcccagctcacctaatacgccaccgccaggatttgagaattttaagtcgtcatggttgccgctacccacgactcctcccccagttgaaaccactgatgtcttgccagatgtggtggttaccaaggcagtggaagcacccattgaggaagtgtctaggccattgccagctttggaggtgacaaacatggagtcagacactgtcctcagtatcttgcccacaacagtcttgccaacagaagggactgagggactactgcaacaaccactattgagacccccttctccagtggtgcaatctgaaccatgtttgcaaaatgagatggcacctccagggttcgagaattttaagtcatcatctgaaccatgttcagcagaggagatagcacctccagggtccgataatttcaaatcatcatctgaaccatgtttaccagaggagatggcacctccagggtttgaaaattttaagtcatcatctgaaccatgttcacaagaggagatggcacctccagggtttgagaattttaagtcatcatggccaccacttcccactctgccccaaactgtaccagatgcagccgcagcggatgctttggcagcaacagtggaagaagcagctgggccaccacctgcattggagttggaggcaatggatgtggacatggatgccatacatccaccaccgctgccttttgacagtggagtggagtcattgcaaaagccactgccaagagcaccttctcccataatgcaagaagcgccctgttcaccagatagggcaccgccagggtttgaaacctataagtcatcacagttactgctaccatctccatctctggcacaaaccacaaatgtgcgacaagatcaatcggtaactgaacctgtgtctgtgatagaggaagcccctcagctactgcactcagtggaggtaatgggtgtacatatggatgcagtacctccattgctaccatcatctgaaagtggagcagatgggctatctccgcagcaattcgcgcaacctcctcctgcagaaaaggatacaacaacctgtttgccagatatggtgcattcaggatgtgacaattcagagccctctcagcttctgtcactgcctgctgttatttctccagttcagaccccagatggcttggctgatgttcctgccattgacagggttgcagtggcattggaagaatcgcctcagcgaccgcttgtatcaggggaaatggaagctggcacagtgcccattcggtcatcaccactgaagaatatttctgaggggtcactgccacaactagaatcagagtcacattctcctacatcacaggctgcagatagcttactagatgcatctgactcaaagtctgtggctgtggcctcagaggagatgtctcagctaccacttgcatcgcaggcaactactacagaccttgtcagtacaactgcaatgcagccacaatctgagggtatagtggatgagtcattgcagcctcagcatccaccctcttctaccgcacatgattcaccttgtttacaggactctgtgccattggtgccaccaccaccttccccttacctaaataaagaagtaggtcaaatggtatgtggaagctgccgtattcttcttgcttattttagaggtgctggttatgttcactgtacttgttgccagacaatgaactatgtattggaagctcatgaagttggtaaggtgcattgtggacactgtgcgacattattgatgtatccttttggtgcgcctgctgttaagtgctcgttgtgcctctttgtcactgaaattggagagcggaatgttcgccgtcggttatcaatcgagcaacccacaagaactaactcatcagggctagctgaagcctgatcagttctggtcccatgtacccatcggattccaagaaagcttcaaatgctaatgtggatgaaaggaacagaatgttcgcccttcgtcatgaggtgtgggcatgaaagttcaagatggtatggacaagccaaagtgtacaaagatagcgttttttttttcattgatgtagacaggaaaggtgaccttgttagtacgactagatctcctttgaaagggaaaataaaagaaaaatagttcgattcaatctggaggtgatatgcgtatgtcatatgaatgataacagagtagttttcagatggttctttcgcggtgaccatcatgttgcccccc

SEQ ID NO: 14837 - DNA, 1650 bp, Oryza sativa
  ref <308>: DATABASE ACCESSION NUMBER: AK065376
  ref <309>: DATABASE ENTRY DATE: 2001-12-06
gggttttggggtttgggggagggggagggggaggggatgccggagctgccggaggtggaggcggcgaggagggcgctggaggcgcactgcgtggggaggaggatcgcgcgctgcgcggtggcggatgaccccaaggtggtggtcgccgccgccggggggcgcgtggcgttcgagcgcgccatggtcggccggaccatcgtcgccgcgcggcggaggggcaagaacctctggctccgcctcgacgcccctccattcccctccttccagttcgggatggcaggtgcgatctacattaagggagttcctgtgaccaagtacaagagatcagttgtcagttctacagacgagtggccctccaagtactccaaattttttgttcaacttgatgatggcttagagttttccttcactgataagaggcggtttgcaagagttcggttgtttgaagatcccgaaactgtacccccgatttctgagttaggaccagatgctctctttgagccgatgtcttctgacagttttgcggactcgctgagcagaaagaagattggaataaaagctcttctactcgatcagagcttcatatcaggaattggtaattggattgcagatgaggtgctttaccagtcgagaacccatccattacagattgcttcaagtctatccagggagagttgtgaagcactacaccaaagcatccaagaggttgtgaaatatgctgttgaagttgatgctgattgtgactgctttcctgtggaatggttattccatcaccgatggggcaagaagcctggtaaagtcaatggacagaaaattgagttcataacagctggtggcaggactacagcatacgtgccacaactgcagaagctgactggaatgcaatctagcaaagtagtcattgctaacccagaacaagtggcagagaacgatgatgcgaaggaaatagacacagatccagaagatgctgataatttgaatacaaagaagcgaggagcaacttctagggttgccaggggaaagcaaaagagagatgccataggtgccctttccagaaagacaaggaaaaatggtggtggcaaggagaaaccaggtagtgactatagtgaagatgatggtgagactgctgaaccaaacaaagttagcaccagtagcaagggcgagaaggcagatccggtgagaagatcatcaaggaccgcatcgaaaccccgccaggtaaataaattaaaagaaagatagcaagagatgaagagactcgctgatgttcgcaaagatcattttggtgtgtgtatagctttagctttagatgctctccgatggccatattggtgaaatccttgtagccttgattagtgagttcttttctctgtgtcttgtgcgctactgtaccagattattcaaagatgccctcttggaaattggaaggtgtaatcgttccatactgggcaaaacatatgcttctcctgtgcaacatgaacaatgacatatctaggctatgttgctcgtgtcaaaccaccacctaggttatctttttttatttttttttaagacggaagaagtaaggatgaatgtatacacacatgcttgtctatcattcttaagatttgagtctcttggggacagagagtaatccatagatttaactcaatt

SEQ ID NO: 14838 - DNA, 3225 bp, Oryza sativa
  ref <308>: DATABASE ACCESSION NUMBER: AK065377
  ref <309>: DATABASE ENTRY DATE: 2001-12-06
gaatccgacgccctcctcctcctcccccctcccccctgctggatctcctccactccccatggtagcctcccccgccccgcgctgctgacccctgggccccaccgccgcttccgccgccgctcccgtttcccccggctctcgctctcgcgcgagccgtagccgttgctggggaggaggaggaggggaaagctcgaggtatttggatgcgcgcgagccgatggcgacgccggccgccgagaagcccgacggggtggagatccgcgaggtgtgggaggacaacctcgaggccgagttcgcggtgattcgggagatcgttgacgacttcccgtacgtcgcgatggacacggagttcccgggcgtcgtctgcaggccgctcgggacgttcaagtccaacgccgatttcaactacgcaacgctcaaagccaacgtcgacatgctgaagcttatccagcttggtttaaccttctcgaatgagcatggtgggctcccgtcgcttggccccgagggtcgaccttgtgtttggcagttcaactttcgtggcttcgatccccggaccgacgtcgctgctgcagattccattgacttgctccggcgcagcggtattgacttcacccgtcactcggctgacggcgctgatgctcgccgcttcgctgagcttctcatgtcgtcgggcgttgtgatgaactctgaggttcgctgggttacgttccatagcggatacgactttggctacttgctcaagttgctcaccggcacatacctgccagacacgataaccggattcttcgacctcatcaggatatatttccccgtcgtgtatgacatcaagcacttgatgcggttctgcaacagcctccatggtgggctgaacaagcttgccgagctgcttgatgttgagcgcgttggaatttgtcatcaggctggttccgactcgctgttgaccgcgctgtcattcaaaaagctcaaggaagcatacttcaatgggttaaccgagaagtatgccggtgtgttgtatggtcttggcacagaaggtggggagacctcctctgctgctcactaagtaatggatagttaaataaaggatgaactatgtttggaaaaaaaaggagagagaaatgggtggtgaatgtgtgatgcttgattacttccttttgcttgacactagattgccagaaaggtaccacttttaccctcaatcgtggtttactctgggttcagttagattaggtgaaaaagtattttgatgtctgacttagcagttgaagcaaattggacaccattgtagctcctacttagcggttgaagcttgcaattctacgctaatcattcacaccaactgtagaattaaacactgaatagcaaaaggaacacttccttttgtcgtatcatatgccaatctcatcaaatctagtgataaatattttagagagtgactctttaagtaatgagtataggtgctgttcccttgcgtacactttcctggaagcaaggacaattatagattccatgggttggttattcctttcttaaatgatggatttcttttttgtctatttggtcatacagatgtaactaacgagcttatatgtgcatgcaatttttttagtttgaacacatcattcatcgcaatagattgcttcagatacactgttttacaccattttaggtgtcccactggtgaagaaaatacctgataatatatatgatggccatgcaaaagatagatatgcaatcctcttatttgtgtactttaaatttgaaaactgtctagaacatatcaactagccaagtgaaagggaaattgtctgacctttcttttccatgttctgtaacctctgttataggctactatagtttctttagtagaatccccaaatttcccctttgtgttccgagcattttgtattttctcacggttgttaattgcttcatgcacttcccatttcctttcatattgtctacagtatgtgcgtattttatcgatctgcacagtgttttccttgctctcctaattttcctttcatattctctactgcatttatccatctgaacagtgccttcctttgaatcttattatgtgccatctccgttctttctactggatctcatagttccaatatttcctttttgtttctaaaatcgagtgcatactgttctagatcagtagaaatttcttacttgaagtatctactgatatattagctctgtgtaatattgttcctattgtcatatcttctaggaacttttgcaaggacaatcctctgtttgtgtggaggcatgtctgtgtgtgggcatgcctccactgcttttatatgtatcattcatggggaaattcagttctttccactgggaaaactgaaaaatgaatatttttctagattgtctatcttagtttgtgaaatgggctttaccatgtcaagtatttatgatgatatacattctgtggagtgtggatctgaacatttcatttcttcaaatttgttcaacactgatacctgtgttttatgaatgctgttacttatttctttaaaagaaatggtgttcaacgcccggcataacgtccagacatgttcatttcacgtccggcataacgtccagagctaacacagtatgatgatacaagttgtgcagcgttgactctattatcaacagaaatgatattgatgccatgacaatgccctgttatctgttaggctatctgttatgggctaggattcatggagggtaaacagcggctacactgatcctgcaggctgctaagttttttagtttaatttgcatgttgtggacagttgcctccgtattcatactgttttgcttatcatgcagtctgcattttcagagtttcagcattgtatgttgtcgacagttgtcactcaattgtgggatccatatatagcctctctattaatactgttttgattatcatgcagtctgcactttcagagtttcaccctgtagcttctgcatagaaaactttgaattttgtagatagtttctgtgccataattatgttgttggtgtgataggtgctgattagcatttctctctgtgctggtatgctacgagagaagagtttttgattcagtaggaatctggtgcctatctgttacctttgctctctgtacttgtctagtttatctggacgttgtttgtaacagttagcttcactgtgaaaaatgtcaccgtcctagttcatgttgaatgtaaagggccattacaccc

SEQ ID NO: 14839 - DNA, 1991 bp, Oryza sativa
  ref <308>: DATABASE ACCESSION NUMBER: AK065378
  ref <309>: DATABASE ENTRY DATE: 2001-12-06
ggtcgtcttcttcccgcgcctttcgcgaagccaactgctcgaacggacgcacccgtgcagccgcgctcgtcggccgtcgccgtcgaggccgcccctccgccgccgccagcagctgatccgttcgccattccttcgcgcgctggtttccacctttccttgcccgtccgtcaggccggacatggcacgccgcgtcgctgcccgcgcccgcgcccgcgccggcggcgtcccgcgctcggagggtacgatccaagaccgagcacgcgttgggagcggtggcgccgaggacgcactcgacgtgttcgacgaattgctccggcgaggcatcggcgctccgatccgcagcttgaacggcgctctcgccgacgtcgcgcgcgacaaccccgcggccgctgtgtcccgcttcaaccgcatggcacgagctggtgccagcatggtaactcccaccgtgcacacctatggcatcctcatcggctgctgctgcagtgcgggccgcttagacctcggtttcgcggccttgggccatgtcgttaagaagggattcagagtggaacccatcatctttaatcctctgctcaagggcctctgtgcagacaagaggacggacgacgcaatggacatagtgctccgtggaatgaccgagctcagctgcgtgccaaatgtcttctcccacaccattattctcaagggactctgtcatgagaacagaagccaagaagctctcgagctgctccacatgatggctgatgatggaggaggctgcttacctaatgttgtgtcatacagcaccgtcatcgatggcctcttgaaaggaggggatccggacaaagcctacgctacataccgtgaaatgcttgaccggaggattttgccaaatgttgtgatttacagctccattattgctgccctatgcaagggtcaagcaatggacaaggccatggaggtacacgataggatggttaagaatggagttacacccaattgcttcacgtatactagtcttgtgcatggattttgctcttcagggcagttgacagaggctattaaatttctagaaaagatgtgcagcaatggtgttgaaccaaatgttgttacttatagctcgtttatggactatctctgcaagaacggaagatgcacagaagctagaaagatttttgattctatggtcaagaggggcctaaagcctgatattactacctacagtagcttacttcatgggtatgctatcgaaggagctcttgttgagatgcatggtctctttgatttgatggtacaaagtgatatgcaacccgatcattatgtcttcaacacactaatatatgcatccgccaagcaaggaaaagtagatgaggccatgcttgtatttagcaaaatgaggcagcaaggattgaaacctaattgtgttacgtatagcactttgattaatggctactgtaaaattactaggatggagaatgctttagcacttttccaagagatggtgagcaatggtgttagtcctaattttatcacatataacataatgctgcaaggtttatttcgtacaggaagaactgctactgcaaaagaattctatgtacagattatcaaaagtggcaaaaaagatcttatagaacaggggttgctagaagaattggatgatctatttctttcaatggaggacaatgactgtagtactgtgtcgactcctgcatgctaaattgcagagttacaaagttacttcaaaaaggggaagtaggcactaggcagtgctggggtttacatgtccaaaattgatcaaaataacctccccgttgaagcttcgactgttgatttgctgattttgctgatttcaagcaggaaattcaatcaaacatacggaatttctccctgaaaagttttgctctgaagtgaaatccatcctgtttgaaatggcctacagttatgcagttgtaactggctattgttggccttctcactgaattagtaatacaaacaagaaattctggacc

SEQ ID NO: 14840 - DNA, 1667 bp, Oryza sativa
  ref <308>: DATABASE ACCESSION NUMBER: AK065379
  ref <309>: DATABASE ENTRY DATE: 2001-12-06
ggtgctactattagaggaggagacgatctcttccccgtccctgcaggatcatgggagagaaacatatcatcctgccaagattggttccaagtaagctatcgcaccgccagcagctgtgtggtcatcgatcagtttctgagatttcaggtgtagtggatgaaaccttgggaaagaggcctctggatgggcagaatgatatactcagatacaggttgttcactagtacgtggaatgttggtggtatgacaccatccagtgatctagacttggaggattggatggattcaacagctaactcctatgacatctacgttcttgggttccaagagatagtgccactcaacgcaagaaacgtgcttggtcctaggaatagctgtatatctacaaagtggaactcactgattggggaggcactaaacaaaaggaggagaagaggagcagtgttgcatcaagaaatcacaaatagcagtgcaacggagagatctgcgcaggaagaacactttagatgcatcatgaacaagcagatggtgggcatctttatgtcagtctgggtgagaagcaatcttaggccatacattcaccatctgaatgtgtcttgtgttggttcaggcatcatgggctacctagggaacaagggctcggtgtcaattcgatttgtgctacacgagacgagcttttgctttgtttgctgtcacctggcttcaggcggcaaacaaggggatgtactgctgaggaactttgatgctgcggatatactcgtgaggacgagatttcctggtggtgcaacccaagaattgccaaagaagatccttgaccacgatcaagtcgttttgctcggtgacttaaattataggatatccttggaagaggctgagacaaggttgttggtggaagacaagaattggtccatcctgttagagaacgaccagctattgatcgagttctcgacgggtcggcatttcgacggttggcaagaagggctgatcacgttctctcccacctacaagtaccaccccaactccgatcagtactactggtgcttcgacggtgcgcttggaaaaaagaagcgtgccccagcatggtgtgaccgcattctttggcgcggtaagggcctgaagcaaatccaatacgacacatgcaactacaggttgtccgaccaccggccggtgagagcagttttccatgccgaatgtgtgatcagaggagatgcagattgcgcgtgtggctgtattgctctcagctcttcgagtgagtgacaaatggtctaggaggatacgtgccatttaaccaaagatttactcatgagggcatgactgccaatctgaaactgaacgactcgatcatgattcacggcaatttacctgtggatccgggatggattttcaggtgtgaaatctgccgatttttagaatcttgaatggtaactggaggctggaatgacaggaatgctcaattggaactagaagcgtttaatggtcttctctttttttaactctgaccgaggttgcacaaatgctcattgttctttaaatttattgatggagctttctcatttgaacttgtcctccgggttaatttgtttcctcgatcatctctttactggaagaatatctgtatttgtacattttgttcatgagaatcgaaacagatatgagagggcttggagc

SEQ ID NO: 14841 - DNA, 2473 bp, Oryza sativa
  ref <308>: DATABASE ACCESSION NUMBER: AK065380
  ref <309>: DATABASE ENTRY DATE: 2001-12-06
gggctaaaacccacattatcctcaggcgcaaccgcgctctccgttcttccttccaccccaactcgccatggcgctcgccgccgcctccgtctcagttctccatctcccggccatctccctcccgctcccttgccttcagggctcaaaccctagccgtcccagcctcggcttgaccaatgccctcccgtggcgccgacgcggtgggcgcggggcgggggcggtggcgggggcggtgcgctgcgcgaagcgcacgggcaagcggcggtacccgtcggagaagaagcggcgggttactggcggctctccaagctcgccgtccctgcccgcgacgaccccggcaaggacttcgctggtgtctccccgccgctcctccaagccatcgccaaagcactgaaattcccggtttcttctatgctccctgaagaggccttcaccgttattcgcaagtcgtttgatgcacggaagattttgaaagaacctcaatttgtttataccgttgatgtggctgttaagagacttctggatttggagccgagaacgtgggattttattgctagattggaaccaaagcttggaacaatagaatacatgcctgatgagaaagtagcatctgatctggtcagtatgcttaatgtttataagcaaggttctgatggtgaactgggaatcaatgatactgtcaataatggctctatctgtagtccgcgaaagaaaccaagggtggcagttgtaggaagtgggccatcaggcttgtttgcctcccttgttctaggtgaacttggtgcagaagttaccttaatagagcgtggtcaacctgttgaacaaagggggcgtgatattggtgccttagtagttagacgaattctccattcagaaagcaacttttgctttggagagggtggtgcaggtacatggagtgatgggaaacttgtgaccaggataggaagaaacactgatggtgttcaggctgttatgaaaacatttgttcaatttggaggtcctccaaatatactagttgatgggaaacctcacttgggtacagataaacttgttcctctgctgcggaacttcaggcatcacttaaaagagttgggtgttaacataatatttaatactagagtagatgatcttgtagtggaaggtgggcaagtaaaaggagttgtcgtgtctgactcaagactgcagctaggttctcccaaccagacactatcatttgatgcagtggtattggcagttggtcactcagctcgtgacacatacagtatgcttctgaggcataatgtagatatgcacccaaagagttttgctgttggcttaagaatcgagcacccccaagaactgataaacgacattcaatactctgaattggctgctgaagtacataaagggcgtgggcggatacctgtagcagattacaagatagtgaaatcttttggtgaaggagatgcagagctaccagaacaaaatcgcagttgttactcattttgcatgtgtcctggtggacaggttgttctaactagcacaaacccatcagaattgtgcatcaatggtatgtcattctcaaggcgtgcatccaagtgggcaaactcagcttttgtggccactgtgtcatctcatgactttaggccatttgaatcccatggttctcttgcaggcgttgaattccagagagaatttgaaagaagagcagctaccatggggggagggaatttcgttgttcctgcacagtgtgtcacagattttctcagtaacagattgtcagttacaactctcccaccatcaagctataggctgggagttcggccatccaaactccatgagctattcccttcgcacataactgaagttctacaacaatcaataataatgattgaggaagagatgccaggatttgtatctagtgaggcattacttcatggtgtcgagacaagaacaagctccccattgcaaatttcacgaaataccggtacatatgagagcacatcactgcaagggctgtatcctattggggaaggtgctggctatgcagggggtatattaagtgcttctgtggatggtatgtattgtggttttgctttagccaaacagctttctctattccatggcgatatagagtcaactcttggcaaagcacaaaaccaaaaaggcttcgtaaaatattgagtatggatgcgtaattagttgattgtaggtatcagatattgaaagataaattcaccgtggtagcaaattgcctaggaaaactccttatgtagagaagttgtaatgagtgcagtcatagaaaatattgagcgagtatgtactatgtaaatgacatcaaaggtgctataggataataggagtctataccatgtcgctatgtaataaactagtgaaatttctaggctaggaataacaatataataattaacttagaggacggcattttaatcttgtagattattcaataatgctgcccacaaattttatgtgc

SEQ ID NO: 14842 - DNA, 2958 bp, Oryza sativa
  ref <308>: DATABASE ACCESSION NUMBER: AK065381
  ref <309>: DATABASE ENTRY DATE: 2001-12-06
gtgtatcgcgtaaaagaaagagaaatctcccgtctcgttgtctcccccgctgcttgcgccgccgccaagacgagtcgcggctgagcatgggagggggcggcgatctccatccggcgagcagagcaggggagaggagaggatcctggtgaggggctgcgatctccatccggcgatcttctcgggcgctcgcgcttccggtccccccaggcggcgatggcggccgcggcggttggggtcgcgagcagagcacgccggagttctggcccgaggggagtggcattctgccgatggacgaacggcctcctccacccgcgcttcgtcttccccgaggccgccgcggtggcgggctcttgggctggctccgctcaaggtgcgttttgcgtgaagtgggttttaaggatggttctaaacaaggtgctcgagctattttgtgtgaagaagaaggattccaagaagaaaggcaaagccattaatcctctttgtaaagttgccgctccacaccccactgcaaatgtcagtacaaacaacagccttttggatcccttttcaactgggaatggtactgtgctatctgtgcaaaaacatgagcctgaatgttcaagtgttatatcatcaatgacaaggacagaatatggatttgaaagtgatggttgcaattcgtttagccattttgatgttcaagatttttctgatcattactatgcaaagaattcaccagggaagacctccaaagattgggtgaagacaatccagaatgaatggaggcttctacagaaagatctacctgaatctatctatgttagagtttatgaggataggattgatctgctgagggctgccattgttgggccagctgaaactccatatcatgatggtctgttcttctttgatgttcactttccttctgaatacccacaatcccaccgcttgacgcatgtgcacatcccttctttgatgagctacgagagcccaatgcacacctgccatggcaaatggtcgtccattccctcctctgttcaacttcaagcatgaactagctggcgcctctccagaactcgtccacagattcataccgtaccatatcagacggcaacatggcctcaacttgcgcatgctgggagttaggatggcaccgttttgttcgtttatttttccatgagctggacattgcaatcctagatgactccattgtcttggacttgggactccatctcagattgcaccatccatgattcttccatgatctatccatccgtccagccatttcagcaaggactcagtgccagagaagtacaattatgtaaattatctagccatggagaaatgcgtgctgctgctgctggtgttaagtacgtgacggggtatgctggttgagtagtaggtaaggttaaggataaatgtagttggtggagactgagagacatgttaagctaggggaagctttctttttttctcctttcattttggtttcttcccattttgtgatcttagcattgccctacagtagtgtagctgctccctgtttttgtttgctctttcatcatgtaaatgccaatcccaatcccaatcgcaatgaaccctcttcctttacatcctggtctactccctgtgagtcttaggtctgtgagtttgtgctgctggttctccattcaaggtgccttgggtgtgcgttctgatcgatttggcgtgacgtgtttgtttccacagggaaggactgcaaggagaagcaccctaacgtcaagcaggtatcttgtggcgcatttgggttgctctgctgcgttaactgctacaatgtgtgttctgacttggttgatttggtggtgacaagtgcaagtccatgtctgatgctgtgagttcctcacttcctgtgcccatgttctgaaccgttccatatgcatttctcacttgatgtaatttcaaattttgggccatatatctggtagttttgggccatatatctggtagtaattcaaacaaatatagttttacctggagttctagctaacatctcttcccgatccttgagatcacatccgtttggttctgcatgtcctattgtttgaaacttgctgcctattagaacctccttagttgtctcaatacttttacttttattactgccatattaattatcttgttgctgagtcctgttttgatgattatgcacaaagtatccagttgttctggtacctaaatgagtagtttgcttgctggcgtatcacatgacttaaacaataataattctctttttgtaactgcatttcttggttcaagcttatatctcagttgaccataggctatagtggaaagttcatagatcaaatatgttaagggtaatggaatctatttgctctgctgtgcatttaattgaagcagagatttattaatctggttggctatttgatatcaggtgaaagcaaatatttgaatgatattatgtgaaacatacgacaggttttggcacttgacaaatgctttgttgacccacgttgtttattaaatcccacacaagtaatgaagagggcattataccattaacagatgctattcccaatattccaatcgtaagttttattttatgttagtgaaaatctagttttcattgttttctccataaatgccttgcatgtgtaattcttgtacatatactccctgaactgttattaatatagtatggttcatatgattctgtcccgtgtttgattaaaaaatttaggatatcgcctaaaagatgctatttctaatttcatgttagaatgatggcatagagtagaatgaattgtacctttgtttgtaagttaaaaactttgggttatttattcttgtatttggtaatacaatgatgtcctgttgccttgcttctataacgtggcaataataggttgggctactcaatgtcgctaagggctactatggctcagatttaccctttaaaaaaataataggaaagccctggcc

SEQ ID NO: 14843 - DNA, 1785 bp, Oryza sativa
  ref <308>: DATABASE ACCESSION NUMBER: AK065382
  ref <309>: DATABASE ENTRY DATE: 2001-12-06
ggcggccctttctctccccgccagctcatgcctcgcctccgtgcgccgcgctcctcgccctcgctctcgctcgtgcagtgacatgtcacgcgccgccgccttcacctcctccaacggtccattgacgatgaagacggaaagagagagggcgagagctagaggggatggggagaggaaggcacgcagcgagttcccctccttccttcgtagcaattggtgcttccaccagcaagctttctataacgtggagtgtcgccgaccacggccgcagcctccttcctctggattggactccactgggaactcctccgacatatcaagtgtgcctgtccaccttctacctctgaggcaaagattggatcaagcaagctggatctgactcagcaccttgatctgctcaacaaccggagcccccacctccttatacatcccaaagatggatatgcatcttctgtattcagttaggataaggcttccaaggtctgcataaagcaaccgtgagactcacatgctacaaaattttggtttcacatgatgtttatgactgaaagtaatgcagtatcaggcatgcaaaaatagaagtttagttgatctactggtgcttcatctgcaaacaccatggatcagttcatgacagcatgaccataaggttgggagggacaagaacaaggtgtccattaaagttatggagataatgctgttcaggccggtccagtgaaaagagattaaagaggattaaattgtttgcagcgatggatcgaagttggatgtatagaagaactgtgcgacgtcatagcaaatagtatagaaattgagtattaaattttataaacaccgcggaggaggataggaaaagaagaaacaagattacatatgttgtcaatgtgcatattgcaaaaatgagatatgtttgatagcagagtggacgtacatgctcatctgatacaacgaggattcatggagggctacacatgttgggtgaagcatggagagcaagaatcacttgacgatgttgcagctgcagacagaagtggagcacaaaattaggaaaatgaagatgagcataatatgtttgtaccttctccattaggcggtgaaatggttgatgtggatcacgatctgatgcaagacatattacatgacgttgaggacacagcttacaacgagagagattccataaaattcagcaggttggtcggtgactcggagacgcctctatacgccggatgcaaggcaaaacacaccaaattgtcagataccttgaacctaacgaagctgaaggcaagtagtggatggacataaaagagtttcatagatctttggggaatactgaaagcaatgctatttgatatattgtttacatatcttgctagttacatgatcaaactgattggcacacatgcatctcatcaatttttggacctgcactggagctaagcagatctcctaggtcattgctgttgtcgacttagttcgcaccaacaaagttctggcaccataggccaagcgcatatttttcatcaacaccgtgcacttgcggacttatttgtagccatcacaaataacaacagggagagggggcggtgatgataagttacccgagggtgacccggcagggccctggggtgtgagttgtctttctaaaataagagtgtctaattctatatatatctatatatcctatcaatagcattggatcctctcatgctcaataaattcatgtcttatgtacaattgcaattccaaatcaaatactatgaagcttaaaatgttgttttttaagtc

SEQ ID NO: 14844 - DNA, 2568 bp, Oryza sativa
  ref <308>: DATABASE ACCESSION NUMBER: AK065383
  ref <309>: DATABASE ENTRY DATE: 2001-12-06
gaatggcgtgaggcgcccggcgacggcgacgacgtgctatagggatctaatgggtcaggcggcaagaacgggcatgtccgtgttcgtgcgaggaggcggggacggtttcgctcccgttcacgcggttgtcgccggcattcgtccttccccgccggtactcccgttccgctcagccacggcttcgacctccaccgcccccaccgggcctccacctccggcgtcagcttcctttgcgcgccccaaggagctccaccgccactggttagccccgtatcccgtcacccatttcctcctcctattcctccgctctaggtggcgacggtcgccgccgccgccccccgtgcttccggcgccgtcactcgtttccgcttctgtcgtccacgctggtcgtcttcttcgactccgttacctgacccgcgaaatccagggagctctcgacgttggtggacgaaggaagccgatggtacccctccctgacaccggtggctgcgtgaagccgttgtcgtggctctccggcaccggatctggtggctcggtgtagaaactgaacggcggcggtgtcaagaatcggcagcggcgaggaggcgcttccaatggtgtggaatgaaatcctccaaatcgatcctggaagcggcgatggcaaaatcaatcttgctgtgcgctgttctatttcttttttgcctaagggaatatataaggttaacctcttctcttggtcaccgtgaatcagatttgctttgcatcagcagttagaaccgattaaatttgttttttccttcatttgagttgctatggttcttgtggtgttgaatcattcccatcgccaagatgtgaacctgcagggtaaagaaggatgagatctacagataacccacttaattaggtattagcctgaactgaaaattactactcctcatctgatgtatatggcgaacttactagacaatcaggcttttgaatgttacctgaccacacattgttactaacatgtgctaattttagtcagaaataaatattgaatgttcagctgttgctccctgattggtaccccaaggagagcccaagcctgtggggatggccggatgggcgctgcccacgccgccaaccttcctcacacatccacaggagcaggtacgcattgacctggtctttttttcccatgtattattgcctgcgggttgatgagttttcttattgactttgagccatacagacgcatgttatagattttgttaagactatttgaaatgctcgatgagctagttattagtattctggggttttggagctcccagactcatcatataatagaaagatgtgagctttgttcaacagagcaattttcctaagaagatttatcgcttcgggatgttggatagttctagttttcttattttgcatcttactttttgccaacgaacggtacacatcttcctcaaactatggagaattcattggatagctgtacgctgaaatttcctggttcaacataacaacagagtgatgatggggacataatgcattagttcccaacccatatatatttttggtgcctgcattgtcaggtttcaggcttggagatttgtccttctatttatatttttggtgcctgcaaacaaatataatgttacatggtagccgatttgttagcaatttacttatctgtcactgaatcagaaccatgagcttcttgagattgctaaacctgttacaatgaaagttctttttggttagatatgtagtgcacacgttaccggtgtccgcatccattgtctgctggaggtccttgtatatgctcttcatcgttggatccattcgcttcttgggtttcttcgtgccggttcttgttttcttggcattgctttgctcatggaggttcatgttttgttgatgcattgtcatggtggtggatgctgcatctcagccttttgcatgattaatttcagattgtgctttcctttctagtgcagtgctgctgctagcatcttacaaggtcattaaactgtatgatggggggattggttcaattaagtatctcgttgattctcagagttattttctatatggaaaaaaatatgtttgctttcttttatggcaaagcaattcacaacagcaatcttatggctatgaaatactaggtttaagtgaaatcatatttattttgctgatttgtgatacttagaagtaaccttcatttttttttttatccagatggctatgagaatgcctctccagagccgtggtgacagatatctgtcgacagggaggacttgagaatctgcagcacttcgtcggctcaacgttgatttgttttattggcgttgtcttgcttgttggattcgtgcatgcgtagatggatcattggccttgatctatattgtcgtattagtcttggcatcaatcttcatcaccgtatccttcagtggtgttgctgttgtgatttttttactggagctgttgtgatctttaattagttctgtttattctaccgatgtaccacattgcatgtgtgatcacatcattgatgtaataccgaaattaatttactcgatcaaaattttttaaatc

SEQ ID NO: 14845 - DNA, 2832 bp, Oryza sativa
  ref <308>: DATABASE ACCESSION NUMBER: AK065384
  ref <309>: DATABASE ENTRY DATE: 2001-12-06
gtgtacaaagaattctctctttggacctatatatccgtctatctatctatagtgtgggatgctcaagacccaagtatacacatcttagctagtacaaatatgaactgtttctaatcttcctggttactctagtgcagcaagctatacatttgcgaacttaagaagaagttagctacatcagtcaaaatgagcatgatagttaccaagtttggtccatggggaggaccaggcggagattatagagacgttcaggtggctccttatcggctcgttcgcctaacaatccgcagcggagacaccgtcgacgggatctccttcacctacatcggcaacgatggtctcgtgtaccacatgggtcattggggttccgatggtggtgttccgcatgaggtaaagtctaccactgatactcctctcttcctctatctctttctttctatgtctatgtagctgtggtttgcatctccaatatttatatataaagttataactagatggtactccatgtgttgctgccgaaattcatacaaaatgattagcttgaaattgtgttggatgatttttttataggtaatgttatggatgaggcgacaatataatggtgcatagaaagtgccataattctcttaggtagcccaagcaaagcgttgcacactgtattagtagtactattatagtaacatatccgaacaaggtttagaaggatccagtacagctacaaacatctccgaatgaggttaagttttgcactgggctctgaaggaccgatgttgatattgatgttagatacaagctaggaaggtagcccgcgcagttgagctggcatcttatttaaactatcatattttttgtggttaggattttgagtattatgactttaatttgtctgtcgatgaaagaatttgaaggttcctttatactacatgattgaaaaaatatataggtcagaaatagtttagaaatgcatgagtaaaatagagtaaacaaattttggaccgaggacagaaataacatgaattttaaaatttgttaacccacatagatcaaatcatcatctatcattgcgtaaataaactgcaattaaccagacaacctttgcattagcagcttgattgtctccatcccatgcgaagggaaaaaaacatgcgcatgcatcttatttcaattttattaattttattgtcatagacatatgctgcaactttttatatgcaccatgcatggatacctcgcaagcaatatgatttagggataagtagatagtgatagtgaggatatacctcctaagttagaattgatcaagtatattgtatactacatattaagcgttttagtatctaagtaataaatttaaggccgagttctaaagagcttattggattggctactcgcttatttatagtgagcacacttcccaaacggctaaacgtgtaatattttatatttttctcataatttctattattttctcaatttattatagtatcaggtagtagtttaagagtcttcgtatggtgtttaatggacttaaactttcctatgtttttttggcatggtattggttggttatgaatttttccttcagaattactataatatattcatgcaaatcaaaggatagtatagatatgcaatcgataggaagcacactatttcttcctacaatccaaaggagctttgaattttaattttaaatcccaaatataattttgagctgaattcaaactttttaatggtgtattgctttttggatgttacaaaagaaaacaaaactaaagagatgaacgtggggcctgtgtgggtacttatgtaatgtacttatgtgcacctagaagtggggattttaagagataaatttaattggtagtttttttaggtagatgtaatggataaacaatggatctaccacaataaataaaaaccaacggttaaatacatttttcttagaatttatatgatttattacaacgccacgtggtggcttataagtgtttgtagatatgctatgaggcgggaaagaagcgttcgtagggatgatatgtggcagcttactagcgtacgtaagaagtttaatgaactttcaatatataatagatagatatatagatagatatataggtagattgtcaagaatagaaaaaattgaactgagcataaaacctgtaaatatgaaatttacactctggaaaacaagttaaaattttaatttgaatgttttatgaaaaaaatatagcggcatatataagtattgatagtcctttagtcaaaacttgtgaattttttaagttatgaaaccgtttttttctttaatttgtgacatgttcatgcatggcaatgggcaaaatccgatgatttatagtggatagaggtttgaaaccagatgaattaattagacatgtactatccaattatgtaatccatgtaaattgtacctgcagattcatctcggccttatggactttgtgatggaaatctctggcacaacgggcatgtgggtcagtggaatgagtaacgtcctacgatcactcaagatcaccaccttgaaaaggacttatgggccatacggcaaccctaaagctgggatcccttttagcttctcagttgatggcagtgatcggatcactggctttttcgtacgcgctggctttataaccgatgcaattggagtctatgttcgtcactgctagagttttaggctagaaaaaatacccatgctttacaacgggtgaaggttattttattgttatatgatttagttaaggtgaaattcactgtgggaattcacttggatatatatttttctaaaaaatcatgagctgcaattaagagtcc

SEQ ID NO: 14846 - DNA, 1671 bp, Oryza sativa
  ref <308>: DATABASE ACCESSION NUMBER: AK065385
  ref <309>: DATABASE ENTRY DATE: 2001-12-06
gggacgcaagcagaagcgtctcttctccctcttctccggtatccttcgctccatccactcctccgtgctctgcgtcgccatggccgcgcgccccgttagtagcaccacctccacctgccgcccctgccgcccggcgcaggccgctgcttccaagccctccacctcctcgtcccctggtacgggtgtgctcgtgggtgtgccccgcgagcgcgggagctcggtttccaaggcagcgattcgtggagcgagattggaggccgcggcgaggtgctctctcgtccgccagcgccccatgctgctggcgaccgtggcggtggggagtctggttgctgctggcgctgcaaatgctacagaaattggtgattctctgttagggtcatctggacttgctttggctgaccttagcattggagattggtttggacatttgctttattcagcgggtcagcaagccaacgaggctgttcaggatcagctctctgctcttagtttcactagcttggctgtaattttcggtgctggacttgtaactagtttgtctccttgtacactcagtgttctaccattgactctaggatatataggtgcttttggctcgggcaaagatcgatctgaggttgttggaaattcagttgctttttcattaggactggcaacaaccttagccatccttggtgttgctgcttcttttgctggaaaggcctatggacaggtaggacaaggacttccagtggctgcttcagggttagcagttatcatgggattgaaccttcttgaggtgtacaagcataccttgccggacttacgtttgcattagcagcatcaccttgcagtacacctgttcttgctacccttctgggatatgttgccacttcaagagtatgcataacaggaacattcataagttacattaatattttattactttttcttaaatttcaaaacagtaaaactgtcataaattttaccatagtgtctttaattactaaagttagtaaatcacataccgtacgatatgcagtaattttgatttctttgtttctaatatatgttacacttgacttagcaatctgtcataattgttggcaagaagtttatgttcgcctaatttattaattttctgacatgctgattacaatacattttctgtcaggatccgattgttgggggaagtttgttattgacttatacaactggctatgttgcacctcttctcattgcagcttcttttgctggagcactgcagagtttgctttccttcaggaggtattctgcatggataaacccaatcagtggtgcatttctactgggtggaggggtttataccctactggacaggctgtttcctgcaacatcaatggtgatgtagaatgcatatcatagtcgaacaagagctgcagtacgaggatcgccattgttgaacatgcgaattatgtcagagttgaaatgtaaagtaggtaatgataaaatgctaacgaactatcatcagctcttcgtagcttacataggtatatatgatatcttagtctcagcaatctgtatagaacgagataagttttaccccccacacccacccacaaatgttatttagcttccgttgcttttaaagaatacgtggaattttgtagacagaggcaagagcagaacagagaaatatatatatatatatat

SEQ ID NO: 14847 - DNA, 2112 bp, Oryza sativa
  ref <308>: DATABASE ACCESSION NUMBER: AK065386
  ref <309>: DATABASE ENTRY DATE: 2001-12-06
gacctctccacctccctcctctcctctcctatcgtccccacgcgcactccaacttgcgggcgatttgttttcccccgatttcctctcgtccgatccctccccatcacgaggccggagcgccaccccacactgcctccgctgctcccaaggtgattaaaaacacagaaaatggatggaactgctggctaacagtcgtcaaaatttatatggccatagataattgtgcgatgtgtgtgggaggtaaaggtttctacctcaacagtaaggagacttccgacccttcaaggaaaaaccattccaaagtctctcagtatcggatggcatttgatgcaccaagaattactaaaacagagacatcaaagttgaagaacctcatttcagcatcattcaaacccttgtctcttaccatccccataggcgacggtttccatgaattgtttcctgtgggtcactgtcatttatagcagataaagtcttatagataagccaaagtttttcatttctgttggctaacaaggggaggcaaaaattgagttgcgctctcaagagtgtacaatgcttacacttgttggcacaagagattcttttgctcagtcacaggcacaactttgtgctggcatgcagctcaaggctccaacaagggcgaaatattcccaaggctttatgcccataggagaatccgacgcatactgtgctctaatacctggcttacctgaagatctcgcaaagatatgtcttgctcttgttcctcggagccagttccctgttatgggttcagtgtccaagaggtggatgtcattcctcgagagtaaggaattcattgctgtaaggaaagaggttgggaagcttgaggagtgggtgtatgtcctgactgctgatgctggatcaagggggtcccattgggaagttttggggtgttcagggcaaaagcacagccctcttccacccatgcctgggccaaccaaagctggttttggtgtggttgttctagatggaaagcttttcgttattgctggctatgctgctgatcatgggaaggagtgtgtttctgatgaggtttaccgatacgattcttgcctaaacaggtgggttgagctttctaagatgaatgtggctcgttgtgactttgcttgtgcagaggtcaacggtatgatatatgttgctggtgggtttggtcccaatggtgatagtttatctagtgttgaagtttatgacgcagaacagaataagtggacattgattgagagccttcgccgtccaaggtggggctgctttgcgtgcagctttgaaggcaaattgtatgtcatgggcggtcgttcgcgcttcacaattggtaacacgcgttttgttgacgtgtacaatcctaatgacaactcctggggtgaggtgaagaatggttgtgtaatggtcacagcccatgctgttcttgacaaaaagctcttctgcatcgagtggaagaaccagaggtcactcgcagtcttcaacccggctgataattcttggcagaaagtcccagtgccactcacaggtagttctagtactcgtttttgtttcggcatacatgatgggaagctgctgctgttctctctggatgaagagccctgctataagacactgatgtatgatcccgctgcaccaacgggatcagagtggttcacatctgagctcaagccaccaggattatgtctgtgcagtgtgaccatcagagcctgatgctttctggcttgtatcgccttaccatcatccttgtaggatgccatccgataccactatttactgcttacaatcagagttgaactctcatttccagtgtcgtttgctcaggtattttgatatcaaataatgctccagggtgcttatgctgcattcattcgattgcagcgttgtgccaggatgcactttgtttcatgtattttactgctagttgtagttcacatggttgttgtcgttgtactggacgatgaatagctgataggctgatatgcaactgtagtgtttgtggcgggcaaagaggctaattgtcagaaaagatttgtcagctcttgctgtatgtaaaccttgttgtctgaaacattgtcattcgctatttctgatgctctgtttttccatatg

SEQ ID NO: 14848 - DNA, 1953 bp, Oryza sativa
  ref <308>: DATABASE ACCESSION NUMBER: AK065387
  ref <309>: DATABASE ENTRY DATE: 2001-12-06
ggctgctcctcacacgactcccgcgatgatcgcgcgctgaccacgcctcgctcttctcgagccgctcctcctcgctgattccaacagcgacggtgattccaatgattccaccgattccaccgctgttggatctccactgattccatcgattccaccaatttcgccccgaagcggtgactccgccacataaaacccagccacgatgactccgccgtgcgcatcctctctcgctcgctcctcactcgaccaacgccgctagcgcaccaccacaacgccggatcagcgccgagccaccaccgcacaaccgcatccccttccgccggtgccacgcccgggactgcccccgatgacgacggacgcacgcccccattgcttctccgcaaatagctcctgagcttcatgcgaagcccgcgccggccctaggaaagcctctcctccgcgaatccctcctcacggaagccctaagctcctctgtcttcctcagggagcgtcgccgatccgtcggtcgctggtcaccctcccgtcgccggatcccctcccgtcatcggctgccacccggtgtctatcgccgtcgctgttggatataggtcgttgtccggcgttgactgctctcgctattggatcaaggctgtcgcccatcgtcgggcatcatccactgtcaccgccgctcaccggcttgctgcctgatcgagcaggccagcacccatctccagcgcccgtcaggtgaaccaagtacagaggatgcggtggaggcgtgggggctaatcactaatcagtcagatttttgtggatcgagcttattacctcagttttctcctcttcggtgatggagccggttcaggtgcgctgcaaaggaaatagttgccacacccccagaaaccaagtgaatgtgctcttatcctgatacggcatagtgaatcattgtggactgactgaaatctgttttattgtggaatgagcaaaaattgtttacttgatgtcgagaaggctatatatgtcgggagctgtttggaaagggtttaatcggagcaacgttattgggaaagtattttgcggggcagtttggaaagggttttgtcggagcaattctgggaattatacttttattggatcaataatgattggaaaggattttatcgcagaaatcttgattaggaaggtatatgcattcccatgagttgcaaatccaaggaagttattacaagctaatcgatttatcccattacgagctaaagcccgctggtatgtttttttttctctgccattcaccattgaaatatggaataccatattcttttttcattcgatgcactctttattgtctgttctaatttcttcgactactaataatttgcagtttgatattgctttatcccactgcttttccattagaaccaacaaaaggagaaattcctttagctgaagtcctcagattcaataccaaagttgattgtttgattctaaacgtaattatcatggtttcttgtggtcctttaatggtgatattaagacttgggcaaaattggtacaaaagctacatgtccaaaataccttggtagcttccccacttctattatctctccaatttactcttaaattgtatgatacaatattatcaagtttcatagtagttattttggactcacctactcttaaattgtatgatacaacattatcaagtttcatattagttattttggactcacctcttcaaagtacctgtcatctgggttgggaggtaatttctaaatctcagctctgctatttgatgatctgacattcatattttactacatacttcttgtcactagaattcctgctgcatacgtactagctaggtatttcctcttacaataatggttgtcagaattggcagcatgaaactgatcagctcaatgtaacacttgaacaatctgagagttttcgtttactccaggacacctgacagttgac

SEQ ID NO: 14849 - DNA, 2882 bp, Oryza sativa
  ref <308>: DATABASE ACCESSION NUMBER: AK065388
  ref <309>: DATABASE ENTRY DATE: 2001-12-06
ggttaagctttctacaatagccactgcatccttctgttcagaggaagccaggatgagaatcccagcatcacgaaatggaaacacccctattaccacgttgtccggtatttccatcttcgtttccttcctaccatagcaagcaatttgtctaaaactacctgtcctttcatccttggattctcaccaccaatggtttgtgttcagtgaatgatctaaccatgcgtcattcacagttcttcgttcttgtctttactctcatgattttctctttgttccagacttgccaatccaaccatgagcatgtcgtttgctctgaatgctgagccaaacactgtgtggtataataaccgctccctcctccagaatacattttcagatgacaatttcttgatgcgcatcttcctccctcatgacattgcagttccaagtataaatgatagcatcgttccttcatttgcttgcgggttcttctgtgcaggatctgcaaccagctgtgatgcctacattttttccatcttctttgtctatgttagcaccgatttcagtcagcggctgcggtggcccgagatagtctggtttgccaaccgtgatcatccagttggagagaatgctactgttcaatttactgaacttggggatttagtgctctatgatgcagatggaacacttgtttggtccaccaatacagcgaacaagtctgttgtcagcatgaaccttacagggtcaggaaatctggtattgttagaccgcacaaatgtggaggtctggagatccttcgatcacccaactgacacgcttgtcatttctcagacactacagatgggtcagaagcttgtggcaagaacttcgtcgacaaactggactgagggaaaattgtacctcaccgagtcaccgtcctcgctgatggcatgtatgcatttgcattgcatactaccggagccccactggtggaactgttgcaacaaacatgtcagcttacgttgcactcaagaatggtagccttgaggtgttcacttctttccaggagacaaaggcgcctgattaccacatccagctgcctgagaattcctttgggctggagtttgcaaggctagattgggatgggcacatgagactatatcagtggatcaattacagtgcctgggtgccttcagatatttttgacataactgacccttgtgcttatcctctagcttgtggagagtatggtatttgctcgcatggacagtgcagctgcccagatgtagccattgggcaatcaggattgtttgagctggtcgatgccaagggagttaaccatggctgctttctgacgtcttcattgacttgtgggtcagccaggaagactaggtttcttgctgttcccaatgtcacccacttcaattttgtctacaattggacaacaaatgaagatcattgcaaactatcatgcatggatgattgttcttgtcgggcttcatttttccagcataaggacatttcttctggtttctgttttcttgcattcaacatattttcgatgataaattttagtgcacaaagttattcaagtaactttagttcttctgcttttctcaaaattcaggactctacccacaaatccttattatctaaagagaaaagagcaatcgttttggttgctggttctttgagttttgttacttcagttattgttgcagtgcttatagttctgagaagaaagagagacaaaccattagaagatgaatattttattgatcagcttccagggctacccacaagattttcttttgtggatttgaaatcagcaacaggagatttctcaagaaagattggggcagggggatttggttctgtttttgaaggacagatcggtgataagcatgttgctgtcaagagattggatagcataggtcaggggaaaagagaattcttagcagaggttcagacaattggaagcattaaccacatacacctggtgaggctaatcggattttgtgttgaaaaaactcataggcttcttgtctatgagtacatgcctaatggatctttggataaatggatttttcagaatcaccaagctgatccacttgattggaaaaccagattgaagattatctctgatgtagccaaggcattagcttatcttcatagtgattgccgacaaacaatagctcatctggacatcaagccagaaaatatacttttggatgaggtgttcactgcaaagatatctgactttggacttgccaaactgattgaccgtgagcaaagcagtgtcatgactagattaagaggcagactgggttacttagcccctgagtggttgacatctgtgatcactgaaaaggttgatgtgtatagctttggcgttgtgataatggaaattttatgcagcagaaggaatttggactactcgcagcctgaagaaagctgccatctcatcagcatgttgcaggagaaggccaaaaataaccagttgatggaccttatcgatccatgtttctttgatatggaattacatatggatgatgttttatgaatgatgaatttagcaatgtggtgcttgcaagtcgataacaatagaaggccttccatgtccatggtggtcaaaatcctggaaggtaccatggatgttgaaactgaacttgattttgacctggtaaacatagacccgatggtagtagcacatcgagcagctcaaaggaacagtattactttgcaggtagactctgtcctttcagggccaagatgaaatacaaggagctcaaatatattcttcaaagatatcaagctcaagattgaaaacacgtactcctgttttcctatactatggcatttagataaacaaagatgtagacatgtagtgatgtactatagtgataatgattttttttctgttc

SEQ ID NO: 14850 - DNA, 2052 bp, Oryza sativa
  ref <308>: DATABASE ACCESSION NUMBER: AK065389
  ref <309>: DATABASE ENTRY DATE: 2001-12-06
gacactgaacaagtaccactcccactgccggcgctgcccccaccggcggcggcagcggcggcggcggaggccatggctgagctgcggcattcgacggtggcggcggccgcggcccgctcctccaactcccccgcgaagcgcgactccgacgcctctgccgcctcctcccccttcgcctccacctcatccgcgcgcggccgcggcggcggcgacgacgacgacggcaaggatgcgcaccgctcctcccctctcctccctcatcaccacaagcgcctcggcttgccctctcccctccgctcgctcctcgccctcgaggaccccaggtccccctccgcgtcctcctcctaccggatcttgttcgccctcctcgcgttcctcctcctcgccgccaccttctccgcgacctccgtttggtcccgcctcaatgcgccctacttgtgccagaaggatgggatcacgctgcactgccctgagacgaaggaagccccctccctatgggagaatccacgtgctgctaccacgtcctggaaaccctgtgcagagcgccgcagcaatgaaccatcagatgtcccacctgagaatgaaacctctggatatatttttattcatgctgagggtggactgaaccaacagcgtatagctatatgtaacgctgttgcaattgctaagataatgaaggcaacgcttattttgccagttctaaagcaggatcaaatatggaaagaccagacgaagtttgaagatatctttgacgtggatcattttataaactatttgaaggatgatgtgcgcattgtccgagacattcctgactggtttacagaaaaagatgagctctttactagtataaagcgtactgtgaagaacatcccaaagtatgcatctgctcagttttacattgataatgtactcccgaggatcaaagagaaaaagataatgtctattaagccatttgtcgacaggttggggtacgataatgtcccaatggagattaaccggctacgatgcagagttaattatcatgcactaaagttcctgcctgacattgaagaaatggctgataagctggcagcaaggatgaggaaccgaactggcagtgtaaatccgtacatggctcttcatctgagatttgagaaaggaatggtaggcctgtccttttgtgattttgctgggacgcgggaggagaaagagatgatggctgcttataggcagaaagaatggccaaggcgctataagaatgggtctcacctgtggccattagctctgcaaaagagaaaagaaggccgttgccctcttgagcctggcgagatcgctatcatcctccgggcactgggttacacaagaggaacacagatatacgttgcgtcagggcaagtgtatggcggcaaaaacaggatggctcccctccgaaacatgttcccaaatttggtgaccaaggaggagctcgccagcgcggcggagatggcgccgttccggaagcacgtgacgagcctggcggcgctggacttcctggtgtgcctgaggtcggacgcgttcgtcatgacccacggcggcaacttcgccaagctcatcatgggggcccgccgctacgggggccgccaccggctcaagtccatcaagcccgacaagggcctcatgtccaagtccctcggcgacccacacatgggctgggccgccttctccgacgacgtcgtcatcacccaccagaccagggccgggctgcccgagcccactttccccaactacgacctctgggagaatcctctcactccctgcatgtgtcctacagcctgaacccccctgatgaatcttcaggcttgaaagttcaattatacagttaggatcactggcagtatagtgctagaacattttatgttcttgttttttcgttttcgttttttttttgctcacgtagtcctattactagcaggatttaccacctcgattggtcagcgaaattcgagccccagcgaagcgtactcttttgctaattttgaacaaactttaacatatttcgaatgaattatgacctgagatgaacgttttgagccg

SEQ ID NO: 14851 - DNA, 1605 bp, Oryza sativa
  ref <308>: DATABASE ACCESSION NUMBER: AK065390
  ref <309>: DATABASE ENTRY DATE: 2001-12-06
gtatgatgatgatgtgtcagataacgacacaagtttacaatcaggccttgctgggaggaggggcccatattccaagaaaaaacaacgtaatgttgattcacttccattcatggagggcgaaggacgggctttgagagtttatgggttcaaccaaattcagcgaacacaattccttcaaacgcttatgagatatggttttcagaactacgattggaaggaatttactcctcgattgaaggggaaaagtgttgaggaaatccagagatatgctgaacttgtcatgatccatcttcttgaggacatcaatgactcaggatattatgcagatggcgtgccaaaggaaatgcgcacagatgagacattggtcaggctagccaacatatcacttgtggaagagaaggtggctgccatggaacaaggaaaaataacaaaactctttcccagctatttgttatatgaatttcctagcttagttggtggaagagtatggaaagcggaacaggatctactgttgctgaaagcattaataaagcatgggtatgcaaggtggcaatatatatcagatgacagagataatgggatttttgaggctgcacgacaagagctgaggcttcctactgctaatgaactgattagttctcactcaaacaatgagacaaacggaaatctggaaagcacacaagaaggccagtcgaacccaacgagcatgatccattacagggatacacagagaaagatagttgagtttattagaaagagataccatcttttggagagatgtttgaatcttgaatacgctgtgattaaaacaaaaacccctgttcctgatgatctcgctgaacaagattttcctggtggtcatagaccggccgttccagactacagtgaaatgctgagagaattgcctgtccttgaacctatttccaaagaagtggcgcctgaaggcacaactgatcagtcacaagtttcacatctttacaacaagatgtgctttgtccttgaagacagtgctgttcctgcactcaactcgcatttcggtgacaaggcagcttcctccggtttagccaatagcctccataagtttgaagctgtatgcgaagacgttagtcgcatcttgagatcacatgaaaatggtaccactcccaaagaggaagttatgctagatgcaagctccaaagagaccacgtctccaaaagatccagcaaccgaggtgccttcgtcagcttccaaagaagctacgcctccagtacaagatccagtcatagaggcagtgaaggaggagccacccactgttaaggcggaggacaaaatggaaatcgatagttaatttgtaggaatcataacgataatatcgaacctttttcgtctaatctaatcgctaaactggctgtagcttttaccatattacaagttgtaaactaaaaaatcactctaagctagtctcatcctgtagaggcctggacatctccaggcctgagatgaacgattaccatcaaatctgtcgtactaaaggttaccaggttttgctagctcctgccccgctgcatctgttaaatgtttaactcttcactgtcgaataggtcacttgactggtttgccatcagg

SEQ ID NO: 14852 - DNA, 3358 bp, Oryza sativa
  ref <308>: DATABASE ACCESSION NUMBER: AK065391
  ref <309>: DATABASE ENTRY DATE: 2001-12-06
ggctttccagccgcctccccccgcttcgcctcccctcccctcccctcctctcgcgcgccgccgccggcgagcacgtcaccggaggcacggcgcagacgagctcctctcctctcctctcctctcctctcctccccgattcctccctgctcccgccccccgccctccgtctcggttctattcgaatcgaatcgaaggtaaactcatcctcccctctctctccctcttcctcccatatgagcagatgtgggagattcatcaggacatggatttggattggtttttttttagtactgaaacccccatttacccccagcaccaccacgtgacgccccctagttcagatgtgtcgccgtttgcgcctaagatggcagtggcagagtgcagcaaagagttgagagatgttagttcgccatatcgtcaattaggatgctccacggagctctcgtcttgatgttagtacaaatttagtcgaaagccattctaatgtggcggtgcccctgggctatttattgggagcaagggggatttgctccattttgttacctctgtacggtgtctttaccaggaatttttagccgaaaggaatcccgcgccgccgattttaagcgctttgaatagatttttggttatagcctcgaatcgctagtaatattccctgcgcatcttcgacttatgattcatcacctgcggaaacatgtgtaggtctgattttgtgttgcaagagagtgtggaaaggtaggtcggctaattcagtttgtttcagccgtcctgtgtattatattgtggtggttggttttattcggacctgatttccaatgactaccctggttaatatggttatgctgtatagcagtattttactacctatgtgtattcttaacacttcagaatgaataaaatcaatctatgaatgtgtaagccaaaacttaaattctacactacagctgtatagctgtagtagcaactgtggtattgctaaagaagtctgtatgttggatcggaaaatgtgaaaccagaataatacagtccagtagtccatatgttttctttctgccttttcttataaggagtaaggttatcagccagattgtaagtttatttctgtgaacatggaacttgaataggcatatgatctttcacaggattgggaatttaggatataccctaatgaactacaacctctaagcagcactgccttcttgtgtgactaattaagcaactattagtttgattcttactttcatatgatttatcttaaatggccatgactgttcaatatgtgtcttaccaggaattagtaggcagggattcatatgactgcctcatttgtttttttgttacctttgtttgctgttcaatatgtgtcttaccaggaattagtaggcagggattcatatgactgcctcatatgtttttttgttacctttgtttgctgttcaatatgtgtcttaccaggaattagtaggcagggattccattcagattttgagtgctttgaatagactggtgattagcttcaattctctagtaagattccctgagcatgcgcaacttatggttcgtcacccatggaaccatgtgtaggccgatttttgtcttggcgaaagtgtacaagtttcctaggtaggacagctaattgaatctgtttcagtcgttcctatcaattgtatcatggtggttttttttttaccttgaatccttgttcttatttcaaataaccgtgcgttgcttatatagttattttgtacagttactattttactacctatggtttgtgctgacatcggaatgaacaaaatcaatatatgaatgggtaagtcaaaacatagaaatcctacacggcacttgcttgatggggtattaccaaagaattctgtttatgaaaacagaatacagtccagttgtccatattttgctgcttttgcttataaagagcaaggttgccagccagattttccctgcgaattcggaaattgaatagaagtagaatctttcacaggattgggaatttaggatgtactcccatataatttaatcattttaacttccgtacctgtggaagcatgaagatcggtactctgactattgtgtcatcttttatttcttatgaagaactacctatctctaataatgcaacaggaatgtggaagagttctagatggaaccattatacatgggtaacaggggattaataggcatcactcttcgtctgtcttctgtagttcatatataccttcactttgcgctgcatattaggctctactcatggtcttaggaatggtatttccgagcatattttgttacatggttcaacaatctcacttaataagttcaatggacgaatttgaatatacatgatgatggagattttttttctaatggagtacatctgaatgtgatctttgacttttgttgtcttttcgtgtgactaataatcaactactacttcgatccctactttcatattatttatcttaaatggtcatttgactgtctttttcttcttcatattataccatcctaccttcttttgtatgattgggtggttctcgcatgttttgcttaacattggagaacttatgctcatttatgactgggtggtacatttatgctcatgcaacatttgtgtggcagaacttgttcagcatcactccttaattggcttgacatccaccgtaatgtgaacattcattatgatgatatcaaaggtcatgcatttgttacctttttttttttgcttttttccgaggattcttcttattactgaccattatctcctaatctagttgttatgtagtgtatttttaggaactggatatttcttccatggttaatgtccagaaccatgataatagatatttactagttacatttcttttcgtgtatagtgtaagaagaattgttcagcataaaaacttgtagccttttctgacatccttgcatttttttaattccttttgaataggttgtaaggatgaagaagggactgcatcctcagatgcagtggatttcatatgtgacacaaagcggcaggttgatcaatatcatgatgaccaaggtcaaccatactggcaaagtgtatcatatgagagcaaagcgtcaaatggctcaaagcctgggccagattgcaaagttcaaccgccgataccagcaggaatctgaggaaaacaaagaaaagtaggctgctgtcagcaaggagctacatatgctctaaggcagattagtgtggtgctatgtttatcgtccaggaacattgctcatggatctttgtttcggatgtcatcctcttccatgtagccatctgatcattgtggtttatccctgtagtttcagttctaccattcacgaatttttctgg

SEQ ID NO: 14853 - DNA, 3566 bp, Oryza sativa
  ref <308>: DATABASE ACCESSION NUMBER: AK065392
  ref <309>: DATABASE ENTRY DATE: 2001-12-06
gttacagaaacagaaagcagcttcttccttcccaccatagcaggctattgttgaaaaaaccatttggttctttagccaatcagaatccaaataaaacattcttgcagcaggcgagtttcatgagagaaccatgcagctgcccaatttgccatgcagcagcagcagcagcaccaccaccaccaccaccaccaagttatctgtggctttctttcggcttcttgttatcctcctgctctcgtttgcctctccgaccagctcctgcacagagcaagaggagagctccctcatcggctttctagagggtctcttgccaggccacaacggcagcctcagcacgtcatgggtgaagggcatagactgctgcaaatgggaaggcatcaactgcagcagcgatggcacggtcacagatgtctcgttggcttccaagggcctccaagggcgcatctcgccatctctcggcaatcttactgggctgttgcacctcaacctgtctcacaacttactcaatggctacctaccaatggaattgttgttctccagaagtatcatcgttcttgacgtcagcttcaaccgcctggatggttctctgccagagttggagtcccctagtggtggttctcctctccaggtactgaatatctcgagcaattcatttacagggcagttctcatcgaaacaatgggaagtgatgaagaatattgtcgctcttaatgtaagcaacaacagctttacaggacagataccaccttctatatgcatcaactccccatcatttgctatccttgacctttgttacaaccaattcagtggcagtatttcctcagggctcggaaattgctccaagatgagagagttcaaggctggatacaacaactttagtggagctctccctgaagaactcttcagtgctacctcattggagcacctatctcttcctaataatgatttacaaggagttcttgatggttcccacatagtaaaactcgtcaagctgacagtccttgatctcggatcgactgggctcagtggcaacatcccagattctattggccaactaagcacattggaggagctccggttggacaacaacaacatgtctggtgagctgccatcagccctaggtaactgcacaaatctgagatatctcagcctcagaaacaataaatttgtgggagatcttagcaaagtcaattttacctggttgaatttgagaatcgcagatttctcaattaataacttcactggtacagttccagaaagcatattctcatgcagcaatctaattgcgttgcggctggctttcaacaagtttcatggccagttgtcaccaagaatgggtactctcaagtccctgtccttcttttcaataagtgataaccatttcacaaatatcacaaatgcacttcagatactcaggagctgcaagaaccttacgtcactgcttattggaaccaatttcaagggtgaaaccatacaacaagatgaaacagttgatggttttgagaatcttcgggtactgaccatagactcttgtggagcaatggggcaaatccctccttggatatcaaagctcaaaaaactggaagtgttggatttatcaaacaatatgctcatcggagaaataccattttggattagagatatgcctgttcttttctatttagacataacaaacaacagtcttacaggggatatcccagttgcgttgatgaacttgccgatgctacaatcagggaagaatgctgcccagttggacccaaattttcttgaattgcctgtttattggacaccatcacgtcaataccgcttgctcaatgcttttcctaacgcattgaatctaggtaacaatagtttcacaggagtgattccccctgagattggtcagttgaaaatgcttgatggcttcaatgtcagctttaacaggttatctggagaaataccacagcagatatgcaacctcacaaacctgcaattgctagatttatcaagcaatcagctcacaggtgaactaccggccgcactgactaatctgcacttcctttctaaattcaatgtttctaacaatgaactagaagggccagttccaactggaagacagtttgatacatttctcaattctagctatagtgggaatccaaagctatgtggccctatgctcagcaacctgtgtgattcagtaccaacacatgcatcctccatgaaacagcgcaacaagaaggccattattgcacttgcattaggtgtgttctttggagggattgccatccttttcttgctgggacgttttcttatatccatcagaagaacaagctctgtccaccaaaacaagagcagcaacaatggggacatagaagcagcttcattgagttctgtttcagagcacttgcacgacatgataaaaggaaccattttggtgatggtacctcaaggcaagggaggatcaaataatctcaaattcaaggatatcttgaaggccactaataactttgaccagcagaacattatcggatgtggaggtaatggtctagtctacaaggctgagctacccaatggatccaagcttgcaatcaagaagctcaacggtgaaatgtgtctgatggagagagaatttaccgcagaggtagaagcactctctatggcacaacatgacaatcttgtgccactatggggttactgcatccaaggaaactcaaggctcctcatatattcttacatggagaacggcagtctagatgactggcttcacaacagagacaatggcaggccacttctcgactggccaacaaggctcaagattgcacaaggagcaagccggggcctttcatatatccataatatctgcaagcctcacattgttcaccgtgacatcaaatccagcaatatccttctcgacagagaattcagagcttgtgttgcggattttggccttgccagattgatccttccctatgacacacatgttacaactgaattaattggcactctgggatatattccacctgagtacagccaggcatgggtggctacactaagaggcgatatatacagttttggagtggtgctgcttgagctgctcacagggaagaggccagtccaggtcttgtccaagtcgaaggaacttgtccaatggacccgggagatgagatctcatggaaaggatactgaggtgttggatccagcactgagaggaagaggccatgaagagcaaatgctgaaggtgcttgatgtggcttgcaagtgtatcagccataatccttgcaagaggccaaccatccaagaagtggtctcctgcctggacaatgttgatgcagacctgcaggtgcagatgtagttaaaggagaacagatccatagacctggagatgcagagatgattttgtacttacagactaggtgtgtaacttcagtagaaagaagatttgctaacaaatattacagtttgattgtacatctgtgtaaaggaatggctcgcagttatgagcttctgtatttagtttccctcttttttgtggaaatatttctcatctaaaaaacttagcattgaacttaggatccctggttcaatcc

SEQ ID NO: 14854 - DNA, 3167 bp, Oryza sativa
  ref <308>: DATABASE ACCESSION NUMBER: AK065393
  ref <309>: DATABASE ENTRY DATE: 2001-12-06
gaggtagccatgtactggcctgtttgttgcacgggatttactgtcacagagtttttaggttttaggcgattttccccgtgttcatgtttcccttttgacagtggatcattgcttatctttgttgttcttctttcagtatatacttctttcagtaaatagatggtggctattacatagatgaagcacacggtcgttagttaatgacaaatatcattgcttttttttcctggttctgattcattattggatcatgtttcgccattcagagtgtgtcccgtggtgttttcttttcatgcaaaaccatgtggttcatttgtatttttgagtctttccttaagtgcatctctgtacgtttacatgtttttttcccttcatatcgatttttttttggcgcaggtgcttattgtcgcggtcaggtccgtgcgatacgttcgttactgttgtgctgctgttccctttaccatcagctcctgttcaggttgcggaccacatcttctgtgcccgtacatgtcggctaagttcctatatggaagggggttgtgtggttaggcctgctcgtcgacgggatcgccgattgctagagcgtagcagcgcttctcttagatcatcttcctctaattcagctgccagcgaatatgtttgggagactgttgctccaccccgtcaggacgatggatttttccctatctaccctgcatggtattcttcaaaaagacggcaaatgcgttcaaaaaaattggccatgaaacgattggtggctgcaggcaaaaaaccttgccgtattgctcctgtctcttgcaacaagtttgacagtgattatgccaagtttttgagagagacttcaaaggataggtgtgattatggccctcctgagtatcgctgccgtttgtgcgctgctcagttctggtaccaggaacggtgcaagaaagattctgctattaccaagcgccgtgtctgttacaacctttgttgcaaagatggctttcgatttgctgtgtgacatatccccagcaagcagaggctggaagatccgtgcaaagatagcaagaatgtgggactacactggtacagctgacgatctgcctcctatacatgttgatctggtgcttattgatgagaagggaaatgcaatgtatgctgaaattccaggcgttgaggctgataagttcagaccacttcttcaggaatcgaaagtctacacttttagcaagttccttattttgcctagcaaacctgcatacaagcccttccctaacaagtatatgatcaagcttactccatggacaaacgtggaacaggtcaatgaagttcctgctgatttcccatcccatgtgtttaatttggttcaattctcatatctaagcctgcgcgttgggatgcaagagtacttcactgatgtgatcggtatgatcattggggtatcaaagctagcctatgtccgaatggcgtctaaaacgtcagacacacctaagagggtcattgctctaagggatcttgcgaactgtgaggttaaacttgtcctatggggagagcatgctcccgactttgatgctgatgctgttcatagtgttggccaagataatgctgtcgttggtatctttgttgatactcttatgaaagcatataataatgaagaaactcttagtggaggatcagcctgcaaatggtatttaaatgaggacataccagagataaaccagttctttgatagcctgggtgatagtgctccaaagatccagtggatatcaaccggagcagagtcctttggttcgtcacaacgcccagcacggttggagcataaatctgttgctgaccttaaaaagattgatccatgggaagctgcgggtgctggcttctcatgtactgtgaccatagctaagttgagcccatctcagtcatggtggttttcatcctgttcccgttgtcatagagccgcaactgcatatggatctagctataaatgctccagcggttgctcatcagttactgccattccaaagtaccgtctttgcctgataggaaccgatggaactaattcagcagagtttgtgctatttggacgtgttgcgcagcaagttgttggccgtcctgttatgaatcttatcaaatttcagggcagatcagacaatattcctaaagaaattgctgctgttgtttcacagaaatttacctttgctgtctctgtcactgagcggagccttatgcacaggaatatatcttttcaagttaatggaatcgagactttctttggaagacagggttctattccgcagcctagggaatagggtccatctgcaggcccttctactcctttggctcttgctgcttctggtatggataaggatgacgcctctcaatctcatgagtcaaccccggtcgattcatctacttcgactgctgatccagtcgatgaacttcctggtgacagcaagaagcggaaatccattgtccgtcatcctctagcagcacagaaaaaattgacctttgaaacagctccatccagcaaagaaaacaccagcccggttgaccctcctactagttcttctcgcactgatgaccaagctgctgataagcaacatgttgtgcctcatgaggttgatgtttcttagattgcagctgcctctgctaaaccaaatactcaggtcaaagatatcctaccaactgaagccaaaaagaaaagtgttgatccaggctctacaggcacactcaagactaagcctcctgtaccgaaagggaactaaattgctcaccttagcttttgtgctgatgggaacaataccctacatcagcgatcccaccctatgtctacatatttccttaatcttactgttggcgatgcagcttgacatggcacatcgtatcagacaatcttttgtttacatgattgctggcaccactgtgtccatgcatgtgcatgtttggtcctctacctgctgctctttcgccctttagtgtcagtgtgctttccataccgtagcagagacttcctatgaaacgctgccatacgactgcacatcaccccatcttttgcttgtatgttatttattgtaacaatgactgtcaatgtccatatggtgctctgtcagtcctatgaactcgttcagcaaacccccttctgttatggatcatattaatgcactagcgttctatctgctgttgttctgttc

SEQ ID NO: 14855 - DNA, 1912 bp, Oryza sativa
  ref <308>: DATABASE ACCESSION NUMBER: AK065394
  ref <309>: DATABASE ENTRY DATE: 2001-12-06
gacgcacactcaaaccccccactccactgcccccaaaacccaacccccaaccagccagaattaccacacacacgcaccgcacccgaaatcccaagaaacgcgcgtataaatcccaccggcttgaggagtcgactcgccgatccatccacccgcgcttcgtccattccatctttctctctctctcgcggaggtcggaggagccatggaggtgttctactacctcgtgttcgggggcctcgccgccgtggtggccgggctggagctcggcaagagcgccaaggaccgggtcaccacctcccaggccttcaactccttcaagaacaactacgtcctcgtctactccctcatgatgtccggggactggctgcaagggccgtacgtgtactacctctacagccagtacggcttcgacaagggcgacatcggccgcctcttcatcgccggcttcggatcctccatgctcttcggcaccatcgtcggatcactcgccgacaagcaggggaggaagagggcgtgcatcacctactgcatcagctacatcctcagctgcatcaccaagcactcccccgagtacaagatcctcatgatcggccgcgtgctcggaggaatcgccacctcgctgctcttctcggcgttcgagtcatggctcgtcgcggagcacaacaagagaggttttgattcacaatggctgtcgatcacattctccaaggctatatttcttggcaatggcctggtcgcaattgtatccgggctatttgcaaacctgcttgccgacaacttgggctttggtcccgtggcaccatttgatgctgctgcatgcttcctggcaataggcatggctatcataatgtcttcatggagtgaaaactatggagacccatctgaaagcaaggatttgatgtcccagttcaaggttgcagccaaagcaattgcttcagatgaaaaaattgcattactgggagccatacagtcattgtttgagggctcaatgtatactttcgtcttcctctggactccggcgttgagcccaaatgaagaagatattcctcatggcttcatatttgccacattcatgctgtcatcaatgttgggtagctcaattgctgcacgcttgttagcccgaaagctgaaggtcgaaggttatatgcagatcgtgtttacaatatcagccttcacccttttccttcctgttgtcaccaacattctagtgccaacttcttcagtgaaaggaggtagcatctcatttggaggcactctgcagctgcttggtttctgtacctttgaggcatgcgttggcatattctggccatcaatcatgaagatgagatctcaatatattcctgaggaggcaagaagcacaatcatgaatttcttccgcataccactgaacttgtttgtttgtgtggtgctttacaatgtgaatgcattccctatcactgtcatgtttggcatgtgttctatcttcctcttcatggcggcaatcctgcagagacggctaatggttgtttctgacctacacaaatcatcgacaaaagcacaagagatggttgatgaagatgagccactgaatccttaaggattgataggatcatacaaacagatcgaatataagcatgtggcatactgcaattcatttctaccgagctgctgaataagattggacgttgcagaaaagagcagttgtttttgtttgtaactttatttctgcaatgtcgattgaccattggctggtagttcacatctgtggagcaaatgtagtaggcacgagaggcaatacatagttcagcaagcattgagctatagccgagatataggctattcatgttgtcatttgttatttgttattgttattcaccagcatgacattgtatgaaattaaatgctacggatatcctaatcgaagttatatttt

SEQ ID NO: 14856 - DNA, 2024 bp, Oryza sativa
  ref <308>: DATABASE ACCESSION NUMBER: AK065395
  ref <309>: DATABASE ENTRY DATE: 2001-12-06
gctccgcctcctcgccatttacggcagcaaccgcggcggagagagacgaccgaggagagagagagagagagagagagagagagggagagctcaagtggtcgccgccggcgaggaggagcagtgaatggtgcggcgcgtggggttagccggcgctcgtggatcgatctgagcgagaggggagctgctggagacagtggtgcgtgcgtccgtcggccaccctgaacgccgtgtcgtcggagcgcggcgcgcagcaagccggcatggtcagcgtcgacgccgtgttgccttctgttcatatccagcacgcggttgccttgccggaccatgttctcctgatgctcagagatggctcattgctgccggcttcggggcaatttgagtgcctgtactcccctgtcaactcgtcgcagctgcgtcgccagcccttgtccgtcgctaccttgccggatggacccagcctcgtccattgtcccgccggaccatccagggtcgctgtgtccctctcactggcgcagtcggttccggtggcgccgttgcaatgggatcggctggtgtacactgcacttattgacagcaaggacaactccaccgttgtgtttgcaaaggggatgaacctccgtccgggtcgtctaggtgtgccatcacggtacgagtgtgtctttggccgagacttttcgaagccaaagcttgttgtcacctccccagtggtttctgctgctcaggagatattccggtgtgtgacaccagttcgcattcgccggtacctccggatgactaccggtggcaaaaacagcgtaaacaatgatgacaagcctatgttggtctccatcaggactaagggccggggaagctctacactcccctcaatcgcgcaaccggagccgcttcctcggtacaacaagcattggagacgaaaggcacactcaatgtgtgtctgcaccatgcttcgcaaccaagcacggttcctgcgggaatggatcatctatcactcacgtattggtgtgcagcggtggttcatctatgacaacaacagcgacgatggcattgaggaggtcctcaacaccatggattcatccaggtacaatgtgacacgctatttatggccatggatgaaatctcaggaggctggatttgcacattgtgcactcagggctcgagagagctgtgagtgggtggggttcattgacatagatgagttcctgcacttccctggcaaccaaacactacaagatgtcctccgaaattactctgtcaagccacggatcggtgagctcaggactgcatgccatagttttggtccatcaggccggactaagatcccaaagaaaggtgttacaacaggctacacctgccggctggctgcacctgagcgccataagtcaattgtcaggccagacgcattgaacccatccctcatcaatgtggtgcaccacttccatctgaaggaagggatgaaatatgtgaacattggtcagggtatgatgctgatcaaccactacaaataccaagtctgggaggtgttcaaggataagttctccggacgtgtcgcgacatatgttgctgattggcaggacgaggagaatgttggatcaagggacagggctcctgggcttgggaccaaaccggttgaaccagaggattggccgagacgtttctgtgaagtatatgataacggtttgaaagattttgttcagaaagttttcacagacccacacactggaaattttccatggtagattggtaaacactgtatttggtcttgcacagcacggcccctcaatacatgacatggagacccagacagggaaagaagaaccaaaaagaaattagatagaagagcgatttgctctttggtatattttttgaattttaaggtcttttgatcttttcttcttcattagaatcatcattttttgttacatatctaagaaggaaatgattcttttgtagataaagataggtagcacaattcattgtaagtttggttggggggagacaatcaatacaatcaatttcttgatttc

SEQ ID NO: 14857 - DNA, 1984 bp, Oryza sativa
  ref <308>: DATABASE ACCESSION NUMBER: AK065396
  ref <309>: DATABASE ENTRY DATE: 2001-12-06
gatggggcgttttatcctcaaaagccgagctatccttatcccaaaacccctctcgctcccatttccggtgtgactctggccacgatggccaccccctccacctccgcctccggccccgcccccgccccagcgccggcctcctccgcctttcccctcaccgccgccgcgcgtttcctccgcgtctctgccttctccagcacgcgcgctttcgccctcgctgagcggcgccgcactccgcggtgccggctatccgaggtgggaggcggcgaccgctcggtagccgctggccgctcacccggcccccgttccttccacggtctcgttctctccggcaatgcagaaggagccatgcaatctcttagaagagagctaagttctgggatgcaccctttacgcgaaaactttgtggctttagtccatgtttttgccaagaatgatcttactaccaagggcatggagattcttgcagctatggagaggcagagcatcaaaagtgaagcggatacttttcgtccagcaaaaatacaagaagcttttggcatgaggagatgcagcaaatcgctgctgcaacttggtacacttccatgttgcactatggcatggttaagttttgcacaaacagcacaggctagtgaaggaacaaatataaacatggtttatgaggttggggagctatttgagcttggaattcagttgtcttatcttctcatactacttggtcttcttggagctggtacattttttgtcattcgtcaagttcttgtccgtagagagcttgatctttctgccaaagagttgcaggaacaagtgagaagtggtgatgcaagtgctactgagtattttgagcttggagcagtcatgctacggagaaaattttaccctgctgctatcaaatatctacagcaagcaatccaaaaatgggatagagatgagcaagatcttgcacagatgcaatctcttagaagggagttaagttctggggtgcaccctttacacggaaactttgtggctttagtgcatgtttttgccaagaatgatcttgctaccaggtgcatggagattcttgctactatggagaggcaaagcatcaagagagaactagagagctctaggcggaggatgttgctagctgcaggggctgctgtgtttctttcttggcctaatctggcagcaaacgcagcagaggctaagaaagggttcttacctgtaaccgacaagaaggatggatactccttcctctacccatttggatggcaggaagtggttgttcaagggcaagataaggtttacaaagatgtcatagagcctttggaaagtgtgagcgtcaacacaattccaaccagcaagcaagacatccgtgaacttagtcctccagatcaggttgctgaagctcttatacgaaaggttcttgccgcacctacgcaaaagacaaagttaattgaaacaaaagagaatgacgttgacggaagaacttactacacttttgagttcacagctcaagctccaaatttcaccaggcatgcgcttggtgcaattgccattgcaaatggcaaattttacacgttgacaactggagcaaatgaaaggagatgggagaaaatcaaggataggctacatacagtcgtcgattccttcaaaatcgaggtgctccaactggtgtggttcaatggtaaatgtcggaaacatggattttactgatctgttttgttttgagatgtgtgacacgactgcaatttgtacgtatatacatcttcccaatgtcgatcctgatccttctatttgtatgtactggtgaggttaagaaaatatgtaaatgatcctttgaatcgcaatgttgattataagggccatctgtgagagtaaaatctatactgggtttttttttctttaaccacgagccaaatatctggattttattggctcaaataatgatatcgtgatatttgatgtagtagtataaagtaatatatgatccatttatgtc

SEQ ID NO: 14858 - DNA, 1998 bp, Oryza sativa
  ref <308>: DATABASE ACCESSION NUMBER: AK065397
  ref <309>: DATABASE ENTRY DATE: 2001-12-06
gattcttcctttctctgtgtttgtttgtttccagttgccactaaccagccagagccccgggggggagaagagcgagagaggaggagaaatcttgcagcaatccctcgcttagattcgccattaccgccgcttttgttcccaccaagattaccaccccctcctcctcctgtgctcgagcgctcgcatcgcatttcaggctgcttcttgattctgcgaggaggttgaaatctctcgtgattgcaacagctgccatccgttcgttccggtggagtgcaccccttcatcaccaaggaggagaaaaagctgtaatcttcggccgtttctgcctttctgcagcaaacggttgaagaaaagccgcgtcttttgggcggatttcgcggaggccgcttgaggtttttaggcgtggttcgtgtgagcttctctttggaatttgtgggggaaagagtgagggagggagggagctcagtgggagagatggaggggaatttgccgccgagaggagcccttgtccatggccatggcggcggcgtcggcgccttcgatctggaggcgacgatgcagccgccgccgccgttccacttcgcccaggatccgcacctccaccaccaccagggcatggtccccgtccgcgggaacccgatgctggatttgggcaatgtggtcaagacctcgccgagcgacgaggaggacgtggatgacggccaccaccatggtggcggcggcggcagcggtaaggaggcctcccagtggcaccgggtgaagtggatcagtggcatggtcaagctgctggtgtccgccgtggcctacatcgacgaggacgtcgacatggactacggcacgggcagcgccgcgaggaggaagcacgccatgctgaagaggaaggggaagtggaggctcgtctccgcggcgatgaccgagaggggcttcccggtgtcgccgcagcagtgcgaggacaagttcaacgatctcaacaagaggtacaagaggatgaccgagatccttggccggggaacggcgtgccaggtcgtcgagcaccccgagcttcttgaggggatgcggctctcgggaaagctcaaagaggaggctaggaagcacctgaactcaaagcatctgcactatgaggagatgtgctcgtaccataacaggaacaaaatgtgtctgtttgatgatcccgcccttcagaagtcattgcgtttggcgcttaggagtggagaggagcgtgcaaagaagaacccgtttgggtatgatgatgaggatttttctgacgatgacgacgaagatgaagaattcgatgatctggaggtcagcgctgaagatcatcaccatggaattcatggtgccaagaggctgaagcatgatcaggaggagacgcattttgggtctaatctgtcagaagttgctgttattgacatgaacaaaatgctctctgagggatctggtggtccaactgctgaaaagagtccctctacccctggtatgcgtgatattcgacttgaaaaacgccgcctgaagatcaaagctcagatgctgaaaattgagcagaagcatttcaagtggctgaggttcagcaaggagaaggacagggaattggagaagatgagactggagaatgaaaagatgaaactggagaatgagcggttggaattggagctgaagcttaaagaaatagagatgggtatcaaaccaaagaagatttttagtgattgaagccttggaatgatagaactagaaatggttagagttgctggtgatccttttgtcttttgcaggagcttgcagatttagggtcttatatatacattgatctgtgcccctgtttgaattttaccttagctaactgcaatcggtcaagtgaatggctattccagttgttaagtgtttaaacttggtactagttggcctttcaaatgataaatgtttaagccgtccttgtacatgcctgctgttaactttctgcagttgtttgtgtgttgctattgacctctgagtctttttttt

SEQ ID NO: 14859 - DNA, 1369 bp, Oryza sativa
  ref <308>: DATABASE ACCESSION NUMBER: AK065398
  ref <309>: DATABASE ENTRY DATE: 2001-12-06
gctccgcttcttctcgcgcaaccaggagtggacaccgacgggactcctccggcgagatgcgccaccgccgggactcctcctccggcgagaccccaccgccaggactgctccggcgaaacgctaccaccacaccaggaacggccaccgtcaatcttgctcccaccgaagcaacgcgacgcgctctatccagcgccagcaccccatcccccaggtcaacctcgacagtgacctcgtcggccatccctaagcacggccagcacggcgactaagttcgaggctgatctcgtcaggttcatgtccttgatccaaaatctgtgttgtgactgtttacgattcggtttggttcgactataaattagtttttgcatcttgtgtaaatctgaaacttatgagagaaaccacggtgattcttgtgtgaatgatctttgcaaagacttgttatgttgtttatttgtacacatgtctagactcagaaaggagtagatctagttatacatgtatacactggagttgctatacacaattaaattcagagaggagttggactatatgcgggatactcaatttaatttggaatgtacatctgcagcaagacaaccaaggagaatttgaaaaacgttgattaagaagggaagatgatgcatccactgcttcgatagaacaactacaagaatcgtcagttaccatgaatttggttctcttaccatgatcgatttgtgtttgtgatccgcaggatctcgcggaggatttatggcaaggaagctcagtgcaagaagggtgagatgggaacgcagtatatcatcctcgacatgggtggcatacaggttctgtttttttttcgagatttcaaagagtcagaagcatatttctacacataactgtgtactcttctaagtatatctgggcttctattgagtcagtattggatataatcacatggtttgttatgtcactttcatgggtggtgtcattttgggacgaagtatcctgttgtcgcatcgagccatctgctatcgcactatcagttgtggatggaaaaaaaataaaaaggatcaaaatctagggagtcaaactaggatcacattcctcaaatcggctataccgttctagattattgttctgaaacatattccatagttttagaagagatataccccctctcggtccacttcctcaatccatcgatgcaagaacttttgagacttagacaaaaacatctttttggctgctttagctatgatactttaagcttaattcaccaccaaaatatggtccaaatgtttctatttgaatgcaaggatgtaaagtcggaacctttttaagttatgtaaacacaccttggatcaagtgaaatatgttgtgacgtgct

SEQ ID NO: 14860 - DNA, 2764 bp, Oryza sativa
  ref <308>: DATABASE ACCESSION NUMBER: AK065399
  ref <309>: DATABASE ENTRY DATE: 2001-12-06
gtccataacgagggccatcttttgtggaaacgctgcagcgctgcctgtggccgcgccgtcgtgtgcaggtttgggctcctcgccggccgtcgcacgccggtgcgcggcgcggaggtaggcggaagcggcgccggagcgtgcagtgttgctggttggatagctggtggtgtcacatcgtccccctctttcctctttggcaggaggcctctccctccgacggctgccgcacgccggtgaagaacggaggccagcgcgagcaaggccacagcccgccgccggttcccttgggtgaggcgtttcgtcttgctgacttcctgaggcaattactgtgttcttccatccgccattcgcccgctagggtttttccccgcctccatttgggggcttgggtgttatttcaatgttgtgtttgatttggatgaataaaatgaacccccctatgccatgtttctgttgaccgtagccgtagtgtcgattagcacttgagccaaataatgagatctttagttttagccattcagcttcaaagtaatgcacatttttttttttttagcaatagctgcagatgttgtttgtggtgtgaattggtgatatctggttcctatttccagtcctgccaacaggccggaacaaaattgtgtgcgatggttttcatatcttggggttaaaattaaagaagaagagggaagcccctccatttccattaatagagggtaaaaaggaaatgccacccaagttgtttaagagtacattttattccttgttcgagtgccaagtactagtaagtcttatgtggatgtgtcgctttttgcattggagaaaaggatgcttcactgctgtagtacacttcctgtaataggatgccagggtctcttctctccaaaatggaaaagatttatttagccattgccgcagctgtggttactagcgttctctgtactgtgattagcaatatctagtttctatatccagtcctaccaacagggcggaacatgattgcgtttttgaggttttctttttcgggtagaagagaaatgccccacaaaatttgtttcttttcctcgcacttcaatcttattttgtttcctgcttacaagaacaaatttttgattgcaaattactaacgtgctgtatccaattttgcttgtgtggatctatttctccattctgtggatatggcagttggcaccctcgcacaccaactactcgattgaatgcccctgataaagtaagctcttccagagagagagagatatgtcccagtctagcaggcgaacgagtgtctgtgacaggatcagtgctctgcctgacgaacttttgcaccatgtcatgacattcctaacagcgaaggaggctgtgcagacttgtgtgctatctcggaggtggcagaacgtctgggcatctgtgggatacctcaatgttgactcgtgcaacttcattacagtgaaacattttaagaagtttgttgacaatttgctcctgcagcgcagctgtgccctgttggatatgttctgtatccatacctcctatgacagctctgatgattcccttgattattctgacatccatccatgggtctgccatgcccttaggtgcaacgttaaaactctcggcatactcaattattgtgatggcaagctcctttctgtagatggatatcctgtccccttcactttcttgcacttgaagagtgtatacctttgcaaattttctattgataaccgttttgtcgagaaactcttttctggttgcccggagctactgcatctggagttgagacattgtgccatcaaggccaccatgttttgctctgctacattgaagattctgaccattacagctgcagatagaactcaagatgacccagaaggttttcagcatcttgtgataaatatgccaaaccttatctgcctgcatgtagaggagattgcaaacagaaatcttcggctcctagacatatcatcagtggaatcagcttcagtttacccttaataggttctcctttggacattctgatgttgactgcactattctcagtgctctttcaaacgctgcaagattgcacttgatgtcttcatctatctacgaagatgtggtccaaaaggtattactacgtgatcttccaaggtgtgggatattcagcatctaacgagtttggcacttggtgagttgttttttagtgatggctgctatccactactgtacttgcttcggcactcacctaacatagagaaactttccctgcatcttgtcaagcatggagcttatgcctatgatcacgacaccaattctgcaaatgctactgcagatttagatcccacatgcgaaggaacagggacagcagttaactgtgaaaagcttaggaaaatcaaaatcatttgcccacaaggcgatagaagagtccacatcattgtgaagatcttattttccattattaatcctctccctcaaatcaaaatccatccccaaaatggctgagaatgttgagcatcttaatttcagcatttgcacactcaagtctgttgaattggaattccatgactcatatttcaatgttttcttttacaacctaggccaccagttacgttattgaagatgttgatggttatgatcctaaatctgttttgtaagtgatgtggattttgatgactagggtggtcatcttaaggtggatcagattttcttattcttgggcaagttgttatttctccttttgatgactctatttgggcaagttgttcaagtaaaatgatttttagttgtt

SEQ ID NO: 14861 - DNA, 2330 bp, Oryza sativa
  ref <308>: DATABASE ACCESSION NUMBER: AK065400
  ref <309>: DATABASE ENTRY DATE: 2001-12-06
gatttgtccagtccaggcagcagactgcattaccacataccatacctatggattcatccattcttcctgctctgctgattgccctgttcatacccatcctcctccaccttgtcacccgattcaagtactcatcctacaatctccctccaggctcacttggcttcccattcgttggccagagcatctccttcctccgggcccttcgcagtaacactgatcaccaatggtaccaaggcaggatcggcaagtatggtcctgtgtccaagatgtggctgtttggctcacctgcagtcctgatggccggacctgcagccaaccgcttcatattcagcaacaaggacctgctcttcacggggacaaggtcgatgaacctccttagcggccggaatatactgatgctctcaggcgaggagctgaagcaagtccgtggcgcactgcagaatttcttaagcccagaaatggtaatcaggtatgtctctaagatggatgaggaagtcaggaggcatgttaaggtgaattgggttggacacaagactgtcaaggtatgaacatagtgctagcttttcttttcatttcgatttgtttctttgtattgctggttcccttattaattactcaacatgtcactcgctagtcgctacaaatttgttgatacttataaacttatacccttcttgatttcttagttagatgtaaatataaccttacattgtacatatgttaaggaaatatatttggtgaaaaccatcaaataattgaaaaaccgtgaaaaccgtacctaaaagttttctaaaatcttttgttaaaaaaagttttctaaattcatgaaaaaattataacgataggtatatgtgtgaaatacatccataccaaatgtcaagtccaaaatcaacttcatttttgagaaacatagtattcacctgaattttttttgttactcccaaataaaattaagtttgaacacctaactctggtaactttttttttcatgaatttacagaacttttagatcccatgtatgtatgactcttgcatgatcctgttcctgtaggttcttcctttggcaaagaggctcacattggacatcatctgctcggtcatcttcggacaagaggcaggttctgtcagagaagcccttgccaccgacttcccggcgatggtgagggctgcgctgtcgattccagtgaagatacctttcaccaggttcagcaggggcctgagtgcgagccaaaggatcaggaagttgctcagggggatcgctcgtgagagagagacgctcttgcagcagcagcaggctcatggcgcttcagcagctgacgatttcttcacatacatgctcgccttgcgtgctgaaggtgcgcactcgctcacggtcgaggacatcgtggacaacgcgatcttccttctgatcgcaggctatgagacgacatctgttctaatcacattcatgctctggcacctggacaaggagccagaagtcctttccaagataactgaggagcaagatgagattgccaggaacaagggacctgaggatgctctaacctgggatgatgtttcaaggatgaagtacacatggaaggtggcaatggagacagtgcgaacaatccctccaatttttgggagcttcagaacagctaccagagacatcgaataccagggctatcacattccaaaaggttggatggtattcacagcccaatctgttacacatttggatgcaaatattttccctgagccaagcaatttcgaccctgctcgattcgagaacaactcttcgattcctccttattgctttgtgccatttgggggaggtccaagaatgtgtcctggaaacgagtttgcaaggactgagacattggtgaccatgcactccttggtgacacagttcaggtggaagctgtgctgcaaggaagaaagctacaagaaagatccgtctccgacgcctcttcttggactcccagttgaactggagccgagatgcctccctgaaaatgctcatgcttaaaaattgcttcatgtccgtgcattttgagtttatgctatttgcagttagccagagagaatcatggagtaatgcagtacaaatccaagaactgacaagaattcaagtccaaattcaatccttagattgagaaaaacaaaagcaaatctatatgaacaatatagacactatctatattcggattctccaacttttgttatacatatgtagattaaatttaaactggcgtgttcgaggggtatgaataatgttatgatctacggtgttggcacttttcacaaattgtaacgtgatgactattcaagtagcatgcaaggatgacagt

SEQ ID NO: 14862 - DNA, 3284 bp, Oryza sativa
  ref <308>: DATABASE ACCESSION NUMBER: AK065401
  ref <309>: DATABASE ENTRY DATE: 2001-12-06
gagtaaaattgatttctccttctccgccgccgcccaaccctaaccccccatatcatcatccgcgtcgtccttcgtcgctcctcggctcaagggttcaactcgaactcacggcacaggagcatgaacacggcgacggcggcggcagaggataacggcggcggcggcggcggcagagcaacatggcagcgaaaggcaaggagagcaaatactagggttcgagcgagttgccacttgccagccccgatccatccctcctgatccatccagtagcaacgcgaagttacaataatacccttccaaccaagttgtctgggcggtaccgcatcagggacattcttggtaccgggaggtaccaaacaatccagccgttggatcgggccagatccaacggccagcattcggtaccgcccggtaccattggacggtaaaaactctcatctatgtaaggcaactaaacaatacagagtggagagatttcaacccagagagttattttatggttatgttctcaaaccggatcaagaattccaattttttatcacataggcaagcatggtagatatttgtaagaatccatacatttccagaaatatttgatgttagagcaactgggagagagaagtcattaaaatatgtttgttcccttctaactgtacttctgaccggacaatcagtaaacctcccaaatttccttgagatggtaagaacacgaacttgttcaactgagctgggtagaaatttttagtatatgttgcctcaattgtttttctttgtttcttgaaggcagatgatgttataattagaatcactgattttattttctgattgcattccacttatcagcagaatgaatgcctctaacattccaacatggaatattgaaatttttgattcattgtcaatgcttgttgttcagaattaaaatttctgatatctttcaaaagaccagaagtgagcagattttagacagctagtgtgtcttccacaattatgcatataggagtggaccagaagaaataacattgatgttataaaggattctctggatcttgtacctgtggtaacatatgctggagatactgcatttcagattcactgcttggagcgatcaacatatacccttgaaagttctgtacaaagaaagatgcattgcatagtgatatctcgtgatctagcttgtataattaagtgaacgacagataaacggtatactcttgagaggagttttgttcattccatattatctttcttttgtgcagttatagttattatatactcttatggaattattttgatttattatacttcattgcttcgtctgtatattctgttgtttttaccttacaattacaggccaaacttcttactaaacttccttttttttacgcaaaaggtagagaggctctaccttattaccattgtattaatggtggtcaatggtttacatggccaagtggccaattacaaaaggaaaggaagagagaaaatacagaggtaaaggggaacgaaggaagaagatagaagagaaaaaagaaagaagaaagaaagaagaaataagaaagaaaatgaaagagggaaagagtagcatatgaatacaattgtctgcatattctgggaggttggaaacgcttgtgttagctcagttgaataccgcatcattccttgccttccataggttgtgagcacaggcagcgaagcatatcaaccatcccagcttgaggtggccctgagaagaacctaggacttcatcaacgaattggaggatgtcagtgcattggattgctatggaatttaggccgagttttgtccagagggcctcagccagtttgcaacgcaacacaatgtggtctgctgattcaattgctgggcagatgttgcagtgtgggtcagacgaccacttttgtgcgttctgttgttgttggagtttaacctgtctttgaaggctagctagaggaagattctgcaagtatttgggatggctttgagccatatgaattcagccggcttccatgatatgccatggaatgtgaggagtctgtaaaatgctgcggttgttattccgttgagggattgaaggcatgatcttgtatctggtgcatctgcatgtggttgaagagttgccaaagtgttcatgaggaggttgagttctgtctgtgcctggtttgataacactgggtggagattaatcgctcaggtgttttgtgtgaattgtgaggcgactgtacagttgatgttggttgcaaatgatgccagtgatgggtaggtgatgaagaagcagccgtcgtccgtccaatggtctttccagaattgcaccgcaaggtcgcttcccagcgaaactttggttgatgctattgttggttccaatgctccacagatcatcttccaaaccggtgtatcagttggtcttgctaggataggaatctcgttctgcaggtgctgtgctctgagccagtggaagcatggctccggggagccagatagcagcttgcttgcaagtttcattagtagcgacaggttgtgagctttgagatctcgtatgcccagtcctccctcttcttttgacatggtgacagtatcccaggcgaaaaggcaatgacctcctactaaactgagaaataaactaaaatttcggatgctgagcttagagaagttttcatgaatatcacttcaaatgagtatagttacttcgaatgagtatgtcacgcctttgcggtgaacatatctacttgttgcctcccaggaaacaaaaatcatgctgattaatcagatgtcaattacttctttgcagtaagcaggaaatgttgtttggcaaataactctgttctttaggatcctgcttttggtgcacatgccatggttccagataagattgtcaaagatggacaagcttcacctcattcacaaactgcatcagtttggcttaggaatcacaaataccttgacgttcaatgccatccatgaggtgactgtatcttctttattatttcacataagattgttcagaaatcaagtaactgttgggttttcagctcgctgaccaattttggacttatgaaacaggagtgtcgacatattatggatcatgcagtaatctaagaagttgaaatctggaaatgggtgtgcattatcatatttaaaaatcttctcctgctgaacaattgccagttgcgggattcctctgtgcaggtggtatgtattgttttgttttttaagttaagatcgaactataatatgtgtgcttttctcaatgaaatggtttatttggtgcttctttttcctactgc

SEQ ID NO: 14863 - DNA, 1774 bp, Oryza sativa
  ref <308>: DATABASE ACCESSION NUMBER: AK065402
  ref <309>: DATABASE ENTRY DATE: 2001-12-06
gtctccatccatcgccgccgccgcgcgccgccgcgtgagccgccggggggcgggcattggattggacttgggggctaaaagcagcagtttcttgtttttacttcctggagaaagtgacgattttggttattaagccagtcgctggattacgaggaggagaggggatagatagtttgtgtcagacgatgatgatgccgctgcgttgcctctccgagctggcccgccgtcgccgcggctgctgccggcctgatcacgcggttgatgcgatgagagctgggctccaatgtttgatgagcacttgctcctcaaccaaagctactgataatcatagtttctccaacacatatgcaacttcttgtgctaatttgccagaggtagcaccaagcgaggcgccactgtcagacatgctcgtcgattcattcgggagatttcacaactacctgaggatctccttgacagagcgctgtaatctgagatgccagtactgcatgcctgcagaaggagttgagctcacgccaagctcagagctcctgtcgcacgacgagatcattcgagttgccgatctttttgttacttctggtgtggataagatccggttgactggtggagaaccaaccattagaaaggatattgaagatatctgcttacatctttctggcttgaagggactgaaaactcttgcgatgaccacgaatgggcttgttctttctaagaagctcccaagattgaaagagtgtgggctcaatgctctaaatattagtttggacacgttggtccctgcaaagtttgagttcatgacaaggcgtaaagggcactccagagtcatggaatcgatagatgctgctattgaacttggattccaatctgtcaaggtcaactgtgttgtcatgcgtggaatgaatgatgatgagatctgtgattttgttgaaatgacgagagacaagcctgtcaatgtcagatttattgagtttatgccgtttgatggtaatgtttggaatgtcaagaagttggttccttatgcagagataatggataaagtgcgccaacgttttaacggtgtagaaagacttcaagatcatccgtcagagacggcgaagaatttcaagattgatggtcatgctggaacaatttcgtttattacatcgatgacacagcatttttgtgctggttgcaatagattacgattattggctgatggcaacttgaaagtgtgcttgtttggcccgtctgaggtgagcttgagagagcctatccgagctggtgttgatgatgctggactcagagaaataataagcgctgcggttaaaaggaagaaagctaaacacgctgggatgtttgatattgctaagacagcaaatagacctatgattcacattggtggctgagatcagttttaccagctgaaagtaccttggctcctccgtacgacgactgtgacgaactatcaacatgataaaaaaacaaaacaaagatttacatgatcttaccttgatatgatggtaaagtgaggaactcaaaacttcaaagggcaatacatacagtttgttcaagatataaaaatgttacttgtgaaatagtagcagttgcaaacctcaggcagttgaaagttgaagcatatctgtacttttcgctacttgtacgagaaagatgtatctgttgtatgatgtaatgatgtaatgatgtatgctcctcataaatcataatgctaatgtgtagctaactattcttttgtggcatcttaccggttaataaaacgaaattattgcatttttct

SEQ ID NO: 14864 - DNA, 3624 bp, Oryza sativa
  ref <308>: DATABASE ACCESSION NUMBER: AK065403
  ref <309>: DATABASE ENTRY DATE: 2001-12-06
attgggggtgagttgaaggattcaggtggtctagggttggaggactccttgtcgacgctgtttaagagatctggtcgaaagtctcgacaggtctctgtgaaggaggaagaaggtgtggaagttgctggttcacatggtgaggaaattcttgagaagggatctggtttggtttcggatagggttgccaagggcactaaacggagaaggcgacgcacaaaggaagaaatgaaaaatgctgctgcaaaatctgaaagtgcaatggcccatgaaggatcgcccaatcggaaagttggcacctccttgcctagaaaggcaaaggcagaggcaaaggtgaagattagtaattccaataggcgctcaaagaagtctgatgagaaaccgaaggcttcagatgatgtgttatgtcaccgatcattgggagaaacaattgaacaagacgcggagaccaggacagtactggatgatggatctagaaactcatctgatggggccagtcatcgcattgaagtttcagcttgtttaagcaatcagccttgcttgaaaccttgctcaggagagcttgctgaagaagtgtctcttagtgcagcaaatgcagccactgatggtgtttctaatgaacacacatattccgaaacattattgaaggaaagaaatgatgatgcaggttgttcccatggcaagccaccgacattagccataaaaagcatacctggtaaaaaaccaatagagatgcccaagaaacctgtccgacaaaaggatcagttattatctactgatgttgacaataaatgcgtggtgggctcaggtgacactaaagatgtcaatatcgaaaatcagccagcttttgggatccctgagtcccatgtgactgggaagggcttgcatcctcataaaatggcaacatctgtgaaagagctggatgtagttgacgtggtagcacccacagatttcgaggacatggagaatgcatcaaaatcaaagcgtgtgacacgtagctccagaaaacgcaagcatggtgacatggcatatgagggtgatattgactgggaaactctaatgcaggagcaggggctgttctcaaacctctcagcagccttagtagattatcctctcaaatcaaaagacaaaatcaaaatctcggaagttctcgacaatggagatggtagcggtgttgctgcagtgcgtgctggcctaaaggcaaaggctgttactccaattgaaaagataaaattcaaggacatattgaagcgcaggggtggccttcaggaatacctggaatgcaggaacatgattctaagtcgatggtgcaaggatgttaaacatatattggatcttgcagagtgtggtgtatctgatgtttgtttggatgacgagtcaccacgtcaaacacttatacgtgacgtgtatttattcttagatcaaaatggttacataaatgccggaatcgcctcagataaggtgaaaacagaccatgaaagtcctcctgaagatgtagaagtatccaagctaaatgaatcacatgaaaggaaatctgtcagtattcaagattgcattgtcactgaagcagtccaggataagaaagctgttgttaaacagactgattgcgttttgacagaagcatcaaatgaagagagtagctctgctgccattcactgtgatgctcaagacttgctgcctcccttgaagtccgaagagctgatattcaaggaaaagaatcagggtgtattaactgaaggtagagatgaatcagcacttcccagcaattccgatatccactctaagtctgaccttgatggtttcattttaaaagttgaaggtggcagtcttcatcaagcagaagcagctgatatagaacattctgaaaacaaacatgaagcaagtgatagagttgaatctggtgggtatggaaaaaagataatagttgttggggctggtccagctggcttaactgctgcacgacatttgcagcgccaaggtttttctgtcactgttcttgaggcacgtaataggattggcggtcgtgtttatacagatcgtgtgtctctttcagttcctgtggatttgggtgctagcattattacaggtgtggaggctgatatagcaacagaaagaagggctgatccatcatctttgatatgttctcagcttggtcttgaactgactgtgttgaacagtgcttgccctctctatgatgtagtaactggcgacaaagttcctgatgatttggatacagatttggaatctgaatacaatggtcttcttgatgagatggcacagctttttgcacaaaatggtgaaagtgcagtgggtttatcccttgaggacggattagagtatgcacttaggaagaatcgtgtgactcgatctgaacaggatgatcagttaagaaatgtatctagtgctggagctgtagacatttctgaaagtgcttccacagaaaaggagatagcccactgtggaaaggaggataagacagatgttctcagcccccttgaaagaagagttatgaactggcactttgcacatttggaatatggttgtgctgcaatgctcaaatccgtttctcttccatattggaaccaggatgatgtgtatggagggtttggaggagctcattgcatgattaaaggtggctacgacacagttctagagagccttgcaaaaggacttgatgttcagttaaatcatgttgtaactgaagtactttatggatctgaggaactaggtgccagtggtaatagcaggaaatttgtcaaaatttccacttcaaatggaaatgaatttgtgggagatgctgtgctgatcactgttcctcttggttgcttgaaagcacagacaattaaattttctccttcgttgccagactggaaattgtcttctattgacaggcttggatttggtcttctcaataaaattgtcttggagtttcctgaggtcttttgggatgataatgtggattattttggtgcaactgctgaacaaactgatttaagaggacaatgctttatgttttggaatctcaaaaagacagttggggtaccagttctgatagcactacttgttgggaaggctgctatagatggacagagtatcagttctgatgatcatgttaagaatgctatagtggttctccgtaagctctttaaggatgcttctgtaccagatccagttgcatctgttgtgacaaactggggacttgatccttttagcagaggagcttactcttatgttgcagtaggagcatcgggaagggactacgacattctaggaaggcctgtttcagactgtttattttttgctggtgaagcaacatgtaaagaacacccagatactgttggtggtgcaattttaagtggtcttcgagaagctgttcggatcattgacttggtacacagtggtaaggattatgtggctgaggttgaagctctacaaacttaccaaatgcagtcagatagtgaaagaaatgaagttaaagacatgtcaaataaacttgatgcatgtgaactttcaactgctctgtgcaaaacctcatctgatgcatcctatccactatttagcaaggagactttactgcaagaaatgttctttagtgcaaaaacaacatcagggcgtctacatttggct

SEQ ID NO: 14865 - DNA, 1309 bp, Oryza sativa
  ref <308>: DATABASE ACCESSION NUMBER: AK065404
  ref <309>: DATABASE ENTRY DATE: 2001-12-06
gtccctcagtccctcacctccatttccatcaagcccaagaacgaactcaccacgctagtgttgagaagtggagagagttgagaggaatcaatggagatgatggttcatgggaggagagacgagcagtatggcgggctcaggctcgggcttgggcttgggctcagcctcggcgtcgccggtggtgcagccgacgacgagcagccgccgccgcgccgtggtgccgccccgccgccgcagcagcagctgtgcggctggaacggcggcggtctcttctcctcgtcttcctccgatcatcgggggaggtcggcgatgatggcgtgccacgacgtcatcgagatgccgttcctgcgggggatcgacgtgaaccgtgcgccggcggcagagacgaccacgacgacggcgagggggcccagctgcagcgaggaagacgaggagcccggcgcgtcctcccccaacagcacgctctccagcctcagcggcaagcgcggcgcaccatctgccgccaccgccgccgccgccgccgccagcgacgacgaggactccggcggcggatcccgcaagaagctccgcctctccaaggaccaagccgccgtcctcgaggacaccttcaaagagcacaacaccctcaatcccaagcagaaggcggcgctggcgaggcagctgaatctgaagccgcggcaggtggaggtgtggttccagaacaggagggcgaggacgaagctgaagcagacggaggtggactgcgagctgctcaagcgctgctgcgagacgctcaccgacgagaaccgccgcctccaccgcgagctccaggagctccgcgccctcaagctcgccaccgccgccgccgcgccgcaccacctctacggcgcccgcgtcccgccgcccaccaccctcaccatgtgcccctcctgcgagcgcgtcgcctccgcagccaccaccacccgcaacaactccggcgccgcccccgcgcggccggtgcccacccgcccgtggccgccggcggcggcgcagaggtcgtcggcgtagagaccccactactgattaattagttaattagagatgagtagtggctttttcttaattagcagggtattaattaattacttaattagggttggacccctgtagttttcttgtttatactacgtgtataatttagctctggttttgaactttttaattagtttcataatctttttttttcctatctctcacttcaccctgtttgttgtttactcagcaaagaatatggtgtctttgtataaagtgatgcatgaaatggatcataaaagttttcaatattaattcc

SEQ ID NO: 14866 - DNA, 1521 bp, Oryza sativa
  ref <308>: DATABASE ACCESSION NUMBER: AK065405
  ref <309>: DATABASE ENTRY DATE: 2001-12-06
gtttgagaaagagtagaggagagaaccaaaagggtttccagagcggcagcggctgcctgcttagctgctgctgatgctgcaggctgcaccaaagcagcgagcctttttttacctctcctactataccaccaccaccatctcctctcctcggcttcacttctcgcctctccttgttggcacgggcggcgattgagcccgcggcggcgccatgtcggggctgtacagcccggggttctcgccagcgaggaacctctccccccagattaggagcaacccgacggatgttgatagtcagtatctggccgagttgctcgccgagcatcagaagctggggccgttcatgcaggtgctgcccatatgcagcaagctgctgagccaagaaattatgcgggtatcaagcattgtccacaaccatggatttggtgattttgacaggcatcggtttagaagtcctagccctatgtcttcgccaaacccaagatctaatcgctctggaaatgggtttagtccttggaatgggctacaccaagagagattaggttttcctcaaggaaccagcatggattggcagggagcaccaccaagccctagttctcatgttgtaaaaaagattctgcgtttggatgtcccagttgattcttatccaaatttcaattttgtgggacgcattctaggtcctagaggtaactctctaaagcgggtggaagcatccactggctgtcgtgttttcattagagggaagggttccatcaaagatccagggaaggaggacaaactccgtggaaagccaggctacgaacatctgagtgacccactgcacattttgatagaagctgagttcccagccagtatcattgatgcaagattgagacatgcacaggaggttatagaagaactgctaaaaccagtggatgaatcacaggatttctacaaaaggcaacagctcagggagctggcaatgctaaactcaaccctgagggaggacagcccccatcctgggagtgtctctccattcagtaatggcggtatgaaacgcgcgaaaacgggccagtagagaagcaactctaccaccacccatttgaggtggtatccaggtgccttatgcccttaaaaaggatggcattggcacaccttcaggcattgtttgccatgggtgtgtgtgaaggaagcaatgcaatgcaccttcactagatggagtttggtatcagtcagattttcgccttcaggcaggggaaaacttcagggacaatgacaatagtcgcagatcgtccggtcgatccacctttggtttgttgtaaggtctcaagaacatttgttttatttgttattgactgttaaccctagtatgtggtgctatggtaggttatctccatgacaagctagagaaggcctgggatgtgagcctttttttttcttccatttaccccccatttaggtgtttaattcaccttgtattatatcctttcacatttatggagctgtgaaaaataaaagaaggatgaagggtcatcctctttctcc

SEQ ID NO: 14867 - DNA, 3042 bp, Oryza sativa
  ref <308>: DATABASE ACCESSION NUMBER: AK065406
  ref <309>: DATABASE ENTRY DATE: 2001-12-06
cctaaaaccacacggttcctgctccctcacccatcggaagcggcggcggcggcggtggtgggcatgggcgccttggcggcggcgacgtcgtcggcgatctggctcgtcgaggacgacatcctcctcaagaacgccgtcgagactggtgcctcattggaggccttggcaaaaggagccgtatgtttctcccgtaaattcactcttaaagaaatacaggatcgttggaattctctgctatatgacccagagatctcaacacaagcttctgctcgtatggttgagtatgagaatgatctttccacttccaatcctctgaaggctaaagttatcaacgcaaagcaaaaggatttgtcattccagaaacggaaaatagatagtgtgaagaatcaatattatgcgatgagaaagagagtccgcaatgaaccatgtagtactgtcgaccttggttttcttattgacccttgttcatgtacaatgaatggcgggcagtgtgtatgtggaggcctagataaacattcacaaggtcaccatgtggttcataatacagaaccaggggtaagtacaatgaactgctttgggcaacaggatggaagttacaatggtggacaaactatgtttgttggaatgaatggacattctttccctgcaaagcatgctgagactgatagcatggttaaaggtggagatattgctaatagtgtcccgtatggctattctgatgtaagtcaaatatatgagcaagatgcatacacgcgaaaggaccctgatactaatgaagggaacaatgtttctttaaagggtataacagattttcagggttccatgcagttccagaatctgggctctagcaatcaatgtggcagcaaagtaacagaatcaaagacaatagtgattgctgatcactgtggagttgaacatgtccatttccctgtgaacagcagttcaagaatgcaagaacctggctcactccaggtgattggccaaccagagggttctcaaacaccagttggttcaatctggactgaggttgacgaaagaggcacatttactcttgacgatgataagaaaataaagacagacaacagtgaccctctagcattgcaaccaaatttagatggtgggatttgtgcagctggtttagatcatgcagccataacagaaggtgatttcatggattttccctatttcagcaacagtgaagatttagatctcctgaatggtgaaaactttttgaatattccacatgagacaaatcaggaggatttagatgatcctgatcatgtgaaaaatctgttgcatcctgatgaggccaacatttgctatgatcagacagatcctgatcatgtgaagcataatgtagatgtttctgggataatctcggttcctacttcattggaagtgccttatcctggtcggtttgttgaatgtgtgttgaacacagaagatcctgaaattccttgcaatgacgatgttatttttcctggcgagtctcctctacaatgctctgctactgattttggccagaactctgagcacaatacctgtttggtttcccctgcaactagccctgcatcaaatgtcgaacattccaatgtgagtgacaaagccctaataaagagggaagatatgacaaatactgaaccttcttcacaaccaatgaatctcagcccacccacctcagaacaaaaagaaggttcaacagcacctagtaaaggctgtgtcccactaggagctgaaccatcagaaggtccttcaactgctggtacactcgtgcattgtcacgttgacactaatgatgcaaactcatgtgcgtcaaatttaccctctatcagtgctgctgtatttgctgaaggatcaccttgccatttagaacagcagaataactttgatgactcactgagttttcctttgcccaattcagttgaagtgcccgatcacatgaattacaactcacatgataatcaaccagaattaggagatggggctcctctacagaactgcattccaccacatgaattgccagatttgggtcttcaagaccccattacaactgttcctgtatcaaatcaagtagaagaatgctctgacaatgaaaatgatgttccaaactactatgatctagaagctttgatacttgatcaagatttaatcccatgggttcaggactctgagcagcatccaggagtttccaggtttcagcatccagaaagcaggaaatcattgatacgactggagcagagtgccaggtcttatatgaacagagccattgtgtccaaaggtgccttcgcagttatttatggactgcacctgagatattatatgaaggacagtgaggtgactcttggaagagagacagaagacataaaagttgatgttgatttgggaaaagaagggagggcaaacaaaatatctcgtagacaggcggttatcaagatggatgaagctggttcttttcatatcaaaaacattgggaaatgttcaatttttgttaatagcaaggaagtaccaagctgcaaacgcatcatcttaagttcagattcgttaattgagataaaggatatgaggttcatttttcatgtaaaccaggatgctgtaacgcaattcgtcacacgcaccccgaagccggagcactagatcctaactggttttgttcagcaaccccttatgagaagctcaatgccacattgtcactggtaactagtggagatcattgagtgagcagcgctcacagggtgggctcgttgtgctgctctactccttttcaagtaggatgtgataccaccatggaagctcatctcgctccgtgtgcctagattgtaaatgtgtaacatgtagtgtcaagtagtctctcttctgctcggttcatgaagcatgaatccttcatgtccagtagctaagctagcacatttggtctgcagcctcagcctgcagcaacaaaagcttctccgtagtatttattcattctttcctgtcatgtaaattgtagatggctgccgaccagtggggttggaaatgtaaaaaagtgtggtggttctatcatct

SEQ ID NO: 14868 - DNA, 2488 bp, Oryza sativa
  ref <308>: DATABASE ACCESSION NUMBER: AK065407
  ref <309>: DATABASE ENTRY DATE: 2001-12-06
gcgcgggcggcgggaggaggcgccgccgggggaaatcgggcgcgagggcggcggcggcggcggttgcgggattgatccagagatttttttttttggttatttgtttggattggttcggaaaatttttttgagggcgacgcgtcctcttcgaaattcgttttttccagattgttactacaaaatggtttgcatgtctggacattttcaaatggcttctgtgctgaaacttgttatgatggaaagtcatgcaacaccagatgacctgaccggtgataagggtgctgcacagatcctacacaggcaactttttgatgcacatgaaccaaatttacttgatgaagatggtgagtatcctcctctaaaccatgtattgcagttatttcctcgatgacccccgcttgtccataccaaatggcactgttttactagatagatttttttattgctgtcagcattgtccagtatgtattcatttgtttggatgtgattcctctgtttctttaatttgtttctaggtatcatgtttagtattctctatttctactaattgtgtttgctttgtaaggacggtgctattataccatattattgttgttaactcttaccttttggtgtcacaacttatctttttagttattctattatgttgtgcagatatgcatatatttggatccaaacctatggctgatccattggacctggtattttttttatgatgttctgtgtgggtctctatttacatttgtttcattcaagttgtgttgacatcttatatttaaggtcttctgtaatacttgcaagaaaccaataaaggccagccaatatgcagttcatgcaggtataacaccagccgttattttggtgcaaattcagcgacttgattttgtaattctttattattgtcgctgtaacagaactgtgaagtgtgaacatatagtttacagatccgtactcttaattttgcatgaatcccgagttcccgagttgtgaatgtgtaaactacatatgtttcaatgtgcatatgcagaaggctctaagatattattactatatcatttgatttcatctatgacaactggtgcacgattgttcatagactggaaaaataatctgcacccataatactgtggaagcatcttacacctatatctcttgttagactggtagtagtttgtttactaattggtaaatttgattggaacagcctatgtatgtgaaacttgtatttaaaatattggagtaattgcacaaccagctaatataataaccttagtcagcatgggctatgcatttcaagtcatacatctgatgtgttgagtaggaatctatatttctgttaaccctccttcctcctctttgaaaagtgttccaaggaagcagataggtcgaaaattcattgataagtttctttcgacttctgcagagcgatgtagttcagggaaggtaaacccaaatgattcaatgggaacaggtatagatgatgattgtggtaccaagaagcctccaaagaaggggagaaaaataaagctgacaagtaatggaaatcaaaaggtacatataaaattgaaagcaaagtctcaatctgaaaacaagaacattgccaatggttttgagttggacaatgtgcttgccaacaaagtacaacctataggttccaccattgatcaaaggttgaaatcatctgccaacaatccagctctcaccagtgtacctcaaggtcaccatagagatgccccagttcctcttgcaacaaaaatgtaccactcacagggaaactaccggcttcgattggaactcggtcagctttaccgccaatcatgttcagagcattcaggcagctattcaattccgaactcatcacaggagaatggcttgatggtctcgcatttatcaccaagagataattcatcattaaatgttgctcagaagagctttgttcctcaaacaaagtctatggaccagcttcttgcgagcacaccagaatcatgccctgtaatcccgcagcaagtagcagcaagtgtgccaaaccgacaagcaacaaaatctcagaaagcagaggttcaagtatctgcagtaaaaaacgaaatggcaagaagcagatgcagcaaagatgctgttcggcattcaaaaaacacaggtaataagaaggcccatcagcaaagaaacggaacggtacctgtgattaaatcctcagtagactagctcatttagtggtagattgttggtgtagcggctccatctgtgaagagttgttcttttcaaatgaaaaaactggttctcggaatgatcttggattggacaatctgattacagggtcattttggtccgttaactcttgagacattgctactaacaacttttttactccatctctgatgatggaaattacctgtacatatcccggctgcaaagtcctttctgccccccttgttataaatgacatgatgaacattttcaatatagcttttgatcatttcgaaacattccg

SEQ ID NO: 14869 - DNA, 4034 bp, Oryza sativa
  ref <308>: DATABASE ACCESSION NUMBER: AK065408
  ref <309>: DATABASE ENTRY DATE: 2001-12-06
ggttaaaggatttggaatttcttccttgaagaagtatggcattgctgcaatacagcagcaaggtttggaagacagagcttctgcaaaatctcgcgaaggagctttactaggatttgagtgcttgtgtgagaagcttggcaaactatttgagccgtatgtcattcaaatgctaccgttgctgctcgtgtctttctcagatcaagttctggcagtgcgtgaatccgcggaatgtgctgctcgggcaatgatgtcccagctcacaggtcatggggtgaagcttgtccttccttcacttcttaagggcctagaagataaagcatggcgtactaagcaaagcagtgttcaacttctcggtgctatggcctattgtgctcctcagcagctatcgcagtgtcttccaaagattgttccaaaacttacagaggtattgactgacacacatcctgaagtccaagcagcaggacagacagccctccagcaggttggaagtgttataaagaatcctgagatatctgcacttgttcctattcttctgtccgctctgacagatccaaacaaccacaccaaacattctcttgacatccttcttcagacaactttcattaattcaatagatgcaccatcacttgcactgctggtgcctatcgtgcataggggattgagggagagaggtgttgataccaagaagaaagcagctcaaatagtcggaaacatgtcttctttagttacagagccaaaggatatgattccttacatagggctgctcctacctgaagtaaagaaggttctggtggatcctatacctgaagtcagggcagttgctgctcgagctcttggatctcttataataggaatgggtgaagaaattttcccagaccttgtgccatggctattagatacgctcaaatctgatagtagcaatgttgagcggtcaggagctgctcaaggactaagcgaggtcttggctgctcttggaaaagactattttgatcaaattcttcctgacatcatccgtaattgttcccatcagaaggcttctgttcgcgatgggcacttgacactattccgctatttgccaaggtccttgggtggagtttttcagaattacctacagatcgttcttcctgctatattagatggacttgctgatgagaatgaatctgttcgtgatgctgcactttctgccggtcatgtatttgtggagcattatgctacatcgtctttacctttgttgcttcctgccattgaggacgggatattcagtgataattggcgtatcagacagagttctgttgaactattgggtgatcttttattcaaggtggctggaacttctgggaaggcaatccttgaaggtggaagcgatgatgaaggtgctagcactgaggctcatgggcgtgcaattattgatgtacttggaagggagaaacgtaatgaagttcttgctgccatttatatggtccgttctgatgtcagcttgaccgtccggcaggctgcattacacgtttggaaaactatcgtagcaaatactccaagaactctgaaggagattatgcctgtacttatggacacacttatttcatcacttgcatcatcttcctcagaacgccggcaggtcgctggaagatctcttggtgagcttgtaagaaagcttggtgagagagttctgccctctattattccaattttgtctcaaggactcaaggatcctgatgctagcaggagacaaggtgtttgcatcggcttgagtgaggttatgggtagtgccgggaaacatcagctactaagttttatggatttgctaatccctaccatccgaactgctctctgtgacagcacccaagaggtccgtgaatctgcaggattagcatttagtactctgtacaagagtgctggactgcaagccattgatgagattgtccccactctgctacgggctttggaagacgacgaaacatctgcgacagcccttgatggtctaaaacagattctaagtgtcaggactgcagctgttttaccccatatattgcccaaattagtccagcctcctctctcttcattcaatgcacatgcattaggagctttagcagaggttgctgggccaggtttgaattcacatattggaactgtcctcccagcattgatacttgccatggatgatgaagatgctgatgtacaaaactcggctaggaaggctgctgaaactgttgtgttggttattgatgaggaaggaattgaaacattaataccagagcttcttaaaggagtcaatgatagtcaggcatccatgcggcgtggctcagcctatctgattggtctcctctttaaaaacagtaaattgtatttggctgatgaggctccagatattatgtccaccctaattactttgttgagtgataccgataaggctactgtatcagctgctttggaagcattttcgcgagttgttagctctgttccaaaggaacagcttcctacacatataaaactagtacgtgatgctgtctccactgccagggataaagaacgtagaaggagaaagggtgtgcctattctcgtccctggcttatgtcttccgaaagcactgcagccctttcttcctatatttcagcagggtttaattagtggatcagccgagacaaaggaacaggcagcagaaggtctgggggagttaattgatgttacaagtgagaaaactcttaaggaggttgttgtgccgattacaggtcctcttatccgtattcttggagatcgatttccgtggcaagtcaagtcagctatcctatcaactctgactatcatcatttctaaaggggggcttgcacttaagcctttccttccacaacttcagactacatttgtcaagtgtctgcaggataacaatagatctgttcgaacaagggctgcatctgctcttggaaagcttagtgcacttagcacgcgagtggatcctttagttagcgatctgttgtccatgttgcagtcaggggatgatgcagtcaaagaaagcgtactttctgcacttaaaggtgttgtcaggcatgctggcaaaagtgttagccctgtagtcagatctcgcgggtgtgatcttctcaaagatctacttcaggctgatgctgatgacgtccgcagttctgcggcaaaggcaattggtacattatgtcagtacatggaggagaacgagacttctgacctggtgcaaaccttgttgaatatgggaaccttaccagactggtgtaccaggcatggtgctttgttaacattctgttcgatatcgatgcattgttcatctaagttgtgccgttcgatgtcatttccttctattgttgatcttctgaaagattctctgaaagatgacaagttccctgttcgtgaagcctcgacaaaaactttggggaggctactctgttaccagttgcagtctgaagctagcaccttgcaacttatccagttacttgccttggcattgcgcgatgattcaagtgaagttcgaaggagatctttgtctcgtctcaaagctgctgcaaagataaataacccagcccttgctacgcatctctcaatattgggcccagcaatagctgaagctttgaaggatacgaacacgcctgtgcgtgtagcagcagagcgttgtgcccttcatgttttccagttgacaaaaggagcagacaatgttacaattgctcaaaagcacctgaacatgacaggtttggaagtaaggaaaattgcaaaacttccagaggagagtgatggcagtgagagcagtgacgatgacaagaggaaataaaacgcattactcactgcagccactcggaccaaattttgcttctgtttgttgtccacccatatatgatcttttcttcatagttgtggaaatatggtcatttttctcctcctggccattggtataaacacccttttttgacaaaatacagtagcagaggaagacagttcggcgttgttcatattcttcttactagaaatcaacgttgttcataatacaatgatagtgttaatgaagattaattaatcgc

SEQ ID NO: 14870 - DNA, 3655 bp, Oryza sativa
  ref <308>: DATABASE ACCESSION NUMBER: AK065409
  ref <309>: DATABASE ENTRY DATE: 2001-12-06
gagacatcctcctcgtcgtcggccgtgtcattggcggcgccggcgccggcgccccaggagttctcgacgccgccggggaggcggggagctcgtcgtcttctctcctcctcctttctccgtccccccccttcggcatccgctgccgaccccgcgacccgagcacatccgccggcggcgcctctccgccacctatctccgactactcagttcacgctggttgcgcttgcgcacatcctgactaagggcacctgatagggcaacagtgattagttccgtggaaaaggacttttggatacggtttagctaaaatggcaaacatgaacataaccaccatcttggagaagatgacagggaaagataaggactacagatatatggcaacttcaaatttgcttagcgattgaacaaagagggcttcaaagctgaccaagacattgagccaaagttgactactaccgttcttcaacaactggaagatacttcaggagaagtctctggtttagctgttaaatgcttggctccacttgtcaagaaggttggtgaggatagtgtggtggagatgaccaacattctttgtgataagttactcaatggaaaggaccaacatcgagacactgctagtattgctctgaagacaatcattgcggaagttacgacaacaacacttgctgaaaagattttggtgtctcttgccccacagctaatcaagggcgccactgctggaaaaagtgcggaagtgaaatgcgagtgccttgatatattgggggatgtacttcatagatttggcaacttgatcacaaaagatcatgattgcatgctgactgccttgttatcccagttgagctctaaccaagcaagtgttaggaaaaagtctatttcttgcattgcatcacttgctgcatgtctgtctgatgatttattagccaaggcaacttttgaggttgtccagttgcttaaaaatagaagtgcaaaatctgaaattgcctgaacaaatatccagatgattggtgctctaagtcgctcggttggataccgttttgggccacaccttgctgaagttgttcctttgctcataaactattgtacaagtgcatcagaaaatgatgaagagctctgtgaatacagcttgcaggccctcgagagttttatgctgaggtgtccaagagatatatctccatattgtgagagtattttaaatcttgcattggaatatataagctatgatcctaatttcaccgatagtatggaggaggacactgatgatgaggctcaggatgaggaagatgatgagtacttaattgatgctcttacagtaatagataaatgttatctgtttacttgatcaaaatatgttttcgatattttctccagtgagagcgcaaatgaatacacagatgatgaggatgcaagctggaaagtccggagggcttcagcaaagtgcttatatgcaattatagtatctcgtcctgaaatgttgtctaagatgtatctggaggcttgtccaaagttaattgaatggtttagggaaagagaggaaaatgtaaagatcgacatctttaacacatttattgagttgttacgccaaactggtaacatgacaaaaggataaggtgacattgatgagtctagccctagatggttgctgaaacaagaagtacctaaggttgtcaaatccatcaataggcagttgcgtgaaaaatcaatcaagacaaaggttggagcattctctgtattgaaggagcttgttgttgtactgccagactgtcttgctgatcatattgggtcacttgttcctgggattgagaacgctttgaatgataagtcatctacctccaacctgaagattgaagcccttgtatttacaagacttgttatggcttcacattccccagctgtgtttcatccatacatacaggctctttctggcccaatattgtctgctattggagacagatatgacaaggtcaccgctgaggctttaagagtctgcgaagagctagttcgtgtacttcgtccaaattctgagccacactctccagattacaggccatatattggtccaatctataaggctatcttggcccgcttggcaaatcaggatcaggatcaggatcaggaagttaaagagtgtgccatatcttgcatgagccttgcgctatccacgtttggtgatggtctccaaagggaactgccggcatgccttcccgttcttgttgatagaatgggtaatgaaataactagacttacagcagttaaggagatagaacacaatggacaacctttaggattagtgaaatcgccatcatcagtagtagaatagaatgagcagatacacatagttggtcttctcaaggcatgaagatgaaattctttatcatggatgaaaagtataatatggaagccaaagggatttataagaagattgatgagttggtcagcctggctaatcattcaatgtttctggctccagtgtttgctttgcatgataagaagatcggtcgtattattctgtgttatccaaaatttgatcaactgcttaaagattggctgcctgctcaagccttttaaaggccggtttataccacccatatggatgcatcttataaaagatgtcatatcttacatgagcaacattgataacttggctgcaagcttaggaagtattgactcatatgtgttggagacaaagcccgagaaaataaaggtcatcctttttccttttgagtcaagagaagtaaattggcgaaaagattttgctacatttctgatagaacatcttcggaacaaatggaaatccaccatgttggatcacttcatcaacatcttacaaaaagatttcaaaattgggtacattcaacatcatccgttgttgcaagatttcaatcagctttctaacatgataaggatgacatggaaagaatctaagtatttaactgttgagaggagagtattgctatcttcaacattaaatgctattaggaacaacattccatggacatcagtgacaactatggatgctgttgtgaatgaatacatttctaaagcaacaaatgactccttgggcctctttatggaaattaagaagatagcagcacattacattgaaaaccgccgaaaactgaacaaagaaaaagggatatgcaataggaaacaggtacatccaattgagataatcgaagaaatctggccaggtgctattgaagaaatttatgagcttagtttaaaatctgagtggctcatgacttgacttgtgaatggtgagagtgaaaatatcagtgctgaaggatctggagtactctgaaaatcatgaatgggttagtgttgaaggcgattatgcaacaattgggatttcagatcatgcccagatgcaaacacgttcggcaagctagcgagttaaatggtgggttggaagagctctacaggaaagatgaggcagaactagctctacagcaaaagatgaggcataacttggttgaacgtttttttgtttctcttttttttgggtgaggggatcgccttttgtttctattgcatgctatgtaacggtggagagaatcattatcttcactatttgaaaaatgattctacagaagatgattgttttttatggcagtgcttgaagggctctgcttcgtggtaaaaaagaacacttgcg

SEQ ID NO: 14871 - DNA, 2433 bp, Oryza sativa
  ref <308>: DATABASE ACCESSION NUMBER: AK065410
  ref <309>: DATABASE ENTRY DATE: 2001-12-06
gagaggaaatggatttcttttattattatatggggactatttaccatttgtatggttccatatgtatttctatattcaaagctcactcatgttttctctgattggttatgtgcttatggttcattcatgattcacccactgtacagaacagacaagtcatgcttccatatggcttgtctgattatagaattttatcaactagattatggatttatggtaccaattgtgttgagtaaaaacatgtgtatgatgtatagttattgcctagtacttctgactggtttcactttttaatctggcaatagcatcctatggatgcctttaaatagccttcatttgtgacacttggtgacctatagggtcaatgaggcataattgctaaaactacacaaggcagcaccaatttctgcaagttaaagattgtgcctactatatgcatcataatattcttcaaatatacctatacttgaaagagaattcatgtaaaagattctatttgccactgtattgaacatctagaaacaactttagcttcggtttaaatcgttgcttgtgttcatgcgtgatataccttgtagattgtctcagttggttgtagtgaaattaattttgtgttcaatctgaaagcattttgtggtcactacatatgatcgaatctcatgtgttcattaaatgcctttagtcgttttcttgttcactttccttaacatgtttcagtgagctactatagggtcatttggttgaatcttgtggtttggcctatttattttaaatcgacctgaaaaaggtgggatgtgggagtcgaaccctggttggcagggtgggttttcgcctcggactgttggccaccacccagctatctggtttttgtgcttaggaaggaatactcaatatatttaaactgtgtttgaacaacagtttaaccagcggttcactgatcagaccattggaacggtgaaccaagagtctgaccggctcgatagatcctaatatagaccaataaggataaaattgctatggtacttcctcctgtggccttcgtcctttttttggtgtgtaaacactgatgcagaggcaaatttggaacactctacaatatggacagctggcctgtatttgatgcttttactccaatttttggaaaataaagttgctgtggaactcacgagatcagaattcgttgaagcccaagaggctttagctcagatgataaactggtttactcgtttcccaacaattctccgaggttgtgaaaacacaatcgaaatgctaaggggacaatatgcacactctgtcggctgctttgatgaggccgctttccatttccttgaagcagcaaggctgacggatagcagatcaatgcaatctatgtgccaagtatatgcatcagtatcctacatttgcatgggtgatgcagaatcaacttcacaggcactagaattggttggtcctgcttatagaaccatggactcatttgttggcgtgagagagaagacctgtataatttttgtttatggacttttacttatgagacagcagaatccacaagaagcaaggcttcgccttgctggtggtttgagaatagcacaccaacagttgggtaatatccaattggtttctcagtatttaacaatattgggtacattagcacttcaattacatgactgtggacaggccagagagatcttgaagtcatcactgacattagctaaaacactttatgacatcccaacccaaatttggatcttgtcagtatttacagagttatatcgagaattgaaagaaagggaaaatgaaatggaaaactctgagtatgaaaggaagaaagaagatgatctgcaaagaaggctttcggaagcccattctagtccatttcaccaggagctggtggagaagaccagaatccaagttcagcagctgcacaacttctcaagggagcagcaggggatgcctggcccgacaacggcgaaggccgacctcgacatccccgagtcggtagggctgtacgctgcccagccttcttctgtcaagaggctgatcgaaccgagctcggtgcgacgcagtagcaggaggcggctatcctgacaaaaatcctgacctgatgtctggggtgcgtgcccatcaaatgggggcaatggagcagcagcatgctcacataccaaatctcttgggatatagcagcaatggaagaagagctgtgacattgtgtgaggttgtaggtgctgatttattccattggttgtttatttgtagttaattatgcattatagattgctctgtaaacagattaagaggtagcaaaagaaccgagttggtatcgtatgggtagaaactagaaaggaaaacaaaagatagctgcggattgaattctgttggtgatcatttgtagttaaacaatctaaagattgtgaagtaaacggaggaagtgagagg

SEQ ID NO: 14872 - DNA, 3729 bp, Oryza sativa
  ref <308>: DATABASE ACCESSION NUMBER: AK065411
  ref <309>: DATABASE ENTRY DATE: 2001-12-06
ggaacacgaactctttcccctccacctctcgactcctccctcgcttctccccctccgcaagtctccctccctcccccacaaaccctacctcgccccctccctccttcgatcgggggagcgctccattgcggcgaaggggaagggggagtcggggatgttcttctccggtgacccgacggcgaggaagcgggtggacctcggcgggcggagcagcaaggagcgggaccggcaggtgctgctcgagcagacgcgggaggagcggcggcggcggctgggcctgcgcctgcagaacagctccgccacgaagatccagaaatgcttcagagggaagagagatttggaattggcacgttcggaagttcgagggaacttttgctctacttttggggagcactgccagagggttgattggagcagtttcggtgctaattctgatttccttcgtcaattcctgttcttcttcaatgcaaagaaagacagtgatattgctatactctgtcaagtctgcaatttgctgttatattatgtcaaacatggtggagatgttctaagactctttggtggtacaaattactcctcactggaacctcttgtgattcacagggttaaaaaacttgcactcatttgtgtgcaaactgtacatcagaaaaggcatgattggggcagtcagcttttgatgccgccagaaagcacaccaaagccttgtggttcattactcgaaactgccgcttgcttgataaatcctaagcttgcatggaactgcaaggtagttgggtatcttcagcggaagaagatctattgcttatttagggggattattatatccataccgcaaactgcaagaaatttggagcataataacaatacatctgctctggagcaagttcttatgcttattgcttcacatattggcgatgatccgtgttgttgtccagtagtggatccaagatggagtttctcctctcagcttctatcgattcctttcctctggcatcgtttatcacacttcaagaaggttttctcagctaatggactcagcaaatattatatccatcagatagcttgctttttgcctagctgcgctgatgttcttccaaatgatatatcatctaatcatccaggttatgcatgtgttcttgcaaatgttcttgaagctgcaacctggattttgtccgagccaaagtttgcttctgaaacagcggctgacatcattgcagtctgtacatcactgctggacgcgttgccaaccattacatcacctaccggaagggcagatgacgacgatgacacacccatggatgatgtcattaatggtcttgatgctgatttggaaaaacaaattactgcagcaattgattcaaggttgcttcaacatttggtgaatgctctgttcagaggcacaattagtacagactattcttatccaactggaccgtcagatattgaggtggaagctgtaggatctatatgtgcttttcttcatgtcacattcaacacattgcctgcagagcggattatgactggcctggcctaccggactgaaatagttcctgcactatggaacttcataaagcgatgtaatgagaaccaaagctggccacaattttccaagtttgtctcttctccgcctgcagatgccgtgggttggctcctacctgtatctgtattctgtcccatatacaagcacatgttgaagataattgataacggggaattctatgaacaagagaaacctttgtcacttaaagatttgaagtccttggttttaattctaaagaaggctttatgggaacttctatgggttattccttcacatgcctctcctgctaagaaagtgctacccaacccttctggatttaagaagttgtcaattgagaatgtcaagattggggcaaggattgggttatctgaactacttgcacagttgcaagactggaataacaggctcccatttacttcttccaatgatttctattcacaacaagcaactagtgaaaattttgtctctcaggctcttcttggcaatactcgagcatctgaaattataaagctggctccctttttagcaccttttaccagcagagttaaaatattcacttcacaattggcaaattctagacaatcgacaacatcccattctgctttgacaagacaccggttcaaaataagaagaaatcgacttctggaagacgcttttgatcagctaagcatgctttctgaagaagaccttaaaggaccaattcgagtggtgtttgttaatgagcatggtgttgaagaggctgggattgacggaggtggaattttcaaggatttcatggaaaatatcactcgagccgcttttgatgtgcagtacggtttattcaaggagacagccgatcatcttctctacccaaatcctggatctggattggtccatgaacagcatctgcaatacttccattttcttggcagtctccttgggaaggcaatctatgagggcatacttgttgatctgccatttgcaacattcttcttgagtaaactaaaacacaagtacaacttcttaaatgatctgccttcattggatccagaattgtatcgtcatcttctgtctttaaagcattatgatggtgatatctcgcaattggagttatactttgttattgtgaataacgaatatggtgaacaatctgaagaagaactgctcccaggtgggagagatatgcgtgtaactagtgaaaatgttattacttatatccatcttgtcgccaaccatcggttgaactatcagatccgcgcccaaagcacacattttttgagaggctttcaacaactaataccgaatgaatggattaacatgttcaatgaacatgaattccaggttctcatatctggctctctagaaagcttggacatcgatgacttgcgctcgaacactaactattctggaggatatcatccggaccatgagcttattgatatattctgggaggtcctaaagagcttcagttcgcataatcaggaaaagtttctcaagttcgtgaccggatgttctcgtggaccactccttggatttcagtacctcgaaccaaaattctgcattcagagggctggtgttcctggcatggaggaggaggacgaagaccgcttgcctacatcggccacttgcgtgaacctcctgaagctccctccttatagaaacaagacacaattggaaagcaaattgttgtacgcgataaatgcagaagctggttttgatctaagttaaaatcggcttttggaccaaatattgtgcagtgtagatagtttctaggtaacagattaaaggcacccaagggccaaaacaccgacctctgggcccccttttgagccccccataaagtaaaaggaaggatcgattccaggaggaggtaagcgaaactgaagacacgaggagggaggcaacagccagctgctcaagtgctgattaggccggtgataaattattcaccttaaataagcagatgctgttgttgtaatcagccgtgaacttgtacatgtatttttaccaacgttgtggttggttgatgtcctctcgtggagttgtgggatgacatgttagttgggtttggaaaccggcatcagcgtcgctgtagctgtactttggtgttggtgttgctgtcatgtaaggtaaccctaacaccagctgcttggtgcccaggggctgggaatcatacataatcagtgaaaaaaaagggagagatttgtaag

SEQ ID NO: 14873 - DNA, 3685 bp, Oryza sativa
  ref <308>: DATABASE ACCESSION NUMBER: AK065412
  ref <309>: DATABASE ENTRY DATE: 2001-12-06
gtttctttgatgtcccccaccatcctaatccaaagagaagctatgctaggttattagggaggggaaacaccactgatgagatatggagggagggggcctggcctccctcctggctgtccctgttcttgatgtgaagaaaggggcaccaatctctgacttgtttctgcctcagcacagttcattcccctcacaggcatgcttgcacctccatcatgaaagtgtccctcctccctcagcctccccttctttggtcttttcccacctttatgctgtgctacaatgagaaccgccgtcgctcgcgcacccgattggcctgcgtgagaatcgactcacctccttcttaataacatcgatatgatagcctcctttcatatccagctttttttaatgctgtgctacaatttagtttaagttattgactttttttttgctttacctttggtttagctctgatgtatttctccaaaaactttaggagacatggaaacaggagatgcttgcttgagaatttttttgagatattacgtaatcgctagctttatggtgatgctgacttgagtgaactatactagagaacatgaacgtggaaagatatgccctttttaccttgaaagaagcagattgctctgcttgcctaatgctgtgcccactaagaagctcaagaagcatggtggatgcattttagtgtttggtaaaatgtcgaagctcaagaagcatgtatgtataatagctgctgaatgtttcatttcttgcacatgtggctattcagatcatggaggatgcaggccactttgaaggggttttttttttcattagtttctgttgtggagcgagaaggttagatagatctcacaaggacaaggagaaagaaatctggggatatatgacaataatgatattacaagggatccaataactcatctttcctgattaatccttacaactttagcaaagaatatgtgcaccgtttccccttttttgtgaaggtagttaatagacgaagagcagggggcatggcaccaccacagggagtgcaccatatgcggcgagcatccgcatactgtaaatgcatgcctttaccctgaaatgactagataatatcataaagaaagtatgatgcctgggattgtcacctacgcgtttattccatcgatatcaccttttgaaaatggctaggggtacggtagaattccgctttctattgtgataatgtgatattcaattgaaaggaattggtatgtgaaataatctgcagctgccacctttgtagcaggtgtaagtcagtagagctcagctgatgtactgatattttgagcatatgcatgcgcaggctctttaccttcctgagtaacctgttctttttactattgaatcatccttggatgcttcaagttggggatgcacctagtatggaatttggtgtttgtttatagccgtatgttttgttgattcagtgaccttgggaccttgcaaactaaggctagcattgttcccttctaacgccttatgttacacgaaaccttcagatgctgttacaactttcctggaataacttttttagtgtacaaaatatgttattgtctccagtattatctactttactgatgtgtttcattgtgtgcgaccttgtaccacggcagtgtattccttagttgcattattgacaactttatcatgatctgacaaatatcattattgtgtgtgcaccttttgcctcatcatcttggtggatgttttttttttccactggaatattgtttacctgtggtctatgtgctttgatttgtcattgtcagcatctccatgcccagttccatatgaaattgcagtcaaaagagttcacatttttttttgcatgaattaaactttgttctgtttttgccagcagcttcatgcttaggtccatgggattgtgtggcaatgtaaacatgtttttttcttctgtttactccttttgaccacaatactaatattatgatttttgagcattgtagatggtctctgcttctggagagtggagactctggttagcatcagtcacttgacccactacaataatagaagttcctgggatgaagaaccaataactgtcagccacaaccctttgtttgcattcttattacctttgttacttagtctccgctagattatccatctcctttgattgaggttaatcatgtccttttgatccaactggtttaaaagttacaacttttcatctaggtggtgcatttgttattaatttgttaaccacaatccatggcatggtactattcaccttttcttgatacataaaacatttcattcaaaaaatggaagtggatcaggtttacacttttgtcactcacctctcctaggatcttcaactcagttctagcttttccaacctattttttctatcattaccacaaaaagattgccctttacttactggttacccaagtatagtgtcttttgcctatccctacatgcctcatgttttcttcatggctaggagtttgtagtgatatttcaagactagtgcaaatatttcatattttttcttcatgacaaaggggaccttcttaaaggtacatcgtgagaaacaggtggagttctgcgtcacacagcaaagcaaggcaatggataatggaggacagcgtcttgatataatttttaagttttcaacatattatcacatcacattacacttttcaatagaacactactagagggagttccataaattgagacactgtcgtgtccagaaagatagcaagtggatcatcttgcacaggctgcaccgtcgtattggttcagaatctttcaaataaagtcgaaatattaagaagatatgcttctcagaccatgcatcaccacactatataaggggcaaacaagctcccagtatcgttactttgagcccccgcctccccttttgaaataaggttgactgtaattctgcttttgttcgtaatatggatgatcataacttagactacaagggaagtggtgctcttgaagagcttgagatgttaacagtgaatgccaaagaagcccaagagctcatattgacgaaaatccttgagaggaatcaggctaccgagtacctgagcaaattcatgaatgggtcaacaaatatttctgccttcaagagacatgttcctgtagtaacatatgataaggtacatccatacattctcaggattgcaactggtgaggaatcttcaattttatgtggagaatatatcttggagctgcttagaagctcggggacttctcgaggtgagccaagattgatgccgtccatcttaaaggatcttgaccgtcgaacctacctctatagtctgatcatgcctatcatgaacaagtatatatcaggccttggtgaggggaaagctatgtaccttctctttgtgaaagctgaaacactgacagattctggaattccagttcgatcagtcctcactagctactataagagccctcatttccttcaccgcaaacacgatttatacaacaactataccagtcctgatgaggtcattctttgccctgatagccagcagagcatgtactgccagctgctctgtggcctggtagaacgccagcatgttcttcgtatcggggcagtctttgcctcagcattccttcgatctatcagcttccttgagcagcattggcgtgaccttgtcaatgacatacg

SEQ ID NO: 14874 - DNA, 3799 bp, Oryza sativa
  ref <308>: DATABASE ACCESSION NUMBER: AK065413
  ref <309>: DATABASE ENTRY DATE: 2001-12-06
gggcctgggcctttttccgttgctaccctcctctcccccctcccctttccgattcccccactttccgcgagctcctcctctccttttgcccgcaccatcaccaccaccaccgcctccagattcccctccggctttccctccgcctgtcggatctcccccccgccggcgagctcgcctcgccgtggtggcgcgccggtaagccttttgggggtaaagaaggtgcctgacaccaccttgtggtcatcaatttgtctgcttctagctccattgccagtgcattgcggaagctgggggttctatatgggttgttaagaaaatcgtgcgctacacatgttaatctgattggcagaatatggtaattatcagcttgaataacaccgtgattagtacctagccaattagacataccacaaattatttcatattcaatatgccaccatggtgggggaagtctttctcaaaagatgctaagaaaaccacaaaagaaaacctcatcgatacatttcatcggttgataagtccaaatgatcaaaagggaagcacgaagtcgaaacggagttgtagacgtggcaatgattcatctgttgaaaaaagctgccgatctaccacagtgtcacgtcctacttcaccgtcaaaagaagtttctcgctgccaaagcttttcagctgatagaccacatgcccatcccctccctattcctggagtacgtcctccagtgactcggactgtttctgatatcactgaatcaaagcccatattggaaaaacgtggcaagccaccactgcttctaccactccctaaacccaaccggcctccgaggaggcatggaaatagtgaggttttttcagaaatagtggttgcttctccctctagtaactgttctgatagtgatgatcatggggattctcagcttcagagtcctgttggaaatgatgccgaaaatgcaacacttgttactttaaagaacaagtcaagtaatgcgcgcaaagaatgtcctggacctattacggcaaagaatatgaaggagatacacagaccagctaatcaagtacatggtagccatatattatccacatcaccaaggggtgtcgcagctgacagttaccaatccaatttacaaaatccccgcccattagttctggatagtgctcccaatagtttgatgtcaagtccttctagaagtccaagaagaatatgtcctgatcatattccaacttcggccttttgggcagtgaaacctcacacagatgtaacttttgttggatctggtcaatgttccagtccaggttcagggcaaacatctgggcataattctgtgggtggtgatatgctagcccagctcttttggcagcccagcagaagtagcccagagtgttcaccaattccaagtccaagaatgacaagtcctggccctagttcgagggtgcatagtggaagtgtttcaccattgcatccaaggtctggagggatggcccctgaatctccaacaaaccgtcatgatgatgggaagaagaagcaaactcacaaacttcccataccaccactgagcatctctcacagttcatttcatccaaataactccactccaactagtcctatttcagtacctcgcagccctggtagaactgagaatccaccaagtcctgggtcacgatggaagaaggggaagctaattggccgtggaacatttggtcatgtatatgttggctttaacagtgatagtggtgaaatgtgtgcgatgaaagaagttaccctattcttggatgatcctaaatcaaaggaaagtgcaaagcagttggggcaggaaatatcactattgagccgcctacagcatccaaatatcgtacaatactatggatcagaaacggttgatgataagctttatatatacttggagtatgtatctggtggatctatccataaacttctacaagagtatggacagcttggtgaacaagcaatacgcagctacacacagcagatactttcagggttggcttatttgcatgcgaagaatacagtccatagggatattaaaggtgcaaatatactagtagatcctagtggtcgtgttaagcttgcagattttggaatggcaaaacatatcaatgggcagcagtgtcctttctcctttaagggtagtccatattggatggctccagaggttataaaaaactcaaatgggtgcaacctagctgttgacatatggagtttgggatgcactgtcctggagatggctacatcgaaaccgccatggagccagtatgaagggattgctgcaatgttcaagatcggaaatagcaaggaacttccaccaataccagatcacctttcagagccaggcaaggacttcatcagaaagtgcctgcaacgtgatccttctcaacgtcccactgcaatggagcttttgcagcacccatttgttcaaaaagcagtatcactagagaaatctgttctttctgaaccattggaacatttggctgttatatcttgtagatcgagcgccaagatggctgcgcatacaagaaatatttcctcattgggattggagggtcagacaatttaccagagaagaggtgcaaaattttcttcaaaacacagtgatatccgtatacgaagcaatatatcttgtccagtttctccatgtggaagtcctttgctaaaatcaaggtccccacaacattccaatggcagaatgtcaccttctcctatttcaagccccagaactacttcaggcacctccacgcctctgtctggtggtaatggtgctattccttttaaccatctgaagcaatcaacctacagcaacgagggatttgcaatcccatcaagaagcccggatgatctctttgccagccggcctacagatcctgatcttgggcaatttattcgagtgcatcaagtctctcaggggcttcaggagagggtggtatctgaagctgacattctaagccctcagtttggaaagagacttggaaatgtttttgatttgcgtgataagctgtcaccatctgaacgtttcacacatcatgcctttgtggatcatgtgaaactaaatccttcattagacttgacgtctggatctccacaccttggactcaagcatggtaactaatatcaagaatcagtattcagatggcattttttggagcttcgaaaggtaactggtggtttggctgctttttagccatccgatggcttgaagtgtatcatagtatgaggaaaagaaaatcactaatgtctgtagaagctaaagttggcaatggatggaatctttgttgtcatcaacacaattcaagttggcaaagatatcgtccattcctgttaggcagaactcccggaagcatactacaattggcgtactaacatctgtcaaatgacaagactgtatattggtaccctacagattgaaggacctccgaagtagtagttcgccgcatgtatactcctcttgcctttatatgtaacttaattttctattttcttcttggcgtcctgatgccattgtacagaggaacctcaactaagagccaagattttgcacaggagaaacagtccagccattcagtatcctctctcacacaatatctcacctgaggttgaaactactgctgcaagtcaaactgcatactgaaagtattttgtagcagaactcagccaatgagccaacttattcactgtaccagttactctggaaatttatacaaagaatcagatccttggttaaactagcttctcccgcatgtacatgttcttcagatctgcaccgtgagctatctataagactataaccattacc

SEQ ID NO: 14875 - DNA, 1348 bp, Oryza sativa
  ref <308>: DATABASE ACCESSION NUMBER: AK065414
  ref <309>: DATABASE ENTRY DATE: 2001-12-06
gaacatttggctaaaaaattttcgagccaaaaactttaccaaaatcctccgaaattcctgcgtctttcagctcggatcaggcattcaggcccttctccccgccaggatcggtggatggagatcatcaacgggccggttctcccgcgctatgctgctccggcgaccggcgccctgacctccgacgcgaagatcagcgggcagctgcttaggcgcgtgcacctgaggagacgagcctgtgggttgcagggagaccactaccgggcggcgcgcaggttcttcggtttcccgtccgagcggcatgcgcgaagcggctgggtctggcctgtttgttgcagttacggctcgtcttccgacggggacggcgccgctgccgcggattacgacgccagcggcgaggagttcgtcaactccagcgtgatggaggctgttgagctcagaagtgtatctgatggatttgtgattaaaatgcgtgatggcaaaaaccttagatgtgtccaaaacaacccgcgggtattaagattgcgggattctgcacctcaccatgctattgttctgaagatggaagatggaagtgatcttttgcttccaattatcgtcatggaaacaccaagtattatgttgctggctgcccttcggaacattcgaattccaaggccaactatttataatgtggtaaaggagatgaccgaaaggatgggatatgcggtacgtttggtgcggattacagaaatggtccatgatgcatactattctcgattgtatcttgctaagattggcaatgaagaggagactattagcttagatctcaagccatcagatgccatcaacattgctttccggtgtaaggttcctatacaagtgaataggcgtatagcgtataacaatggattgaaagttgtacaaccaacaccatctgagagctatgtaagctcagaccaattccaatacacaagacttgacaggcctgacgatcaaccttgctttgaggcccaagagtttgatttggtccgcaatatgctggtcgctgctgttgaggaacgctacaaagatgctgctcaatacagagatcagcttttcatgttccgggcaaagaaaaagaacatgatttaacagttcctgaagggaggtgtacatactagtcccgcctgaagtgcataaagccaaacatcaagaagaactttgtaaatacttacagaagaacctatacatagatacatatacatactagaacatgattttgggtgctttcaattcgtggtggcgttggtagtaaaattgactcaaaaggtgcccatgtttgtcactcacgattgattttagcaaaacgttaagcaaattgctttacacg

SEQ ID NO: 14876 - DNA, 4011 bp, Oryza sativa
  ref <308>: DATABASE ACCESSION NUMBER: AK065415
  ref <309>: DATABASE ENTRY DATE: 2001-12-06
gatcttcttatctcccgcgtctcctcctctgcagcctgcagcccgttcagctcggcggcggcggcggcggtcgccggagaggaggaggtggtgccgggatggtgagcttggccgcctactccccttgctccaccgtggctggcgtgcccaagaacaagggcaacggcgccgcctccagcacacacaaggtcagctcaatcctcttactcctccctgcaatcgaatccaaacccacgcacgggagagggagcgccgcctgctattgttcccatcccgacgcagttcgagcatcctacccaccgtcgcatccctccccgaggcgcagggcctccgctagccgccggcggcgccaccatcgccaaccaagggtcgcagcgtcgctgccgctgagcatagggactccgccagtcgccggttgtttcatctcgtccaccgggcgcaacgtcttcaggaatcaccggccgcgaggcccaacgccattagtacgccatatctggttcttccccatttaagtcttgattgattttcttgtgggttttcccttctcatcttagtacaagtgttatctcttctcctagatccgatgggcgatgagttagttctgaaattgaatgcttaagtggcagtgcatctctagcacatacatactactggatactgcttgcggctatgtggctgcagtctgtagattcactagtgaccaggcatgggagcacaatatccataggagcttcatggttagcctcatctcctgagatagcagacagattataggctgatctgagatagtactaaaagattttggtgtattgatcattttttgactactggtgtattgatcaattgatatcatgccatatgactatctatctctattcacagtcttgtagttattaagtacataattaataattaaaattcatgtattcgctctatatctttttattattttaaatataaatagacgtatccccatatcggtgtttttaagaacgtgttgtatcctcatatcgtgtatccgtattcgtatccccgtatttgggtaacgtagtggagtggagtgctcacaagctgtttgtagaattgctcatgagctcggagctctaataacgatgaacccatagatctattattatttatttcgttattgctagaatggctatttatgaattagaaaggatccagtcggcagtaacctgtgctttataaaatggccccaagcattccaataaaatcaggttctctgctgaagctatgagtctattaccactcccttccaagcacacttaatgtatatatgctcatgtgcattacttagctgtgcaacatgtgaagattttgttgtcttccttccatgaatttctcacacaatgcagccaagctcctttgtaccatacacattgttttatataagctttaacttgtctgaaggctgctgcctttgtttttttttcgtctgctttaccaacacaggccatggttagtaagttaaactatctactttgcagcttttgatcactgattaatgaagtgcatggcattcttggtccttctattatatgcaatgacgcgcatctgttatcccgtaggaatcaatcatgcggcatgttgtagtacaatgtgccacttcatgggacactccaagaacgtctactactaatggttcacatgctgaaccttcagcagttgtcaaagctggtactgcccctctgattcaggcactgaaatcaactgcaaatcaagatgtttcttgctttcactttcctggacataatagagggaaagcttctcctccttcattgtcagaacttattggctcaaggacatttttgcatgacttacctgagctacctgagcttgatgatctcttctcccctaaaggtgtgattttagatgctcagaagcgagcagctgaactatttggatcatttaaaacatggttcctggtcaatggaagtacatgtggaatccaggcctcagtgatggctacctgttcccctggtgactacctcatcatacctcgaaattgtcatatttcagtgatctctgcactggttttgtctggtgctgtgcccaaatatatagtacctgagtacaattccgggtgggacattgctgggggtattaccccatcgcaggtggataaagtggttaaggaactggaggaggacagaaagaaggtaggtgctgttcttgttacatcaccaacctatcatggcatatgcagcaatatacaaggaattgtcaatgtttgccacctgcaaggcattcctgttatagttgacgaggcgcatggtgcccatttcaggtttcacagaaattttccaagcagcgcaactgagcaaggtgccgacttggttgtgcaatccacacacaaggttctgtgctcgcttacacagtcctcaatgcttcacatggctggagatcttgtggatgcagataaagtaagccaatgcctccaattgctccagagctcaagcccaagttaccttctactctcttctttggatgccgcaagggctcagctgagtgagaatgcagaatcttttgatgaaccagtatctatggctttagaaacaaaacatcagctgaggattatcccaggaatatctgttttggacttatcaagctttctttctgattttcctgctattgatcccttgcgtatcacattaagtgcttcagatctgcaattatctggatatgaagcagatgattttttagctgaggagcatcaaattgtatctgagctggtcggtacacaggccgtgacatttgcagtcaacttagggaccagaaggcatgatgttcagaggcttgtacattctgtaaagcatctgtcagaaaaatacttctctgaaaatgggtccagttccagaaaagagaatcctgctagtagcccactggacaagttctccatcaagttgacaccaagggaggccttctttttaaagaagaggagagtgtccatcgaggatagccttggtgagatttgtggtgagcttatctgcccttatccaccaggtatcccggtgctgatcccaggtgagatagtaacgcaggattcactgtcatacttgatggatgtcagggacaacggcatagcaatcagtggagcagctgatggtgagctcaagtccattatggtatgcaacgtgtgaactgatgactctgctattgtttcaagatatctctcagaaccacagatatgaacaacaatcacgtaaaagatgggactggtcacttggccaaatgatcgcatcacatttcgtgttctgagaaggaaaatattagttgtcaagctgcaacatggaaccaaaatatgaatatggtctatggcatgtgatctatcatctatgtgagtatgaagtatggagcacgaaccacagaagcggcaacctttcgtctgaagtgccttggaatctttcctctccagaacggaagcggaagcctcaatctgaacatagcatcaggtacaagtttgcacacctgcatggttctccagaagcatgttgagaggttgatcgatcaaggaatctagctgctcttgtaagtttcaacatcaactcaagaattcacgagtgttctacagcgtgtaccgaaagaatcagcttatagcacatcattgcagtgaccatttatatattcatttctagtactagaagtctagaacagctaaatacaaagcaatacttgcaaattaaagaccactcaaacctggtgctcaggggttgagggcatgatactaaagtagcagatttagttgctagaattaatttagtgcttaatccacttataaattgcaatcaccaaccaagaagtaatgtggtgatgatgcagttaggtttgtcacgggttggctttttgccagaagtgagctcaccataaacaagaaggacttgagagctaactctgtgcccccactgtactgtttgttttgctctcaatcatgtaatcacagaaaaactattttttggactgattgatctcatgtaatccaaacttactgtg

SEQ ID NO: 14877 - DNA, 1377 bp, Oryza sativa
  ref <308>: DATABASE ACCESSION NUMBER: AK065416
  ref <309>: DATABASE ENTRY DATE: 2001-12-06
gggcgcccgcgacacgtacgacggcgacggcagcggcggccatgtcgtcggacgacacgacgccgacgccgctggggcggaggacgaagccgaagccgccgatgtcccgcctgatgcggctgtccctcaaggccgtcgactgggccaccgacgccacgcgccgcgccgacggcacgctcaaccgcctcgcgctgtccgtcctcgacccgcgcgtcccggccttctcctccccgtgccgcggcgtcgcctcccgcgacgtcctcgtccacccgcccacccgcctccgcgcgcgcctcttctacccctccgccgccgccggcaaggacgagcggcctcctcctcctcgccctctccccgtcatcgtcttcttccacggcggcgggttcgcgttcctctccgcggcgtccgcggcgtacgacgccgcgtgcaggcgtatcgcgcggtacgcgtccgccgcggtgctgtccgtcgactaccgccgcgcgccggagcaccgctgcccggcggcgtacgacgacgggatcgccgcgctgcgctacctcgacgaccccaagaatcaccacggcggcggcggcggaggcgtcccgccgctcgacgccgcccgatgctacctcggcggcgacagcgcgggggggaacatcgcgcaccacgtcgcccgccgctacgcctgcgacgccgccgccttcgagaacgtccgcgtcgccggcctcgtcgccatccagcccttcttcggcggcgaggagaggacggactcggagctccgcctcgacggcgcgcccatcgtgaccgtctcccgcaccgactggatgtggcgcgcgttcctccccgacggctgcgaccgcacccacgaggcggccaacttcgccgccccgtccgccgcccccggcgtcgactccccggcgttcccgccggtgctcctcgccatcggcggctacgacccgctccaggactggcagaggcggtacgccgagatgctgcggggcaagggcaaggacgtgagggtgttcgagtaccccaacgccatccacgccttctacgtcttcccggcgttcgacgacggccgcgacctcatgatacgcatcgccgagttcgtcgccgagagcgccgccgccgcagccgctgccagcggcggtggcagcgagtgaccgggccacggagcagcaaggtgttcgtccgcgtgtcagcgtcgacgtggcgtgcgtggcggtggcgccgacttgtttggctgggttagcgtgtgtctatgataagcagtgcagtgtatagtctcttggtgatgtaattttttcgaggtttaggtgtggtttgcttgagtgattaagtaagaaatagttaaattaatgtggacgataattatatattagtattacttttgct

SEQ ID NO: 14878 - DNA, 2847 bp, Oryza sativa
  ref <308>: DATABASE ACCESSION NUMBER: AK065417
  ref <309>: DATABASE ENTRY DATE: 2001-12-06
ggtttgcttcgcctcggccccttccccgtcctcctcctcctcctcctcctccgccgccgccgccgccgacgacgacgaggtctaccctccgctgaccacgatgatgaaggacaagatgaaggatctcacgaggaaggtcacctccgcctcctcctcctcctcatcctcctcctccaagggcaccgcccacatcctcggctccggccccgacctctcctcctcccgcacctcaaaccctagccctagtcgccccgctgccccccaggcgagaggccgccgtcctccggctccggctcatctccacctcctcccgccgcgccagcgccaccaccgaccctcccgcgtcgggggaggggaacgacgacgccgccgtcgcgtgccccagctgcgcagagccgttcccctccgagctggcggtgtctgaccacctcgacggctgcctcgcggcggcagggggagcccggccccgctcagccgcgtacctggccggctggccggcgatgcccccgcgtccgctgtggaggtggtgaagaggctgctcgggaacctgctctccgatccccggaacgacaagtacaggaaggtcaggctcgggaacccgaggatcaaggaggccgtggcggacagggagtgcggggtggatctcctcgaggccgtggggttcagggtcgccgacaagggcggggagctcttcgccgtcatggacgaggtgcccggagacgcgaggctcggctggatcaggcaagccgtgctcctgctccagagggcccggccttcaacgccgccgccgaagcaggcagatgccaaggggactcgcccggatggagttggcgaacagcagggggttaagaggccggttgatcaccagattcgggtgttcttctctgttgctgcaagttctgttgcagaaaatgatctaccagattatttctatagccttagtaatgaggagataaggaatgaggcaaagatgaggagggggaggctagaacaatcttggttgctgattccaaagtcatataaggagaagcaggcactggctgcccgacagaagtataaacaagctctgattcgtattccgtttcctgatggagtaattctacagggtgtgttccttcccacagagcccattagttccctatatgaggtatcttaactcccttgccttatcttcaacgcgttttctcattttggtttgcttagtaccttctttgaccctgtcaattcagcatatattgatggcttaatctttggtatcattgaagcaaatcttggcacgtacacttagcatctacttttcaatttttactatttattagttgcaattgccatgctcaattaaagagtagttaacctggtagcatttgtagaactggcctaccaatgaaagcagtgcatgagtcatgataagtctaaagtatcaattgtttgagttcagacttcagaggggatatccagtagatacacagaatttgttctttttatcttggattgctcttatcctcaagagtaacacgtgacaaaatacaggattaagtgttagtcttgtctcaaaacgattttccctggtagaagatagttatgaagttagacggtgtcctggttttaaccctgaacactacataatctattcacacaagatctcgagatttttttttctgacaattgagcccatcctattcagagtacagataaatggctaagataagttcactgaccttattgtttccactgttccacaagccccagcgctatagatgtccttaatgctgctgtgaaaatgaacagaatacatgggtgccaattaaacatcacctaataacacattggctagcctccaagtcatgtatcgacagtggattcacatgccattggatggatctctgtgtgtatttgtcagtgcttgtcttggcatagaaacaagtctttcctcgcgcaaatgctcctgatgcatgacgctcagcactgtacttcttaatccttattagcagtattacagcttcagggttgatacgagtaaccttcagcggtattagcacacgactgtataaggtacagtacaatatactgaatggatagcctcattatacatgtttattctagctatcaatttccattgtgcatctcgcatatagcatttctttatttgttcatgtgctttatctgtgtttttttattacttgtgctactcattttttttctctccacagtcctaaagtggtatccatgccatttactggttttgtggcacttggcttatttgttattttcgtaatgtagtttgccgcatctgctttgaagcagccaagtttggaattcgatcttatctgtccagctggtcctaggacacgtgtcacacctccttttccacaaccaggggagcgggcacacacactgctggatgaagacctagtcccttctgctcggcttaccttcaagcctaaatagactgattcggttgtgttcactggtctgttggacgagcttcttgaggccagcgagccgtttacatctgcatcctcatgaactgtgaatactgccggcaattatttcgtggctgctgacttccattgtgtaaaacagatatccgaatgctctgttacatggctgtaatttgacacagggctattgaaggctggatacctgatatgtgatacatgtaattgcttggcaattgccaaatgccaaaccatacggtagaagaggccagcaattcatcaggcctaggtctacattcttctgtaacttgtgcgatgagtaggatctgctatgtacaaaaacaacagatggaaaccatctcttagtttcatgttcgctgttgtgattctcaatatagctactcctatc

SEQ ID NO: 14879 - DNA, 1252 bp, Oryza sativa
  ref <308>: DATABASE ACCESSION NUMBER: AK065418
  ref <309>: DATABASE ENTRY DATE: 2001-12-06
gattccccatctcttccaccatctctcctctccctccccacaagaaaaacctcgcgcgaacaatgtacagccctctcggcagcggctgcgcgttcgcggccgcggccagctccgcgttcccgccggccaccgtccccggcgggatattcgcggggaggaggaggaggaggccggcgaggctggttcttgcgtgggcgagctcggatggctcggacggtggtggtgccgccgctggtgcagtggcggccgaggcttccgctgtgggagagagcaaagaaggggaggtggccagtggcggaggttcttccgctgagtcgtcggcggagaagaagccggctcctgttgatcccaagattgagaaggagctcaagaaggcagttcagaagaccgcagcaacgtttgcaccaagggcgtccactgccacaaagaaccctgcagtgcctggaacagctctgtacactatctttgaggtccagggatatgcctccatgctgttgggtggagccctttccttcaatctcgtgttcccgtcgaatgagccggacatttggaggctgatgggaatgtggtccatctggatgttcactataccttctcttcgggcccgtgactgctcaagtaaggagaaagaggctctcaactacttgtttctactggtccctctaatcaacgtcattatcccgttcttcgtgaaatccttcgctgttgtctggtcagcagatacggttgcattctttgtgatgtatgcttggaagcttggatggctgcaacggtcagagtgaacaatttcctgaacgaaggagcatttgaactgcaaattttgcctaagtgaattttggagggcacgctacatgcgatgaatttttcctagatttagtttcgtgtacatccatggagtgtaaagaagcttgctatgtagatgtaccttaaattgtcaacattagtgttgactaggaactgggcatctctcaacctgttatggtttcccagtagatcatatatgtctgcgcgctggcatgaaacggttgccaattgcatctgcttcgttcttggggctacaattcgcaactgaatttgctatatatttgtcgacaaattttccaccaaaaatttaacagatgtaattatagtacaatcgtagtgtaattacactgtaacttgcatgtaattacactgtaattataatgtaacatgtatgtaacttttaaaaatctctccataacatttatttcggtaaaatggaggttgtgag

SEQ ID NO: 14880 - DNA, 1699 bp, Oryza sativa
  ref <308>: DATABASE ACCESSION NUMBER: AK065419
  ref <309>: DATABASE ENTRY DATE: 2001-12-06
ggcgagaccagacgaagccatccgatccccacccttcctcccctcccacctcatcagcgctggcggcggcggcggcggcggcggcgtcccctggatccctcggcggaggcagcggcagcggcggcggcggcggtagatcaatcgcatttgtctcgctaaatccggcccgcgccgcccgtcgcgtcgcggtaggtgggtagggggaggtgtgtcgcgtcgcgtcgcgtggtagctgcgctcccttcccgcatccgcggtgcctgtgcgtgccctccacacgatccccccctcccgtcgtgttcgtccgaccgtccggcagatcggcgaggatggaaatgttcttcagcagctttcttaatgaatcggcatcatcagagaacctctttggtcatccaaatgtcgagagatgcccattcctgagaaacatcaatggagctacaacatattcattttcttctgctttgccagtagctgcccgaggaggaaatggtccaatttttgaggacggaccaggctttgattcagcatttaaacttttccatggatgggatggaatagttccgctttcaggaaagtcatatttacctgatgagagcaacagtgagagcattgatgccaatcctgaacctgctctgctgtttaacccattggctgctagagctgccacaataagtctatctgcatttgggccatttggttttaacttctttaatggcaaggggaaaaggcagaacaagaagcccaacaatctaaatcagtcaaacaagaagcccagcaatccgaaccagaattccatgaaacagaaaggaggtaactcatcatcgcacgaggcaatgagcaacgaatggatggaaaatgggcagtgcccacttgcccggtcttaccgagcaatgagtggcattctgccccttgttgcaaaggctttacaaccaccagcaggtgtgaagctgaagtgcccgcctgctgtggtcgctatacgtgcagcccttgcacggactgaacttgtgaagtctctccgtccccagcccctgcctgcaaagatggtagccattgcgttgcttggaatggcagcaaacatccctctcggggtgtggcgtgagcacaccaagaaattctccccgcagtggtttgcagctgtccatgccgctgttccattcatcggaatgctgaggaaatctgtgaacatgcccaagactgccatggcattcaccatagcagcctccattattggccagacaatcgggtcgagggccgagcgcattcgtctgaaggcattggctgcaaagggcgacgccgattccaccaccgtggctgacatgtatccaaacaagtctggcaattgcagtgacactgagggcaaggcatgggatccgctcgcgatgaagatggctggacgggcttctggtggcgttgctgcaccaacaccaagcatgtgtttctgattgttcattgcttttgaaaatttgtgtctataccagtatctctgtatgtttgagagttgatattgagtctatttttatcttgtgatgtaattgcctttccttgcccctcagaagtatccgtttgtttgtggggtgaggcaagtggaataagagtgctgcagttctgcagttaagcttgccagttctgcagttcatgcatctgtaatttgatgctgcaggatttctgctattttaccaatcatcattgtactgtgtgt

SEQ ID NO: 14881 - DNA, 1814 bp, Oryza sativa
  ref <308>: DATABASE ACCESSION NUMBER: AK065420
  ref <309>: DATABASE ENTRY DATE: 2001-12-06
tcttgaccctcaggcaatcccaactacagctgccttgaagagcgccaaaattattgtagaccgtctgctggagcggcaaaaggttgacaatggtggcaagtatcctgagacaattgcacttgtcttgtggggcaccgataacatcaagacctatggtgagtcattggcccaggtgctgtggatgattggtgtgcgcccggttgctgacacctttggccgtgtcaaccgtgtggaacctgtcagccttgaggagcttggacgtcccaggattgacgttgttatcaactgctcgggtgtcttcagagatcttttcatcaaccagatgaatctactggaccgggcagtgaagatggttgccgaactggatgagccagaagagatgaactacgtgcgtaagcatgcacaagagcaggcacgggaacttggcgtttcattaagagaggcggcaacaagggtgttctcaaatgcatcaggctcttactcatcgaatgtgaacttggcagtggagaatgcatcatggactgatgagaggcagctccaggacatgtacctgagtcgcaagtcttttgcatttgattgtgatgctccaggggcaggcatgcgagagcaacgcaagacatttgagcttgctctagcaacagcagatgccacattccagaacctagactcatcagagatttcactaacagatgtgagccactactttgactcagacccgacaaagctggtgcaaggactgcgcaaggatgggcgggcaccttcctcatacatagcagatacaaccacagcaaatgcacaggtgaggacattgtcagagacagtgcgccttgatgcaaggacaaagctactgaaccctaagtggtacgaggggatgatgaaaagtggctacgagggagttagagagattgagaagcggctgacaaatactgttggatggagtgcaacatctggacaggttgacaactgggtttatgaggaggcaaatgccacatttattgaagatgaggctatgaggaagaggctcatggacaccaaccccaattcattcaggaagctagttcagaccttcctagaagccagtggcagaggctactgggagacatcagaggaaaacttggaaaagctcagggagctctactctgaggttgaagacaagattgaaggaattgaccggtaaatttatttgatctatcagatcctgcattcaaccaaggaggagaaatccttctgtctcactgaatctagagttgagacttgtacactttgtataatttataaaaagttgtaacatgacatacacgaggataccgtgttttaacaaagagggtggctgtgaatgaaaatggagcatgggtagaagtacttgaatgaatgaaaatggcgttccccaacttcaccgatgtcgccggcgccgtcgtgctcctcttcctcgccgactcgtcgccagcgccgtccccgcctccacctcctcccactgttaggtactacttccgcgcaacactcccgtttctccattaggtgttcggcgcgacgagtcggcaacggagacggccatccgggcggccgtcggcgacaatgctgggaccagcaaggccctgcgcttgttgctgaagcatggggggtgcttgaggtgtaatgacactggtggccgcagtgatccgtatgtttacatggtatgtgaaacttatgctaactgtttgaattgagacgggaataccaaattcgatgcatgttctgtgttgttgaatgatggtggctcattgttatcttaagagatattcagaatggagtagtattacccttttatagtgtgc

SEQ ID NO: 14882 - DNA, 3791 bp, Oryza sativa
  ref <308>: DATABASE ACCESSION NUMBER: AK065421
  ref <309>: DATABASE ENTRY DATE: 2001-12-06
cccttcgacgcctgactccggtgtgagggctggggtaaggtgcctcgcgcacttgatctcggctggggagaaggcgaactgggaggcagtggagccgctctatggggtggtgctacgtctagcagttgatccccggcctaaggtgaggaagcagtctcattcatgcttgcgagatattctgctcagtttccagaggcaagctgttttggtccctgcgagtgaaggaataacgagatgttttgagcgttttctactgcttgctggtggatccaatgctgtaaacacagatgtagcagaaggcggacctaagggggctaaggaagtcttgtatattctgaatgctttaaaatgctgcctccctcttatgtcatcaaaaccttccaataccatcataaaatattttaaagctctgttggatctgcaccaaccaatcttgacacggagcatattggagactctgcatgctgttggcgacagtccaactgtacagcttaaatctgacgtgctactggatatagtatgctctttggggctatctgtctctgttgaaagaaaatcaggggatgaaatggcttcaattgcaaggcttctaaatgttgctactagaaaaatttataatcagaataagaacatatgtgttgtaaagcttccactagtatttacttcacttggagatatattggcaagtgaatttgaagaagcaagattttctgctgtggaggctttcaaaagtttaatagaagactgcatcgatgaaagcatgatcttacagggaattacccagattaagtctagacatccagggataagatctgatcccacaaccatagagaagatatgtgctatcctagagggcttgctaaatgtccggtacggtgatgtctgggacaaatcatttcatgtgatttcaatggcatttgacaaattgggagaatcgtcagctgaccttttgcctgaagcacttaagaacttggcagacatgcaaaacttgtcagacgatgacttctctttccggaagcagcttgattcatgtcttggttcagctgttgctgctatgggaccaaagaacgttcttaaaatcctgcagattcattcaatatctgatgaaaatgaatggatcttccccattttagaaaagcacattgttggtgccagtttacaatttttcttaacagatattcgggacattattagagctgtagagaagaacattccaaagcttttaaaggaagataagcttttctccgccaagagagcagaaggttatgtgtattcactatggtctttgttaccatcgtgctgcaattatgcacgtgatacctcaatccactttagagctctgcagaatgttttgtgcgacacgcttaaaaaccagcttgacttgcgtggtatcatttgttctagtattcaggttttgattaaacaaaacaaggaagcattgtcagttcctgttgaagaggccatacttgctgaggatgaaataagcaaatctgaaagaagagcaaaagaacgctatacgaaagagtttgcagaggaaaacttaaaagcaatacgggctttctcttcaaagtttttggaagttctatgttctatattcttagcttcttcaaatgatgctattggacttctacagcctgcaataagtgatatagcttccatatcagagaaagacactgttggcaggttctttcttgatgcaataaggaagttgttggatgccacaaaagctgttaatgcagaacaaaagaatgatagttcaatgcaaatcgaagctaattccaacacaaataacatggcaagggctctcctgttggactttgcagcttcattaatgcctggtttagctgcaaaatcgatcaatgtgctattcagttatgtaaaacctgcaattaaggatactgactcattgattcaaaagagagcatacaaggtcctttcaatgctgctcaaggatactgagtttattgagcggaatttggataccttgttgggcttgatgatttcttctttgccatgccaatttccatcaaagcgctacaggcttgaatgcctgcatcaccttattgtttacattttgaaggattcatctaagcttggaaagagggaaattattggttcattcctgactgaaatacttcttgccttaaaggaggctaacaagaagacaagaaacagagcttatgatctacttattgaaattggacgtgcttgtgaagatgcagaaaatgacgggaggaaggagaatttgcaccagttctttggcatggttgctggtggtcttgctggtcaaactccatatgcgattagtgcttctgtaactgggttagctcggttaacttatgagttctctgagcttattggagtagcatacaagctcctcccatcaacttttcttctcatgcagaggaacaaccgagagattgtcaaagccaacttaggttttatcaaagctttggtggctaaatctaaagccgatgtattgcacgagcatttgaaaggagttgtcgagggtttgctgagctggcaaactgatacaaagaattccttcaaagcgaagataaagtcactgatggaaattctagtgaaaaaatgtggtttggatgctgtgaaggctgtgatgcctgaagaacatataaaattgctgaccaacattaggaagattaatgagcgaaaaatgcggaaatataaatcttctgaggatggggaaacatgtcgatgacctcacgagctacaagacaaagtagatggaatcacacacagatgttttctgattttggaagtgatgaggatgactccaatggtcccttttctgcccaacatacagttgcttctcgtactggaacaaaagcttcaacacggtcgaccaggaagcgccaagcagataagagcttgctagagaagttcattgatcagtcaactggcgagcccctagatttacttgaccagaaaacagtgcggttggctctcaaatcgacgaaaaagagggctatgcctgatgaagatgatgatgaggtggagatggaccctgaagggcgtatcattgtgcgggaagagcgggagaggcgcaaaaagaagcagcctatctcccgagacgacgaggccgacgacaggagcatggtccgaagccagtccgtcaagaggaggaagacgaccagctccggctgggcctacactggccatgactacaccagcaagaaggccagtggcgatctcaagaagaaagacaagatggatccgtatgcctactggccattagacaggaagcttctgaaccgcaggtcggaccgcaaagcggcggcacgcaagggcatgagcagtgtcatgaaggtgaccaagaagctcgaagggaagagcgccgccagcgcgctcgctgctaagagaacgcaaacaaaaaaccggaagcagaagaagagcaagtaaggagacgaagggacagagagagatagggcaaggaagctttgtatagctgaaccgatggcccttggcagttgggagggaaagttttggacgtgtacagtgcttggtgaggattcggccgtagtagttgtttttgctcgtttcatctcctatctgtcgaagagaaacactaggttccattcttgccaaaaagggagattttttgaggggaaaaagggggaaattttgacacccgtcggtatgacggtaccagattcagattagatttaattttcttgtaagtttttgattgatgactattgaatttgaaatttgttgcttcctgcccgctgacacttcgctgtaatggaagatgagctgtagcgaaatttccg

SEQ ID NO: 14883 - DNA, 1811 bp, Oryza sativa
  ref <308>: DATABASE ACCESSION NUMBER: AK065422
  ref <309>: DATABASE ENTRY DATE: 2001-12-06
ggcgcgctttccgcccgcgcgatgactccgccgctcgaatccctccgcctcctcactcctcctcgctccgcggctccgcccaaatccccgctaccgccgccggtacgcccttgcccctcgctcatcgccacgatctgctccgccggtgccgccacactcacgcgccccttctcttgcgaatattctcacgcaccccctcgcccatcgcccatcgccgcggtccccaatcccccgatgctgcctctgccctcctctgtctcgaactcacccgacgctgccgatcagctaatgctccaccgccgatgcccgacgaattcccatctgccgcgaggacccgtcgaagcgaattccgtcgcggtacgagcggatggcaattatggggatgataatgagaaattgagccttattaagctagctagcatgattgaggtatctgcgaagaaaggtgctcgggatcttaaccttcaaggcaaactcatggcgcagattgagtggctacctgattcaattggaaagctcactgggctagttacccttgatatttcggaaaaccggctgctggctttgccagacgcaatcgggaagctcttttctttggccaagcttgatattcatgctaatcgaatcagtcagctccctgaatcaattggggatctccgcagcttgatttacctcaacatgagaggtaatcagctctcgtcattgccttctagcattggcaggctgttaaatcttgaggagcttgatgtgggttccaacgggctttcgtcactccctgattcaataggaagccttacacgactgaagaagctaattgtcgagacaaacgaccttgatgagttgccttacaccattggtcactgtgtttcactggttgaactgcaggcaggttataatcacctaaaggctcttcctgaggcggttggaaagctagagcctctagagatcctctccgtgagatataacaatctcaggagccttccaactacaatggcctctctcactaaactgaaggaggtcgatgtgagcttcaacgagctcgagtcaatccctgagaacttctgctttgctacctctctcattaaactgaacgttgggaacaattttgctgacctacaatatctgcctcgctctattggcaaccttgagatgctgggagagttggatatgagcaacaatcagattagggttcttccggattcttttggaaacctaaagcatctccgtgtgctccgtgcagaagagaaccctttacaagtgccaccaagggatatagctttaaagggagctcaggctgtcgttcaatacatgtctgatgcttccaagagaactacaaagtcagagccaatgaagccaaagaagacctgggtccacttttgctttttctccaggcctaacaaaagaaagcatgaccggatagacaatgcaacatgatatatggaggctaggatacaagatgtcgcatagcttaaccttctgctcatgacttggggcttcttcagtacagtcagccttcagaatatggtggtttagctctgttagcgcgtactctttttgaattcttactgttatgtgcattctggattttggtttttgcaacttgtatttgagtgtaccatcttggcgggtgcaattagaaagcacggcactttgcttatgttgtttcgtttctatatgattttttcttgtagaaatggtgtattgtctttattgaaaggcagaatggagaattcaaagactcctgtggctaattgagcaatgcaactatgcaagcgtgtgttctcctttaataaagagatactgtagaaagg

SEQ ID NO: 14884 - DNA, 2065 bp, Oryza sativa
  ref <308>: DATABASE ACCESSION NUMBER: AK065423
  ref <309>: DATABASE ENTRY DATE: 2001-12-06
ggggtgttatattctgaaaattctccttccactgccaccgcacaagcaagggcaaagcttagcttagcttcgctggtagtggtggtggctgtgccgtccagccgctgccatcttcctcaccagcagcagctagcagcggcgcccttctccggcctctccgtgctttgctgttctttgctttggttcggggatccgatttccattccatccatctcttgctcccgcgggtctcgtctctgtctgtgtttccctgatcattcattactggtcatgtggggcgatcggactcatcacaagcactggaatcaagctcatgttccctctggaacttctaaggacaaattccaggccaaagggcaaccgaagtttattcctgacaattacagttcagtggatgaggttactgctgcgttgagagacgctggtcttgagtcatcaaatctgattcttggtattgacttcaccaaaagcaatgaatggtcaggcagatattcctttggaagaaaatctctgcatgccattagtgccacccctaatccatatgagcaagcaatttctataattgggcgaacactgtctccttttgatgatgacaacttgataccatgttttggatttggtgatgcttctacgcatgatcagtccgtcttcagcttctaccaagacagtcgttcttgctgtggttttgaagaggttcttgaaagatataggcaaattgtcccacatttgaacctttcaggaccgacttcttttgctcctcttatctacgcagcaatttctgttgtcgaaaatagtaacttgcaataccatgtcctcgtcatcatagctgatggacaggtgaccacctcaaatacaaaggatggaaaattaagtccgcaagagcaagcaactatacaagcaattgttgatgcaagctactatcctctttcaattgtgatggttggggtgggagatgggccatgggatgcgatgcaacacttcgatgactgtattcctgacagagcttttgacaattttcagtttgtgaacttcacagagattatgtcaacaagtaaggatatgccaaagaaagaggctgcatttgcccttgcagcccttatggaaataccttctcaatataaagcaactcaaggcctccgaccactggagaagcatgcgggtcatgtggccagtcatctgaggattcttcctcctccaaacaaagttcttgagaacgacaacgctgcagcctcacgtcctccaactgcaagctcccagtcaactggcttcggaaagaataccactgatgagcaggtttgcccaatctgcttaacaaatccaaaggacatggcttttcaatgcggtcacctgacatgcaaggaatgtggcccaactctatcaacatgccccttatgccgcgtgccaattacgatgcgtgtaaggctctactcgtgaggtcatctgaccttctagaatgcaggaacaaaggactcaattcaatcagtatagtgtatatggtgtcgaacagtaaggagatgaagaactcggaagcacaaggactctcaattcatgccaagatgcggatggcgtgaaaactatgtgaaaaaaaaggctaaattaaactatgctggattagtttcagtttcaaaggacaggtatatcctttgggatattgtatttgtttctttttcttgtatgtagtaggaataagctgacctgtgatgcttggcccaaagaacttaccgaaggcagttgcggagatggctttgctgctgcattgttgatcttcagagacaatcctaattgggacgatttcaagtagtgaagtaccaatacatcctttccttttgtcttgcagatcaaattccctgtgactgcaatcgacctgttctaattgcagggatataaaagtgtgaaacaatgggagaaacacacggtaccagtcatcttattctgaaactcgtaatggaggtcgatctgaatggatcagctacgttacgtgctcagctcgttgtaatctattttagcagctgattgtgttatttacttcatcttttcaatttctactccctagtttttggtccct

SEQ ID NO: 14885 - DNA, 3995 bp, Oryza sativa
  ref <308>: DATABASE ACCESSION NUMBER: AK065424
  ref <309>: DATABASE ENTRY DATE: 2001-12-06
gaatcctttcccgaatcatccctctcggaaaaaatccccaaatcgatccgcctctctctctctccccccttctcgccggcggccggcgcggcgcggcgaggcggattcggcggcgatttccttcctagggtttggtcttcctcctcccctccggcctcctctcgcaccgacggcatcgccccctcccttctagatccgcctcgccatcgaaaaccctagacgaccacgagccgccatgaccgtcccccttcccaccacccgccgccgatggcggcatcgacgattacaacctgcgattaccgtcatgtcgtgcggttcgttcgtctccccctccgcggcgacgcctcgagcaggtaatccacggggttggggtacctagggttagcgtttgttcggtgaacggggggcgtccgttgcacggcacgacccgaccactggctcccgcatccatggcgatgacggcgatatctcccgtcagttgcatggtccccttgcacaaacgcccagaccaagttgatctcggaacctaatttacatcagatatcgttgccttgcactgattttagggattagggtaaagtaaaggccttataaatgtatgttcccatgaaatctaaccggacctgttgtttcccattcatgccgttgattgtagggcttgcttgtttaggttaggtgataaaaattagaaaatgcttaaagtaaagcagtagtgatgtatttctttttttttcttttttccaatctggatgttttagagatggattgttttctatttggtttaggttgggtttccttgtattctcttagattcgttgggtttcttatcaacaatgttgtctgttgactgtgttgtttgtgagggatatgggtttcattgttttgttccttgtgggattaaacatactttagataagtaaattgggctgtatttgtacaattggtagcatctgccctttggccttttatttgctactcagtattgtcggcatcatccggtttgtttggaatttattggataagattaatggggtttctgttaggatgcaagtatgtaactgggcttggtcagccaacccacacactgatcattcagttgctttaccctaatatctggctttgttcataaagatgccgtacgatagctataggccatgtgcagagattgagtaggtgggtcatccatcccacttgcatacgtactactaatatgtgtaagagtttcttgtatgatgttactaatagatggctctgaaaatgtacttttttttgtccatatttaatttttcagtgtccttaccagaaatatctctggcctatctctagagctgtattgtctgtggtggtggtcccttcagagttttgtgcaatcggagcatagctatcttcttttacctctaggttgtgttttagcagctgaacaagtgctgtaatcctttctctacttctttctgccccccccccccaaaaaaaaaaaagagagagagagaaagaaaagggaatgtcctatcttgctatgtttctttaagttggttctgttttccttccttccaaatgaaattggttcttgtgaatcaatgtagcgtccctttacacagtattgttttctcccagttgtcttgtctttttatttgacttttcatatatgtaagggaaagaagaaggccttagagaaaaaaacagtagaaaaaggaaaagaagataggggtaagctcatcctagaaccctagttggcttgcagtcaccttcttcctcaccgcaatggctggtgccttatctgctcgtcatggaggctggtgcctggtggagtacgatgcctcttagggcacagaagtatagaacacgtgggtatgaagacctatgttgggctttggtgggctggctgcctggcttagtgggccttttaccaaataccccctttcttcttcctaatttctctaccatgttctccactaatcacgcctcaaccatctcatatggcaaagcaacgccttatgcctcagcgctatggcgctaaggcagtggtgggtcgcgttaaactgccttaacaacactggtttcatatatgtaaattgggttgtacttgcactgaccttttcttttgcaccctgttgccttgcataaatttgttggtacatggctgatgttttactcactgttttgttaagattttacagtttgtttggaattttgttaattggtgggatttttgttgggatgcaaccgggcttggtctaccaacccagataccaatcctttgcttgctttaccactaatattgagtattgttcagaaaggcgctgtgtgagctgggtttctgcctaggagctaggttacctgttaatacttgtgcagcaggcgggaggatgccgcctagcgcctaccattgccctagtatgctgggtggaaccttgtcactggttataggtccatgtgcagaaagtgcggtaggtgggtcagtctacttgcatacctactttgcctcgtatgtttgtaagagtttcttggatgttctatcttgcttatctgtactgcatatagtctgccccgaaaaagaagatttttctgttgatatttgttatcctccataattaacttctcagtgcccttatcatagaattatctccagggaatgccctacgttgtttgctcttgtagttggttttgtttgcctcccttcatatgaaaattggttgttgtgaaccaatgtaaccctttacatccagacgtcttttttgtttgttttcccgtggtgctgacttttgtttttagttctatgaagctgagttatcttgttcctatttggtgtattagaataacgctcttttcacatgtttggtggacaggtggagtttatgttattcatacatgcaagttatgtcaatgacacctaactggtttagtttagatccttgtgtctcattgtctcctttgcaagacagaagttctatttgattaaagcaatgctgcaatgtatgttgattgtgaggcaatgactgaaaaggatgattatgagagcaatactgaatcacctgtctgtttgtattagtatgtgagtgtgacaataatattaatggcaactatatccttcgtcattagctggaagaacattttttttgttttaaaaagcaaatatagctcgtgtgatagtactttttatcggtctggttaccaatttgtagtcatgtgccctcatgctttcatgttttgggactgtgttgattgctgttaggagccttcaaaagctgcatggtgttgtatttattttactaatttgccaatttgcatgtcttggtgagtattcaggtgctttctttatgactgatgatgccttccccatcttttcttttgctatttattggctagcttaatccagagtcttattctgctgtagcttttggggattaagttagtttttagtcgcatgtagtggaattgattgtcttgtttcagcaagcaagataaatttccactcttccaactgtattatttattgcaagcaagataaatttccactcctccaactgtattatttatctttatgtagagctcgccccctgattctcgagcgatgatcttctctcctgaaccactgaccatcacttagcccaacccacaacaaatctgctttgttctttcgcacttacgactggttacgttagttgtgcaggtgtgatgtctggtatatgaccagaagttgctctgtgtgtttgtagtagggatttgaaccgtgccttcttgtttaaatgtcattttattgctttcatggatgatcctaggtatcattcaccttcatcagaacggaatttgcagttatgctagctcttatatgattccatctatacaagtgtatgctgtgtattcttagtattgagcgttcagaacttgctgttccttttaagctcagtttgtatttatatgttgttccttttaagctcagtgtgtatttatatgatttgattagtgaatgtgtcattttgaccacttttctctcg

SEQ ID NO: 14886 - DNA, 3367 bp, Oryza sativa
  ref <308>: DATABASE ACCESSION NUMBER: AK098929
  ref <309>: DATABASE ENTRY DATE: 2002-08-28
gggccggccgcaacgacctccatccaccacctcccttctccaccttccacgccccttctagaagcttcgggaagaggcccatgggcgcctccgccgcccgcctcgcggcgctgctcctgctcctcctcgccgccgccgctgccgtcggggagtgcgtgtacatcccctacaacacgtcggcgggggtggtgggggggaagctcaacgtgcacgtggtgccgcacacccacgacgacgtcgggtggctcaagaccgtcgaccagtactacgtcggatccaacaactccatccagggggcgtgcgtgcagaatgtgctggattcgctcgtgccagcgctgctcaaggatgagaaccgcaagttcgtctatgttgagcaggcattcttccagagatggtggagacagcagagcgacatgattaaggatatagtgaaggggctcatcagcactggacgattggaattaataaacgggggaatgtgcatgcatgatgaagcgaccgtgcactacattgacatgatagaccagactacgctcgggcacaggttcatcaaggaggagtttggtcagattccaaggattggttggcagattgatccgtttgggcactccgcagttcaggcttacctcctaggcacagaagtaggattcgatgctttttattttttccggattgattaccaagaccgtgacacacggaagggaacaaaagagctcgaggttgtgtggaggggctccaagaccttcggctcatcagctgacatctttgctggcatcttcccaaaaaattatgaaccacctcctggtcagttttacttcgaagttgatgatacttccccaatcgtccaggatgatccccttctttttgattataatgtggagcaacgggtggatgactttgttgctgcagctatagcacaggcaaatattacaaggacaaatcacgttatgtttacaatgggcacagacttcaaatatcaatatgcagaaagttggttcagacagatggacaaattaattcactacgttaataaggatggccgtgtcaatgctctgtattccacaccttcgatttatactgatgcaaaacatgctgaaaatgtgccatggcctctcaagactaatgattttttcccgtatgcagacaacccaaatgcatattggacaggctacttcacaagcagacctgccttaaaacgatacgttcgtgttatgagtggatattacttggcagctaggcagttggaattctttaaagggagaagcaactctgatctcacaacagatagtttagctgatgctctagctcttgctcagcaccatgatgctgttacaggaacggagaagcaacatgtcgcaaatgactatgcaaagagattatcaattggctatacacaagccgagaagctggtttcatcctctctctcttgcttgagccagtcaggctcaaaatcacattgtccgtcccaaacaacgaattttgaacagtgtccgctcctaaatattacatattgccccccttccgagatggacctttctcaagggaaaagtttggttgtgcttgtgtacaactctcttgggtggaaacgggaggatgtccttcgcataccggtcatcagtgactcaattgttgttcatgattctgagggaagagaagttgaatcacaacttctgcctatagctaatgcatctttgtacatgcgggagaaacatgtcaaggcttacctaggcatgttaccagctgcaaaacccaagttttggcttgcttttccagtttctgtaccacctcttggtttcaatacgtactttatatcaagcgggaagaaatcagcatcagtctctttgatgtccactctgcactcatctcaaggaagtgaaaatagtaacatgcaaattgggcaaggacagttgaaacttcaatacaatgcagctggagcattatctctgtactccaatagtaagacacaggttgaagcaaattttgagcagaagtacaagtattacataggacaggatggaaatggaagtgatcctcaggcttctggagcatacatatttcgccctaatggcacagttcctatcaagactgatggacaggttcctctgacagttctccgtgggtccatattggacgaagtgcatcagcagattaatccatggatatatcagatcaacagagtttacaaaggaaaggactatgtggagactgaatttatagttggaccaataccagtggatgatggaaatggaaaagaactatccactgaagtcgttacaaacatggcaacaaacaaaacattttacactgattccagtggacgtgacttcatcaaaaggatacgggattaccggtcagagtggaggatcgaagtgcaccagcctatcgctggaaactattatcctgttaatcttggcatttatgtggaagatggaagcagagagttatctatacttgtagacaggtctgttggaggtgccagcataaaggatggacagatagagctaatgctacacaggagactacttcatgatgatggtcgtggtgttgcagaggcattaaatgaaacaacctgttttgataatcaatgtgaaggactagttattcaaggaaagtattatctcaaaattgatccacaaggtgaaggagctaggtggcggcggacatttggccaggaaatatactcccctcttcttattgcttttgcagagcaggatggaggtaattgggtgaattcacacgttacaaaattctctgcaatggatccggcctacagcttgcctgataatgttgcattgcttactcttcaggaacttgaagacggaactgttcttcttcggttggctcacctatacgaggctggagagcacaaggatctttcagctctagctagcgtcgacctgaagagagtatttccagacaagaagattgtcaagattgttgagacaagcctatcagcgaaccaagaacgttcagccatggagaaaaagaggctgaagtggaaggtggaaggccctcctgctgatgaaaagatcgtccggggaggccccgtagatccttccaagctcgtcgttgatctgggccccatggagatacgcacattcctcatcaatttcgccccgcagtccggcaaacagttgatgtgaggggtgacatggccttggcaccaatgttttatttttagcttgagttcttctcatggtgatgagcaataagaaataatgtggccatggtgattggtgaccgaatgcagagatgcactggtagcatccaaccactgagccctgtttgtagcttgtaaatgaatttggcttcaccttaagttgagctcggtttcagtgaagataagtgactgaaacttttggtctcc

SEQ ID NO: 14887 - DNA, 3809 bp, Oryza sativa
  ref <308>: DATABASE ACCESSION NUMBER: AK065425
  ref <309>: DATABASE ENTRY DATE: 2001-12-06
gacccacacacccacactctctacccccaaacttgccctccaatctatctccgccgccgccgccgcctccgccgcgagagggcgtcgccgagctgcgcgggaggctcgcctcccgcagcatctggccggattcgtcgtagtcgaggcagctgtaagcgagagagagggagatggccgcggccgccgggaaggcggcgatggagcggcaccagtcgatcgacgcgcagctgcggctgctcgcgccggggaaggtatccgaggacgacaagctcgtcgagtacgacgccctcctcgtcgaccgcttcctcgacatcctccaggacctgcacggccctcacctccgcgaattcgtgcaggagtgctacgagctgtcggcggagtacgagaacgacagggacgaggcgcggctcgacgagctggggaggaagctcaccagcctgccgccgggggactccatcgtcgtctccagctccttctcgcacatgctcaacctcgccaacctcgccgaggaggtgcagatcgcgcaccgccgccggatcaagctcaagcgcggggacttcgccgacgaggcctccgcgcccaccgagtccgacatcgaggagacgctcaagcgcctcgtcacccagctcggcaagtcgagggaggaggtgttcgatgcgctcaagaaccagaccgttgacctcgtgttcaccgcgcatccaacgcagtccgtcaggaggtccctgctccagaagcacgggaggatccggaattgcctgaggcagttatatgcgaaagacatcactgctgatgacaagcaggagcttgatgaggccctgcagagggagattcaagcagctttcagaactgatgaaatccgcaggactcctcccactcctcaggatgaaatgcgcgccgggatgagttattttcatgaaactatatggaagggtgtaccaaagttcttgcgccgcattgatactgctctgaaaaatattgggattaatgagcgtcttccttacaatgctcctctcatccagttctcatcctggatgggtggtgaccgtgatggaaacccaagagttacaccagaggttacaagagatgtatgcttgttggcaagaatgatggctgctaacctgtacttctctcagatagaagatctgatgtttgagctctctatgtggcgctgcagtgatgaacttcgaattcgtgcagatgatttgcattgctcctccagaaaagctgcaaagcactatatagaattctggaagcaaattcctccaaatgagccttatcgtgtcatacttggtggtgtcagggataaattgtactatacgcgtgaacgtactcgccatctattgacaactggagtttctgaaattccagaggaggcaacgtttactaatgttgaagagtttctggagccgcttgagctgtgctacagatcattatgtgcttgtggtgacaaacctatagctgatggaagccttcttgatttcttgcgtcaagtatcaacttttgggctggctcttgtaaaacttgacataaggcaggagtctgatcgacacactgatgtccttgatgccataactacatatcttgggattggatcttacgctgaatggtctgaggagaaacgccaggattggcttttgtccgaactaaggggcaaacgtcctttgtttggtcctgatcttcctcagactgaagaaattgctgatgttttaggaacatttcacgtccttgctgagctcccggcagattgttttggtgcttacatcatctcaatggcaactgcaccatctgatgtgcttgctgtggagcttctacagcgggagtgccatataaaacagcctctgcgagttgttcccctatttgagaaacttgcagatcttgaagcagctccagcagcggtggcacgactattttcaatagactggtacatgaataggattaatggcaagcaggaggtcatgattggatactcagactctggcaaggatgctggtcgtctttctgcagcatggcaaatgtacaaagcacaagaggagcttgtcaaggtggcaaagcattatggtgtaaagttgacaatgttccatggaagaggtggaacagttggcagaggaggtggtcccagtcatcttgccatattatctcaaccaccagacacgatacatggatcacttcgtgtaacagtacagggcgaggttattgaacactcgtttggagaggaacacttgtgctttagaactctgcagcgctttactgcagctactcttgagcatggaatgcatcctccaatttcccccaaaccagaatggcgtgctctaatggatgagatggctgttgtggcaacaaaggaatatcgatcaatcgtcttcaaggagccacggtttgttgaatacttccgatcggcaacacctgagacagaatatggcaggatgaacattggtagccgaccatcaaagagaaagcctagtggtggcattgaatcgctccgtgcaattccttggatttttgcttggacacaaactaggtttcatcttcctgtatggcttggatttggtggagcgttcaaacatataatgcagaaggatatcaggaacatccatacactgaaagaaatgtacaatgagtggccattcttcagggtcaccttggacttgcttgagatggttttcgccaagggagatccaggaattgctgctttatatgacaaattgcttgtggcaggtgatctgcaatcctttggagagcagctgagaaacaactttgaagagacaaaacagctactccttcaggttgccggtcacaaggatattctggaaggggatccttacctgaagcagcgtctgcggctgcgtgagtcgtacatcactaccttgaacgtttgccaagcctacaccctgaagcggataagggaccctagcttcgaggtgatgtcgcagccggccttgtcgaaggagttcgtcgacagcaaccagcctgccgagctggtccaactgaacgctgcgagcgagtacgcacctggcctggaggacaccctcatcctgacgatgaagggcattgctgccggcatgcagaacacaggctagattgtccacaagaatgcttccagcaggtgcaatcaatcaatcatcaataactccttccatgatgagatggtgaatatgtttaactacccgatccaaaataaaatatggaccaatcattctacgaagcttgattctgaacgcttcgaatttgcatcagtggtgacagcggctgtgtttgcatctttaaacgacagactaaaagcattgtgcaccgcaagatgcagacttgacatgtgcttatagcagaagtattacatggagcacatctcagggtcaggtatattgcaatctcaaaaatcaggagatacacaatcagatggatatgaaatgagaagcaaaattgtgtctgaagaaatgagaagcaagaatacagttaaagggtctgatgggttacagtctgaaaaatcaggggatatgcaatcggagagatatgaaagtgacaaaattttgtccagagaaataagaagcaagaaaacattgaaaggtcagttatcatgctcacctagcattatgcaccataaaatgatcttggcagacaatataatctagcataaaattatatacaacaaattagagattgtagcgttgataaattttcaaggactatatatctatagttagttacagtgagaaataacaaaagttacatatgtaactacaatacatatagactgtaactgggctaaaactgcaagcatgcttgaatttcttcaaaaaataaagaatttcttc

SEQ ID NO: 14888 - DNA, 3243 bp, Oryza sativa
  ref <308>: DATABASE ACCESSION NUMBER: AK065426
  ref <309>: DATABASE ENTRY DATE: 2001-12-06
gagtctaccaccagaagcgagagaaagaaaaccgaaatcacgcgaaccgccgccgcgtgacgcgatggagccctcggcggccgtcgcgtcgaggccaccgagcttcaccgcgcagacgaatgccctcctccgcaagaatctcatcttccagaaacgaaacaggaaaggaaccattcggctaatcatagttccgatatacctctgcctcttgctcaccattcttcagagagtcatcaacagcgttcttgacaagcccaagttcagatgtggttgcaagtgtgttgatgtcaacggcacaggctcttgccaaaatgtgtgtggaattcagtactctacactggatcaggctggcagttgccccataccgaaccccccggaatggcctgctctcttgcagttaccgcgccctgagtatcgcgccatgcaggaatcctccttgtatgcaggtttcccagatgtatcatgcagaaaatcacaatcttgcgcagctactatacccttcacaggagcaaatgagaccctatctaacattgtcatgcaaaatttgttcacaagctcaccgctttcaaatctttctgataatgcgagcatatccagtcttctccttgggacagatgtaccgggtacttatacaggcttcattgaacccgcttttgtctcagatcgacccatatatgttcttagacctcaatgcaaagccagtgattcagttacagtccccattacgtttggtgatattaatattcggaaagagatgttatgtattcaaggtttacccttgtggaggaatagttcagcaataataaatgaggaaaccttcaacggctacaggaaagggaaaagtcaggaagggataaatgagattccaatggcctatgatttccaagactcaaacgagaagcatttcagcgtgttagctttatataactcaacttatcagaatgtgtcttatgttccaatgccatttggacttctgcatatctcgcgctccttgaacgcggtctcaaatgcatatctccagtttcttcgaggatcaggtgtaaaaatgttgcttgcattcacaaaagaaatgcctaagcaagagactcgtttgagatttgatttttcttctgttatcggccctctcttttttgaatgggttgttgccttgcttttcccggttatgttgacataccttgtatatgagaagcaacataagctccgaacaatgatgaaaatgcatggacttggggatggcccttactggattatctactatgcatatttccttattttgtccatggtgtatttggttctatttgtcgtttttggatccgttataggtctaaactttttcaagataaatgactacagtatccaatttgttttcttttttagtttcatgaacctgcagattgtactagccttcctaactgcaaccttcttttctaaagtcaacactgctcaagcaattgcatacctgtacatatttggatcggggttgattgcaggatctcttattcgcaattttattgaaggtggcaagttcccaaagcactggattacagttctcgagataatacctgcattttctttgtatcgaggactatatgagcttggccaatatgctattagggcttctgaagctggaagtcatggcatgagatggagtgatctaaatgaccatgcaaatggaatgagagatgcgctgattattattattctagaatggttggttttgcttcctgttgcgtactatttggaccattctgcttcagttggacacaaatctagtttcctttccctaataaaaaatctgctgaagaagaacccaacttggagaagggtatctattaacgaagtagttaacgacgctgttcatgtagaaatggtgaagcaagatattattaaagaaagggaaactgttgatcaagtactacaacaacagagtagcggctatgcagttgtctgtgatgatctcaagaaagtatatcatggaaaggatggtaatcctgataagtttgctgttcggggtctatcacttgctttgccttatggagagtgcctgggcattcttggtcctaatggagctggcaagagctctttcattagcatgatgattgggcttacaaggccaacatccggaaatgcattcgtacgggagttcagcatacagactgacatggaaaagatatataacagcatgggggtttgtccacagaatgatatgctctgggaaatgctgaccggcagagaacatctccagttttatgggcggctgaagagcctcaatggctctgatttggacactgctgttaacgaatctttaagaagtgtaaatttacttcatggtggtgctcctgataagcaagtcaggaagtacagtggtggcatgaagaggcgtctcagtgtagccatctcgctgattggagatgctaaagttgtctacatggatgagcccagtacaggattagacccggcttcgaggaagagtctatgggacgctgtgaagcaagcgaagcgagacagagcgatcgttcttactacccattccatggaagaagctgaagttctctgtgacaggttgtgcatcatggtggatggcagcctccagtgcattgggacacccaaagagctcatagcgcgatacggagggtactacgtgctgacaatgacaacatccccggagtttgagcaagaggtcgagaatctggcgcgaaagctctcaccgaacgcgaggaaagtataccatctgtctgggacacagaagtacgagctgccgaagcagcaggtgaggatcgcggatgtgttcatggccgtggagaatttcaagaggaggacggaggtccaggcgtgggggctcgcggacaccaccatggaagacgtgttcgtcaaggtcgccaaaggggcgcagtcgagcgaagaactctcatgatgatctggtgcaaaaatgatgttttgtttgtgctgttctgatgtactttgtacagaaagtaggataaatcttttgtcaggcattagtttgcttatttttctgtacataaggatcctatggcatgttgtttttgttcaatcttcttttggtcttttgtagataaggtttgtgttattgtgtatgttatagaaaaaaagatggtgtgtgtaggcgtatattggtgattgtattttatatatgtttgtcaacttgttgctgcacgtatatgtctctgcaaagaatcataaacctttgaccagaagcctttgaattgatcatattctttgtgt

SEQ ID NO: 14889 - DNA, 1805 bp, Oryza sativa
  ref <308>: DATABASE ACCESSION NUMBER: AK065427
  ref <309>: DATABASE ENTRY DATE: 2001-12-06
ttggtaaatctggagagcgactgacaaaggggggacgcggccccgactcggcgactccgaccgacgagatcgccgtcgctccatcccccatggctgcctcctccgccccacctccccctccccgccgcctcctcgctctcaccatggcgctcgccgccgccgtcgtatccgccgcctccgccgcgagggccccggcctccgtcaccccgatctcccgcaccctctaccactccagtgattcccttctgagtgatatcaaggccttggttgcccggcatccagacaagttgagtatggataccataacagcaagtaacaaagggtattccacagacctctttatcgttacttttaatcatgccaaggagagcacgtccaattcttcaaagatccatgtccttctgagctttgggcagcatggcagagagcttatcacttctgaagttgcattaaacctcctctatattttgaccgagaagcggaaaattgctggtgtcgatctatcatcctttgagaagatactggagaatcttgtaatcaaagtggtgcccatggaaaatttaaatggtcgaaaacgtgttgaagaaggggagctttgtgataggagaaatggaagaggagttgatcttaatagaaattggagtgttgattggggaaagaaggaaaaggactacgacccatatgaggaaaatcctggcactgctccttttagcgaacctgaggctcagatcatgcgagagctatccaagtcatttaaaccacatatgtgggtgaatgtgcattccggaatggaggccttatttatgccatatgaccataagaatactacaccaaacggagcatctgctcatttgatgaggacagttttggagaatttgaatcatcgccatttccaagatagctgccttgttggatcaggtggtggagctgtggggtatcttgcacatggcaccacaactgattacatgtacgacattgtaaaggtgcctatgccctttacctttgagatttatggtgatgagaaagcatctaccagcgattgcttcaagatgttcaatcccgttgacaagacaacattcgatcgagtcattaataagtggtgcatggccttccttatactttttgaggaaggactgcgaaacctgcgtgaagctcaattagtatcccaaggtgcagtggataactgggtcccaatgggaggagacattgttgagataagtgcggcacgaaagagcagtcccgataagaggaaacttgaaggccttgaccttggaatgcaggaactaagaacctactttagactattcatgctatcaacagtcctgctgatgttcatgttctgttcgaggatatcaaagaacaggaacagagaaacaggtaacatttttgactcctgaaaacccataaaaaggaatagattgaagctcgctgttcagtttgagtttcggatttggttgtggcaagagtgatcaccatttgttgcctcagatgaacaaagtgcatgaaccattcgaactttggaggaaacttatgcggtttaccgcttggagatccaccgatttgggaggcgacatggctggcagagttcagaatggcattgtgcagtctatgtttagatacgagatgcatgtcgaatgatttgtttttaccttcaacaaatcatactagctgtaagttgtaaagctgtccatatcagttcattgtgatgaataggcattccttcactttttgaaggctagtgcacaaacaacatcttgttaacgttgaatatttgacacaattaaatgtactattccccttctcgt

SEQ ID NO: 14890 - DNA, 3696 bp, Oryza sativa
  ref <308>: DATABASE ACCESSION NUMBER: AK065428
  ref <309>: DATABASE ENTRY DATE: 2001-12-06
ggtgtccccgcccctccccaaccgcgcgccgctccccaaccctaatctctccctctcacgcggcgccaccgccgtcgtcgccgccctcgactgccgctgctccgccgtcgtcgcatccgtcgtctcgccgccaccgatccccgcgccaccaccatcgccgccgccctcgactgccgccactccgccgtcacccatcgtcgcatccgtcgtcgtccaggatttacgtcaccgttccgtcaccgcacccacacgatgatccccggcgacggaacgggtcatggtggccagggaggatactcgggcccgacgagctcccggcgtctcaggtaatgtcgccgaagacaagaactccggtcaagctcctcggccgtgaggacgcaagcgtgtgagggtaccccttttccctcaaatttaattatgtactctgttacttagttctataattcatctgctcggttagtgtcccatcacaatcgcttggtcaggattgaatgttctgtggattggattgggagttgtttgctcaaggagcaattagggaatattttagttggttgcggctgcaaataccatcagaacaacaatggagtatttaacaagagccaacagccttttgtttcagatgaattccctctgaagtcacccgtcaattgactaatgttagacaatctaccatctagaggagatcattcctgaacccaatatggtgataagccgcctctgttgatgtgttacactcattgttacttgttctgaggtgtacaccttgcttgctatattggaagagtgaatttaattcacatggatataatattttgcaatttttgcatatgaaattatatgcatgttcttgtgatgtgagaaggttaaattcctttgtgggatgcccatttaatttctggttgctaattttactgaagaatgagagtaggttatgatgtcttgggttttgataagtagggtgtaaatttatatagtacaataaacatgcgtgctggtcattctgttatgttggattgaaacaagtgatgctggcaattcaggtgcagaccagcttttggttctgtaaattattttctcaatttaaataggtcatgtattgtgatgatgtgaatacaatattatgatgttatcatgtgttcaacagagcttaaaaaatgctcacaaactggattctcgtagttatacagtttaaataagttataagcacgatttgggtttgatgtcttccatttgatttttggcgctcctccctcttgctccgatctggccttagtgatgccgccctgttttcgcggttgaccccggcaccagccccttcctctggccacgtgcgagttcgagattccaagtcccggtggtcggatttctcaaccccggcactggcctcgcacaggctgcgatccgctcgccaacaaggtaagtcgttattgggatgtttatatctgaaaatttagataatttcttttgaacttcattgcttggtcaacaacataacccaggaaaccaattaaattgatagacatgttgtgtgctctcttaagagatcaacatccaaattgacatccaagttaaaagaagaattttattatctaaatcatgatgccaatattgagagtttcttttactttccgttgtatacggtttctgtgatgtgtaccgaaggttatatacataatgagattttacttcaatggtggaattgtgctctattaaaccacatggaaagttctgatttgtgcagtgataatttttccctttaaaaagtcaaatttggtttacatttttattcatgacacctgaatatgtaaaatgccatgcattagtaatgtgcaagcactttcaatgtattgtctaaactctaaaggaacaacttaccagtttattagtgaatttatgaaaaaaaatcagatgtttaatgtctgaataaattcagattctcttctctgcttcatgccttcatcaggatgaggtagttagtgttgtactgtagttgacaaatcgatttgttcgcatcgtgataaggcgcagaaggtaaggcggaaattgccttggtttatcctctccccctaaatttcctctgctgcgattggttgattggttaatgaaaaacccgatacttgcaagcagattctgattagattctaattattgggattttctagagttagtttaaggaaaagtgagttaattatcgacgatgaaatatacacttccatgattagaattatatatcgaatagacaaatatgtgtatgtattaaaaatatctgacaaaatggactgtatgattataatgcctttcaaccattgctttgtgcaatgctcattatatctcccggaaattaattgatttctgcttttgtaccatgtgcgatgtttacttttaaactgctcaggttcattctatcttattttctggtgcttctgaagcgatgtatatttcttcatttttaaactgctcaggttcatgaaatcaggcgatgactacctgccacaatgagaagacagacggtcagccgcctacacaataggctcctacactgccaccatcactgaatgcacatctggtcctcccttattttcgttggtatgtagtatgtacgtaagaactaacaagtttattcattcaaagaaaaactaacaagtttatgttaagcttcctttttaataatattttacattactgatatttagtgcagtgaaaaatgctgcaaatctctgatatttagtgcagtgcaaaaatgatacatagcttgattggatgctctttctcattatggccgactgcctgatggaattttttccatgtgaaaacaaatgtttactctgtttcaggcttgtgtagagaagaaaaggtggaattgtggaaggtaatcgcggggagttttggttcattttttgaagatttctctaattggtacgtactaattaaccaattggagttttggtctcgttactcactgtaaaaacatgatggtaaaaaaacagtttaatcctattggtactcttttatcccattgaacattttgtcgttgtgtcattgactgctatcaaaaaggaaaaacagtggatgactctttcaggaaatataggatagccccattgatggcacattttgaaccgttcatgatccctgatttattctcttgaccatattctgcactgctatacttgctaagtaatacaaatatatttatatccctgtagcatgtgagttactctataagacaattattatttttacataactaattaacatttttactaaactcttttattttgacaatcactctaagacgtatgcaattgcgtcttacgaaagcaagtgaccctgagagcactgatctttgtaaagatgcacacagcttactgcaggagaggataacaaaatagaagtctataaaaatctatagaagggatcaaatatgcttgactgaatgatagagatggaaaaatgaagaagtgatgactgttgtttcacaatgtattcatttcatctatcctataattgtagtggtgtgtcaatgtgtgatacttctagatttttccagctccattttgccagctccgtgggtgttaatgattcagaaatcgtggaattgcttggaacatgtactttattctcaaccattttttgtggaagtgtggatgtacattgtctaatatattggtattgaagtgattaaatatgatt

SEQ ID NO: 14891 - DNA, 1924 bp, Oryza sativa
  ref <308>: DATABASE ACCESSION NUMBER: AK065429
  ref <309>: DATABASE ENTRY DATE: 2001-12-06
ggtctcccccgctgcttgcgccgccgccaagacgagtcgcggctgagcatgggagggggcggcgatctccatccggcgagcagagcaggggagaggagaggatcctggtgaggggctgcgatctccatccggcgatcttctcgggcgctcgcgcttccggtccccccaggcggcgatggcggccgcggcggttggggtcgcgagcagagcacgccggagttctggcccgaggggagtggcattctgccgatggacgaacggcctcctccacccgcgcttcgtcttccccgaggccgccgcggtggcgggctcttgggctggctccgctcaagagcagagcgtgaccacctcagacaaacccgaggtgcgttttgcgtgaagtgggttttaaggatggttctaaacaaggtgctcgagctattttgtgtgaagaagaaggattccaagaagaaaggcaaagccattaatcctctttgtaaagttgccgctccacaccccactgcaaatgtcagtacaaacaacagccttttggatcccttttcaactgggaatggtactgtgctatctgtgcaaaaacatgagcctgaatgttcaagtgttatatcatcaatgacaaggacagaatatggatttgaaagtgatggttgcaattcgtttagccattttgatgttcaagatttttctgatcattactatgcaaagaattcaccagggaagacctccaaagattgggtgaagacaatccagaatgaatggaggcttctacagaaagatctacctgaatctatctatgttagagtttatgaggataggattgatctgctgagggctgccattgttgggccagctgaaactccatatcatgatggtctgttcttctttgatgttcactttccttctgaatacccacaatcccaccgcttgacgcatgtgcacatcccttctttgatgagctacgagagcccaatgcacacctgccatggcaaatggtcgtccattccctcctctgttcaacttcaagcatgaactagctggcgcctctccagaactcgtccacagattcataccgtaccatatcagacggcaacatggcctcaacttgcgcatgctgggagttagaatggcaccgttttgttcgtttatttttccatgagctggacattgcaatcctagatgactccattgtcttggacttgggactccatctcagattgcaccatccatgattcttccatgatctatccatccgtccagccatttcagcaaggactcagtaccagagaagtacaattatgtaaattatctagccatggagaaatgcgtgctgctgctgctggtgttaagtacgtgacggggtatgctggttgagtagtagggaaggactgcaaggagaagcaccctaacgtcaagcaggtatcttgtggcgcatttgggttgctctgctgcgttaactgctacaatgtgtgttctgacttggttgatttggtggtgacaagtgcaagtccatgtctgatgctgttttggcacttgacaaatgctttgttgacccacgttgtttattaaatcccacacaagtaatgaagagggcattataccattaacagatgctattcccaatattccaatcgttcttcatgcatcgattcttcaaatatcactgccatgctcgcctcgggctccggggcgaactcgtcaaggaaggacgccgacgacttcacttggacggtctggcccgcattctcggccacgatgcagcggtggtggctatggcttcggcgacgctggggaaggacgcctcaaaggtctaggaccacgccctcgcatctagttttttttctttcccttggagggcctatataggtggagcgtagctcggcagtagtatgtacttaggtttattttaatgaaaagctcagcttttgcc

SEQ ID NO: 14892 - DNA, 2558 bp, Oryza sativa
  ref <308>: DATABASE ACCESSION NUMBER: AK065430
  ref <309>: DATABASE ENTRY DATE: 2001-12-06
ggcgcgcgcgtgagtgcgtgatttgtgttggttgtcttcctcttggcttcgcttcgctgctttgccgcgccttcgccgagggaggccgaccaacgcatcaatcaaacacacaagcacaccacgcggacgcagcagcaggggaggagacaatttcctattcttcctcgccccgcgtcgcctcgcctgagtctgactctccaaacgccgaccagtgacgccgcgagccttgccccttgcccgcgcagatctcaccaaaccctaccagatctgcgccccgccatggactccgccgccggcggtggcggcctcacggccatccgcctgccctaccgccacctccgcgacgccgagatggagctcgtcagcctcaacggcggcaccccccgcggaggctcccccaaggaccccgacgccacgcaccagcaggggccccccgccgcccgtaccaccacaaccaggaagctcgtcctcgcctgcatggtcgccgccggcgtgcagttcggctgggcgcttcagctctcgctcctcacgccctacatccagaccctaggaatagaccatgccatggcatcattcatttggctttgtggacctattactggttttgtggttcaaccatgtgttggtgtctggagtgacaaatgccgttcaaagtatggaagaaggagaccgttcattttggctggatgcttgatgatatgctttgctgtaactttaatcggattttctgcagaccttggttacattttaggagataccactgagcactgcagtacatataaaggttcaagatttcgagcagctattattttcgttcttgggttctggatgttggatctcgcaaacaatacagttcaaggtcctgctcgtgcccttttagctgacctttcaggtcctgatcagtgtaattctgcaaatgcaattttttgcacatggatggctgttggaaacgttcttggtttttcatctggtgctagtgggaattggcacaagtggtttccttttctaatgacaagagcatgctgtgaagcttgtagtaatttgaaagccgcttttctggttgcagttgtaagttctcttaaatcccgctgctgcgcctgcagtagaaatttcaagctgttttgtaacagcctgcagagctagcaggtcattcttaggaattgcatgtgatattattttgtggagtgtggactgtaatgtgtgcaagctgataagccctactatgcaggtattccttttgttttgtatgtctgttaccctgtactttgctgaagagatcccgctggaaccaacagatgcacaacgattatctgattctgcgcctctcctgaatggttctagagatgataacaatgcatcaaatgaacctcgtaatggagcacttcctaatggtcatacagatggaagcaatgtcccagctaactccaacgctgaggactccaattcaaacagagagaatgtcgaagttttcaatgatggaccaggagcagttttggtgaatattttgactagcatgaggcatctacctcctggaatgtactctgttcttctagttatggctctaacatggttgtcgtggtttccctttttcctttttgatactgactggatgggacgtgaggtttaccatggggacccaaatggcaacttgagtgaaaggaaagcttatgacaacggtgtccgagaaggtgcatttggtttgctattgaattcagttgtccttggaattgggtccttccttgttgatccactatgccgactgatgggtgctagactggtttgggcaatcagcaacttcacagtgtttatctgcatgctggctacagcaatattaagttggatctcttttgatttgtactcaagtaaacttcaccacatcattggagcaaataaaacagtgaagaattcagccttgattgttttctccctacttggactgccactctcgatcacatatagcgttcctttttctgtgactgctgagctgactgctggaacaggaggtggacaaggtctggcaacaggagtcctgaaccttgcaatcgttgttccgcagatagtagtgtcactaggagcaggtccatgggatgctctctttgggggagggaacgtccctgctttcgccttggcttccgttttctcactaggagctggtgtcctcgcggtccttaagctacccaagctgccaaactcttacagatctgctgggttccatggatttggctgagcagaacaccagccgcatggtgtgtaacattgagaaatgcaactccattttgccattcgtttacagtgaaatgattctttttacctactactacaacagaataagctgaaaagatagagattaggatagagagctaggtaactagtccagttaggttgatgtgcatacaaggcaattggaaggtgtaagagctgtatctacttttttgacagaaaaatgtaagctctgcccgaatgacatggcggatagattttacaatggatgtaatcatgtactatatataacacgttttggtcacagcttgccaagtttcatgtatagtactgctact

SEQ ID NO: 14893 - DNA, 2380 bp, Oryza sativa
  ref <308>: DATABASE ACCESSION NUMBER: AK065431
  ref <309>: DATABASE ENTRY DATE: 2001-12-06
gctctcccactcttcctcctccccaaaccctagccgccgccgccggcgtactcgagagaaacatcagcatccatggcgggcaagggcgagggtccggccatcggcatcgaccttggcacgacctactcgtgcgtgggcgtttggcagcacgaccgcgtggagatcatcgccaacgaccagggcaaccgcaccaccccctcctacgtcggcttcaccgactccgagaggctcatcggagatgctgccaagaaccaggtcgccatgaaccccatcaacaccgtctttggtgccaagcgtctcattggcaggaggtttagcgatgcttctgttcagagtgacattaagctctggcccttcaaggtgattgctggacctggtgacaagcctatgattgttgtcaagtacaagggtgaggagaagcagtttgctgcagaagagatctcctccatggtcctcatcaagatgcgtgagattgctgaggcctaccttggcaccaccatcaagaatgccgttgtcactgttcctgcctacttcaatgactcccagaggcaggccaccaaggatgctggagtgattgctggtctcaatgtcatgcgtatcatcaacgagccgactgctgcagctattgcctatggtcttgataagaaggccaccagcgttggtgagaagaatgtcctcatctttgaccttggaggtggtacctttgatgtctccctccttaccattgaggagggtatctttgaggtcaaggccacagctggtgacacccatcttggtggtgaagattttgacaatcgtatggtcaaccactttgtgcaagaattcaagaggaagaacaagaaggatatcactggcaaccccagggctctcaggaggttgaggacagcttgtgagagggcaaagaggaccctgtcctccactgcccagaccaccattgagatcgattccctgtatgagggcatcgacttctactcaaccatcacccgtgccaggtttgaggagctcaacatggatctcttcaggaagtgtatggagcctgtggagaagtgcctcagggatgctaagatggacaagagctctgttcatgatgttgtccttgttggtggctccactaggatcccgagggtgcagcagctcctgcaggatttcttcaacggcaaggagctttgcaagaacatcaacccagatgaggctgttgcttatggtgctgctgtccaggctgccatcttgagtggtgagggcaacgagaaggtccaggacctcctcctgttggatgttacccctctctctctcggtttggagactgctggtggtgtcatgaccgttttgatcccaaggaacaccaccattcccaccaagaaggagcaggtcttctccacctactccgacaaccagcctggtgtgctcatccaggtttatgagggtgagaggaccaggacacgtgacaacaacctgctggggaagtttgagctctctggaatccctcctgctcccaggggtgttccacagatcactgtttgcttcgacattgatgccaatggtatcctgaacgtgtctgctgaggacaagaccaccgggcagaagaacaagatcaccattaccaacgacaagggcaggcttagcaaggaggagattgagaagatggtccaggaggccgagaagtacaagtcagaggatgaggagcacaagaagaaggtggagtccaagaacgcgctggagaactacgcctacaacatgcgcaacaccatcaaggatgagaagatcgcctcgaagctcccggcagcggacaagaagaagatcgaggatgccatcgaccaggccatccagtggctggacggcaaccagctcgctgaggctgatgagttcgatgacaagatgaaggagctggagggcatctgcaaccccatcatcgccaagatgtaccagggcgctggcgcggacatggccggcggcatggacgaggacgatgctcccccggctggcggcagcggtgctggccccaagatcgaggaggtcgactaagcgcgaaatttgctagtgatccgcgcttcaagttatcttattgcattattagtgtctcttttatgttgtgttaaaaaactttgctgctatgacttatgatgatacccttggtctgtttgggcagtccttttgaattgaagaactgcgttgggagctctatgagaactatgaattgcgtgagaaatttaattattgtggtgcttgcagcgcctattatttggtctctgtcccacgtttattatttgcatgtgcgcattgtttgctagcaattgctgttgtgcttctcagccaacatgtaaactgtttggattgtttctgatttttggatgcattttttaaagcggatagtgaaggacgg

SEQ ID NO: 14894 - DNA, 3866 bp, Oryza sativa
  ref <308>: DATABASE ACCESSION NUMBER: AK065432
  ref <309>: DATABASE ENTRY DATE: 2001-12-06
gtggcgcgccgtcgtcgccgccgcggcggcggtgaggaagaagtccccgtcgcccccgccggcgacgagctagtccttgtggaggcagcgccgaaagcgtgaaggccgggagcggattgaagccgctgctgtcggcgaagagccggaggatgggggcgccagccgggtggagggcggggaagcggcggcggaactccgggctggaggagaccaccacgcggacgcggcgccacggaggggaggggaggggaggggaggcggagaaagatctcctcgatgtgctcgtcaccgagggcatcgatggtggtgttgctcggttcctttccttctccggcggcggctcgctgcgactgtccatggcggtggtggggaatggggattgccggattagggaactagggtttgatccaactcctcgacaatggctttattagtcgatcaccaacaaacaggccaaacaaggcaaatcctccaatattcatgcttgcatcggccatcaggacaattctttgcaaggggataaccacaaagacctgggttgccgatgtacatcaaagatggatcatctgcattgagtgtgtccagttgatgtccccgaggaatccttcccgataaattgttgtaagacaagttcagatagctcaagaatgtcaaatttgataggcttgaagggatttctccagaaaattgattatatgataggtcaagggaggttaattggtgcagctcaccaatctgatccggaatgtttcctgctaactggttccaggacagattcaaatttaccaattcgacaagagaaccaatctcctttggaatatggccagacaatttgttgctagaaaaatcaaggcccaccaagtacacaagtcccttgctgtattcaagttgttgaccttgcagaacacatgatatgctataatggaacaggccgaatacatcgaaagctccgaatccgttttccagtgcctctccaaataggaaccatgtttctaaattttctggttcgttgatcattcctttcaagcacggaagggattgtgggatagtaccagaaaaactattattagctatatccaaataccgcagatgatcaagtttggtaaaaccacctgggatatgaccagagaacttattagacctgatagcagaattactatggatggcaacttttcacctatccactccggcaactttccagaatatttgttccatgctagatcaagaatggtgatgctttggcacgattgcaatagcatagggaactctccagaaagctgatttttgcttagtaaaaggatatgaatgttcagacttgtggaatgtataaaactaccaccagtcgatggtttcagttctgtcggcaaacagtgaggaagttctcctaccagaaaattgtctgctaaatccaaggcacccaaattgtgcatcttgcaaagggactgtggaatgctgccattgatatggttggaaaagagaatgagtttaccaagatttgcgccaccaaaatgaaatggcagcggaccagacaataagtttctggaaatgtccaaataatagagattttcctgtaacgatggcaggcgaccagtcagctggttcgaagctagaatgagcttttcagttgacataccttgaaaactgtctggtaacttccctctgatctgattatgagatatatttacgtttgcaacgtcagaaactaaattccagaaccaattaggaagctcatcttttatgcctgaacttgaaacatcaattgagtaacaattattcaacgatttgatccacacaggaaattctggacccagttggcaagatgcaaaataaacatcgaacaatccaaagggagggctccaactttcgtccagcactacctttaaaggattataagacataatgattctctccaaactctcaaggcctgaaagatgctggtttgagatcacaccactgatattattgttatgtagaattagagttgtcaaattagccatttctctgattagcaagggcaaatgaccactgaatttgttccaagataggtaaaggcttgttaagctagtttggctccccagccaatccaggtttccagtaatgtcattataagacaaatcaagctcctccaatttattccaagtacagcttggaagcttatccatcagatctttgatttccacgccgatcaaattctcattgaggtataggaccctcagattgcaagtgttgtttaatgttgatggcagcgtcccttcgaagctattacttccatggtagctatcacctccaaggttaaggccttccaacaaagttaagttgcctaatccatcaggaaatgaaccagacaactggcatgaggccaggttaagcatcttaaccgtcttcatgctccacacccagttgggaattaccgtgccaaacaaagtgttctcagagaggtcaagtgtttcaaggcttgtcagattggtgagtcctgttgatgatgaactcatgatccaacaccctgtaaggcgtagaacctcaagacgggaaagcatattcactggacggacccaatcaaccactgagcttagattcacataactcatatcaagatacttcaatgaaggaaggcgtgccaaccatgagatgtcagctgtgtgcataggaggatggtcataaatttcagatgttatgtcaagaaactgcaaattagacagattaccaagctgatgaggtactctgccgtaaaaacccatacgtgctaggttgagatgggtcaaactttgaaaggagcccaagaactctggcatactttctccaaggacgttcccactaagatctaggcgtttcagttgtcgtagacttaccaaagacgaacttatgtacccatacagcggaaaatcaacatgggcgcacttgtaataatgcggatcatcataatataagtaagtgttgctgaggttgaggatgataacatgccccgtcctgttgctacacctcacaccgctccactggcagcaattctcacctagccatgagctgaggcgtttcttggggtctcttgtgatgccagccttgaacgagagcagggcatccctctcggctgcaatgcagccattggtggatgccggagctttgggagatgcagctgcggtggtgatggcgtctcggaagaggactagcaaaaggtaagtgaatgcagctacaatcgaggacgatcgtggatgaactggagttctagccattctagccattgtgtgttagtgatagtccacgctacgcaatgcaatgcaaccctcgttgagaactagtgcagtatatgtttggaagagattcctcgaacatgtcagtattacagactgcaatatgtgtcaatatcaactttagctactctgaatctccctctgttgcacgtcaaagaaaatttttaaggctgtcactgttttattttgataatggaagagtaaactccagggtatgcaactgcttgcctgtcaacgaagttcccttctactcctggctgtgtgattgtcgacataccataccggcaaagcaacggtgcgggttcgataccatcatcgttcccggggcttggtcgatttggaaggaaaggaatggttgagagtattcgagcaccgccaacgcagcgggactgaggacgccaaggcaatgtcagaagaagccacactttggagattggcgaggactgcaatacctcaactaggtctaggtcacacaatagttttgggagatcagtgatttagtgtgtctttttccgtttctccttttctcctcccctcctctctcctccctgttcttctctgtctgtcttgtattactttactcctcttaatgcaatgatatgcaagtcttttgtgtatttc

SEQ ID NO: 14895 - DNA, 1827 bp, Oryza sativa
  ref <308>: DATABASE ACCESSION NUMBER: AK065433
  ref <309>: DATABASE ENTRY DATE: 2001-12-06
tgaagaacggagagacaaaaccagctgcattatagcacacaccagtcgtgtctacgtacacaaattgttgtcgcacacataattatcatccatcgatccatccatacaaacgtacgtagaatcatgaagcttgattcgttcacggcacgccggggaaaccccgagctggttgcgccggcgagggcgacgcctcgcgaaaccaagccgctctccgacctcgacgaccactgggacctgcgctacctgcagccaagcctcgagttcttccgcgtggtcgacggcgatcgtcggccggcgaggccaggggacggcatcaaggcggccctagcggaggccctcgtgtactactacccgatcgccggccgcctgcgggagctgcccacgggccacatgctcgccgtggagtgcaccgccgaaggggtggtctttgtggaggcagaggcagacgtggcgttggaggacttcggcgagccgctgatgccgacgttccatggcgccgaggggttcctgtgcgatgttggagacaccagagtcatcgttgggagaccactgttttacctgcagatcacttatctcaaatgtgtaggatttgtccttggaacttacatgtgtcattgcatagctgatgccttcggcacaattcaattcttgaaagctatagttgatatagcacgtggtgaggcaaaaccaaccacgttgccagtttgggaaagggagctctttctcgcaacaagtctacaaccccacatcaaagaagaccaaaagaaattatttgatgaactggagagcaccacatgtgatgatattatggtgacaatgcctactgaaaacatggtttctgaatactttattctctctcaaatagatatggctgcactaaggcgtcatgttccattaaatctcaataaaacagtcacgagctttgagctactaactgcagttacatggcgttcccgtactatagcacttggctacagaccttgccatattgtacgcttgatgattgttgtgaatgcacgtgggagatggaagaagcttcctttgggatactatggcaatgggcttttgtgctctgtcattgagacaacagtcaatgacttgtgcacaaacccgttaggacacacaattgaactcgtccggaaggctaaagacgagatgaagacagaagaaaatatgcaattgagagtagatttattgccattgtggcgtgaaaaaccgtacataaaagtacagagaatatttgaagcatgtgacataaaatggattgggcaggatactttggatattggatgggctaagaggataggaggtggcataccgactgttagtccgccaaatttgacaagctaccaattcttgtgcaagaatgaaaaaggtgaaaagtcaaccgtcatctccatgttgttgccacaacctgcaatggatagattcaaaaaggagatggctgcttggttaattgaataactaagaggataaataagtatatctgcttcacgtagagtaaaaccacatcatcttttatttggtcggttgctgaataagacatagtttcatcggtgttggttttgttattcagatgggcttgggcgcggatggcatttaattagttaggtcttttccatttggtgaccagtgtgttatatttatgattatgtactttattttgtggaggatcgattatcgtatagctcggtcataagtcagtgtaccattacaaaactacatcaagttgtgcattattgtgaccttgtaaaatggtgttttatgagataatcaaattgttgttcgatctggcacaccctttaataatatacctatatatggttc

SEQ ID NO: 14896 - DNA, 1768 bp, Oryza sativa
  ref <308>: DATABASE ACCESSION NUMBER: AK065434
  ref <309>: DATABASE ENTRY DATE: 2001-12-06
gactttctctctacagcgggcaacggtgggaggagcggggccccgagcggactcgacaacggtgacgacttgcggcaacggtggcgggcggtggccggcttggcagaggacggcgggcgcggggcggcaagcgaagggcagcggcaggttcggcccgtgatggacggctcgggcgggaaatgggtgcggagcggcagcaggaggcaacgcagtggccgggagcggcggcgacgccccttgcccgcccgggatctagagacggcacccctctcctgcccggatccagcgatcgaggccctcaatctagaggcggcggcagcgacgtggccaggaacggtggtaggcagcggtagcgcggcgtccgggagtggcggcacggccctgcactcccccggcggtggtcgtccccgctccctccgcagtggcgctcctccccgtccggatttggcgacgacgacgacgagctgcgacgcagctagggttttgactttttattttttttgcaatatttacttttcttttttgttttttgttttcatgtgcgggtgcaccacccgtagaaaaaaaaattggatttttacagactcttctggacagacgggccagagatccacatgcgaaaaccacttttgcccgcacggaaaaaatgtatttttatagtgacatttgtataggtgcatggaaccaggccgtatttagaaaagaaaacacgtacgatcactcttcagaggtaatggtgttattgtctatttatactggaagtttttgaattttaacgtgcattaataattggatttagccaggagtcgtcattttggtcatatcatacaaccctgaagagtttggatccgtcttcctagtgggattcaatcataacagtacagagtccatgttaaatgttccgctcaatgtttcttttaggagagctttagttggtcagaatttaacactttggcatgaattgtgtgcatctattgttcatattcaattgaataatacttctgattattttagatggaactatcatcagaatggccaattctcagttagatcaatgtacttagccttaattaataatggttacattgacagaaataagttaatttggaaactcaaaatgccgcttaagatcaagatctttatgtggtatttgcttaagggagttgtgttaaccaaggataatttagcaagacggaattggactggtaatttaagatgttgcttttgtacgaaaaatgagactatccaacatctgttcattgattgtcattttacaaagtttatttggagggcagttcagttttcttttggtttatatattcctactagcatatctcatattttttatgattggcttcagggagtcataaacaaaaagagcaaactaatacttgctggagcttctgccttgtgttgggcactgtaactgagtaggaatgatagggtttttgacaaatcacctactattacttatatgcaggtcattttcaaggcaacatattggcttcgtctgtgggcacagttacaaaagtgtgatgaagatacagatttcttaattgttgcatgtcgtaaggttgaaacgacggttatgcaactgtttgccaatcatggatggagatttaccaatagactggaataatgttattttgtctagtttggttggtgtgtttggttttatttgaacttcactcttacagagtgctagtttgtaataattggctgtagctcttttgagtaaaggtcgggatgctatttcattccattattt

SEQ ID NO: 14897 - DNA, 1455 bp, Oryza sativa
  ref <308>: DATABASE ACCESSION NUMBER: AK065435
  ref <309>: DATABASE ENTRY DATE: 2001-12-06
ggccttacacaaaacacatcaaacacaccaagctcagacaagagaatagaagagaagccaagaaatcatcatcatctcacgcatttcttgctcgaattccagctcgattgagcatcatgggttacaacgagctgattccggggttgccggaggaggtggcgagggagtgcctcatccgggtggggttcgaccagctgccggcggtgcgccgcatctcgcgccagtggaaggcggaggtggagtcgccggcgtacaaccgcctgaggaaggcggagggcctggcgcgcccggcgctcgcgctggtgcaggcgcggcgtgagctcgccgaggcgggcccggcggcggacaagcagtcgtcggccggcggtgtgccggggaactcgtaccggatggtgctgttggacccggcggaggggaggtggacgccgctgccggaggtgggtggagcgagtgggagcttgccgctgttctgccaggtggcggcggtggatggcggtgtggaggggaggaagcggctggtggtcgtcggcggctgggacccggagacgtgggcgccgacggactcggtgctcgtgtatgacttcctcacgggcgcgtggcgccgtggcgcggccatgccgggcccgcgccggtcgttcttcgcgtgcgccgccgtcggcgggaaggtgttcgtcgccggtggccacgacgaggagaagaacgcccttcgatcggcgctggcgtacgacccggacgccgacgcgtgggccgcgctccccgacatggcggaggagcgcgacgagccgcgcgggctctgcgtcgacggcaagttcctggtcgtcggcgggtacccgacgccggcgcaggggcgattcgtcggctccgccgagtggttcgacccggcgacgtccacctggtccgccgtccaagaaggctacgtcgacgacggcgcgtgcccgagaacctgcagcgccgcccccgaggccggagaccgcatgtacatgctccgcgacgggcacctcgtggcgcgccacggcgccatctcctccgcccccgcggcgtggcggcccgtggcgccggtgccggaggacgcgcgcaccgcggcggccgtttccgtcatccccgacggccacgtcgtggtcatcgggtccgactgccacggcggcgaccagacggtgtacacgctgcgggaggaggccggcaagcccgcgtcgtgggcgcgcgcgccggcgccgcccgagttctccgggcacgtccaggccgcctgccttctagaaatctgaagcgtattacagaaactaaattccgtgtataattgtgtatccatctatgtacatatcacatatgtgtgagtagcagagttcgagtttgtacagcaacttttgcgaggaaaaaaaatggttaaacgagtgtatcaattttgaaatttttgatcaaatgacagtgtgtgtttgtaacaaacacacgccttttcgc

SEQ ID NO: 14898 - DNA, 3714 bp, Oryza sativa
  ref <308>: DATABASE ACCESSION NUMBER: AK065436
  ref <309>: DATABASE ENTRY DATE: 2001-12-06
gactagacttagagagagaggtagccctaacaaacacaaacacccgcttcccccttcgccggcgatgcggtccaccgccgccgccgccgatgtgatcgatctctccagcgacgacgacgacgaggtgcccgtccccagcaccagcgccgccgcagccgcagccgcgcgccgcgtcgcgccctccacgtcccctcgcgacgtcacgccgtacgcgctcgtcgatgtgaagcccgcgctgctgtacccgctccagccaccgggcgtcgtcgtcggtggcagcggcgcgctcgtgcccgtgaaggaggagctcccggtgctgacgccggtgcccctgctggccgcgggctattccccgtccaccccctccaccaaggtcgccctcccggcgccgcgcctctgccgccagttctggaagtcgggcgactacgtcgtcgcccagcgcaaccccgacgccgatgcacccggtgggcggaaccgacttcggattaatcccaggttcctgcactcgaatgctacttcccacaagtgggcttttggtggtatgagaattgacaaatcttattagtggaaacaactccattttaggcaatgacttgattctaatacctttaattcgttcattcgttcgcataattgcaaccaagtttctactaacggtatttcctttagtaagaagttgtgatgtgtagtgtgtatttagttgcattggatcatatttcttgtttgccgaacagcaccaatcaatttctagttgtaaacatgtaatttggctaaagtaaataaaacttttacttcttaaggaagtattaacttcagtataaacaaattgaatattgtacatgttttgattatttttgaggatttaaaatcgtctttgccatgtaaaacgctgtgaagcccgtctttgctggcacggctctactttttgagctcaggatctggtaccataacaaacaagtggactactctatatgcggccgttatatacctacttatattattgtgtatctataaaaatgtgttagcgtttttataacctaacccgtcatgcaggtatttgcggttccattatattattctcttaaagtaatcaatcatattaggacattgcattgcattatatggcactattttcccactgatttatgttcagtattatgcttatcattttttcagccattgccgagcttcttgataatgcaattgacgaggttaacactggggcaacatttgttcgtgttaatgaatttacaaacccacgagatgggagttcctcattgttaattcaagatgatggagggggaatggatccagaggcactgagacgctgcatgagctttggattttcagataagcagtccgatgctttaatcgggcaatatggaaatggattcaaaactagcacaatgaggcttggagcagatgtgattgtttttacacaaaaccaaaataactgggtgccaacaagaagtatcggtcttctttcatacacatttttgatggaaactggctgcgatgatgttttggttccaacagttgattatcagtatgatatatcaacagcttcgtatactcagatgctgcgtcatgatcagaagctcttctcttcaaatttagcgatcctcttgaaatggtccccttttgctagtgaagctgagttgctcaaacaatttgatgatatcggagagcatggaacaaaaataattgtattcaacctctggttcaatgatgatggggatatggagcttgatttcaactccgataagaaggtaagtaatgctggcatattttagggctctattgggcgctgtccaatgatatgtgtttaggagcttctatgcttcagtatgtgggaatttgaaaagttgtaatgcacaaataaatggtgagttccactcattgcgtgtttcaagtcgtgcaaaacttatcgaagggggtgaagtatggaagcacttccccaacccccaccccacccccaccaaatcacatggcacatttgtgggcacgtttcagatacaccatcctccttccaactttctcatatagttatatgactggtttatacataagctgtatgtattacgctaagttgtaattgatcaattcgtatttaatattttaggatatcctcattactggggcacacaggaaggtgaataccaacaaggcagataaggtcgcaacacagaactacgtttcaactcgactccgttattctcttagagcatacacatctgtcttgtaccttcacattcctgataatttcagaatagtcttgcgtggacatgatgtggaatcacataatgtaataaatgatttgatgtatcctgaatgcgtgttgtataaaccacaaattgctgggcttgcagagctatctgcaataaccaccattggatttgtcaaaggcgccccagaaattgatgtacaaggctttaatgtgtaccacaagaatcgtttaatagcgccattttggaaagttgcgaacaactcatatggcaaagggcgaggagttgtgggcattctggaggcaaacttcatcaaacctacccatgacaagcaagattttgaaaagtcggtcctttatcaaaggctggagagccgcttgaaagaaatgacatatgaatactggtaaagtttttgttcttttaactatttcaacagaactttgtcatgtttctaattgttgcgtacttctttggggtttgataagctgtcttgaaaagccgcaagagatagaataatacatgagcagtggtagtggtgtgcagcagtgcatgcaatgccacaaagatgcatgagtgaatactgtatatgcagtttgtgccctttaggagttcgattatgtcaggattatttagaaaaaagaaatagtttacttattgattgagtacatgctcatctcagagtccatgtgaaattcgagttagcttttaacttctgttaggtatttctctcaaatatatagttgatgcttacatggcaatataggtgatgcttccacagcaatgcacttcacatattttttcacgacacaggcaagtgtgcactgtacatggcatgctcgcaatacacatgtgcaggtgcatgatttcatgaataaaaaacctaccagcgcacacatctgcattctcactcaattcatactgggcatttgtgacccaaaaagattgaggtcttaccatttcctcggtcagaggtataattccttttttgagatgcaagcttacatttgactctgctaattcaagattttgaatcctcaacccacagctgcaaaattgctttcttgtcatacttaacccagtgggatttcgaccatcatatggttgctgaaaaagttgcatagatggtcgcccttgccttgtccagaggctggctagttactcttgtacttaattataccagtagtatttgttgatgcatagtaacatttacgtgataaagtggaaatagccacaaccaaaaagtagagaaaatgtatggttggcagggtttcagcatatttgtctgacagtaaataggtaactggactaatctagactggtaggcacagcaatatatttttcacctaagtatcacgtcaaaaataatcagcagtctataatgtctatttttagctctccaatattgaacaaagacaaatactacttcatttgagatgcaatagccactatctgtcaacatcgtcttctggtatttctatacaacttgtgc

SEQ ID NO: 14899 - DNA, 4208 bp, Oryza sativa
  ref <308>: DATABASE ACCESSION NUMBER: AK065437
  ref <309>: DATABASE ENTRY DATE: 2001-12-06
ggtgttgagtcctcaaaacattttcattctcattttttcattttcatttttcagttcttcacctcctctcctcttcctcttcgccggcggctcaaatcaaagtcttccgtgcccgaagccgaccaccgcccatccgttgcttccacacaaaacctcacccaggctccccccctccaatcgctctctgattctgattggcctccgcaaacgcccgccctgcctgctgctgatgtttgtttttttctcctgattttcttttttctcattgattgggggttggtttctagtttatgccctcgtttcttgccatttcccgctgagttcgtggcgcctttaatctcgatggattgactgattgattgattgattgattgattggaggcggtgcgagcgggaaagagtggattgtttcctggacaagagcaagcgggaaagttcgttcttgatttctccgagttcaacgaccacttccatgtttccaacctgaaccacaagctgcagttaaaaaagataggataggaggagcaatctccggtttcttgattttttttttttttgaaccgcgcccaaatcgtgattcttggaagaagaggggaaggagggaaatgaggctgctggtgcaggtgagcgaggcacgcaacctgccggcgatcgacggtggcggcgggctgagcgacccgtacgcgaagctgcagctggggaggcagcgtggcaagaccagggtggccaagaggacgctgagcccgacctgggacgaggagttcgcgttccgggtggtggacctcaaggacgagctcgtggtggtggtcgtcgacgaggacaggtacttctccgacgacttcctcggccaggtcagggtgcccctctccgccgtgctcgacgccgacaaccgctcgctcgggacgcagtggtaccagctgctgcccaagagcaagaagtccaagatcaaggattacggagaaattcgtcttacaatatctctctctctaaattaccctgaagagacaacgacacttgcacattgcgtttcagatgacctcgcgtcatattctgacaaatcaactgaattacagaaaggatcttctttgccaaatattcctatagaaatacccacgtcagtatcagggggtgatgaaacagaaatcatcaaggaggatagatcaaatggtgtcccatcatttgtcaatcgtctgtatcaatttttctcagcgaaaccaaaagatgcagaagcttcagcttcagctccacctctcactacgggcgatggtaattcagatattcttgaagaaacaccatcaactagttcagaacttcctgataaccaggattatgaaactggtgtaactatgtcctttgatgaacaactaaaagcctttggatcttgccacgaagggaatgaaatacctgaaaacttgtcaggtggagttcttattgatcaagtttatgctgttgcacccagtgacttgaatggacttcttttctcaccaagttcagatttcttgcaatcactagcggagatgcaaggaactactggtcttgaaatccaacaatggagacttgaaaatgatggtgaggtcttgaagagggtagtaagctacacaaaagctcctactgcactagtcaaggctgtgaaagcaacagaggatgtgtcatatctgaaggcagatggagatatatatgcaactttagctgatgttagtactccagatgttccatttgggaattcttttagggtggaggttttaacatgcataatgccagggcctgaactacctgataatgaaaaatcctcacgtcttgtagtctcctggcgcttgaattttatccagagtacaatgatgaagggcatgatagaaaatggggctaaacaagggttgaaggataactacattcagttctctgaactcctggctcgaaatatcaggccagttgattcaaaagatgcagcagctactgataaagttttgtcttcagtacaaccagagcaagaatctgattggaaactagcattccgtatatttggaaattttactgttgtatcctcactggttgcattcatttatgttttttcacacatcatccttgcaagccccagtataattcaaggtcttgagtttcctggcctggacctaccagattctgttggtgaagtcgtggtttgtggagttcttgttctgcaaggacagcgtgtcctaaatatgattgcacgattcatccaggctaagaggcagagaggaagtgatcatggagtcaaagcacaagggaatggttggttgctgactgtcgctctgattgatggtaccaatttagcagcaaccaaatcatctggttactctgatccatatgttgtatttacctgcaatggaaagacgaagactagttcaattaaatttcacactctggaacctcggtggaatgaaatttttgaatttgatgccatggaagatcctccatccgttatgaaaataaatgtctacgattttgatggaccatttgatgaagttgagtctcttggtcatgctgaagtaaatttcttgaaatctaatctatccgagctttccgacatttggattcctctcaagggtaagctggctcaagcatgtcagtcaaaattgcatttgagaattatcttgaataattcaaggggtactgaagtcatgaaggactacctagacaaaatggagaaagaggttggcaaaaagattgctgtaaggtctccacacacaaactcagcattccagaagatcttttctttgccaccagaagaatttctaatcaatgattttacctgtcatctaaagtgcaaaatgctcacacagggccgcctgtttttatctccaagaattattgggttctacactaatctttttggccacaaaacaaaattcttctttctttgggaagatatcgaggacatccaagtgatgcctgcaacactatattcaatgggaagtccatctctgcttattattcttcacaagggcagaggaatggatgcaaggcatggagcaaagcaacttgataatgaaggccgactcaagtttcatttccagtcttttgtatcgttcaatgtggcacataaaacaataatggcgctctggaaggcaaggtccttgacccctgaacaaaaagtacagctggtagaagaagaatcagaaatgaaagacctccagaataatgaaagtgattctttcttaggaatagaggatgcaaaaatgtcagaagtattttcatctacaaaaccttttgatgtatcaacactcatgagcatatttgagggtggtcctttggagcatcaagtgatggagaaaattggctgtatggagtactcagtttcaccatgggagtccgtcagagctgatgcttaccagaggcaaattcattacaagttcgacaagagattggcacgccatgaaggggaagtaatgagcacccaacagaaatcccctttgcctgataaaaatggatggcttgttgaagaagtgatgacgcttgaaggtattccagttggtgaatacttcaacctgcatatgcgataccaattggagcagatctcatccaagcccaaggcatgcaatgtccaagtgtctattgggatcgcatggttaaagagctgcaagaacagaaagaagattgctcaagaggtactatccagtgcatcttctcgcctcaagaagatgtttggcctactcgagaaggaattgttaccagccaagtaggggccctttttcataccctgcgttttctggtgcacccatgtatagcccgaaatcgtcgtctggtgtctcttggttttgacaacatcttgttcctgatgctgagcaagaatcagtacataatgcgaaaggttctaacttcgcaggcaaggcagtgtaccataccctgatgaacatctccccatgcaagattcagactggagaactgacagcagagctaggaagttgttctagtcatgaaaacgttactgttcaaatgcagttcttgaacaagaggtttggtatcttgcctatactcttcaagatagatcattcgaaactttggtctgtcattgtagttatcagttgtcagtccctttagcaacagaaaacaatgcagcttccgtagccattctttttttagatttttactccagcaaagattacatgatctgttgttacggacaaaagaaatgggaaaatttaccagaaaaactgagccactgtttaacc

SEQ ID NO: 14900 - DNA, 1296 bp, Oryza sativa
  ref <308>: DATABASE ACCESSION NUMBER: AK065438
  ref <309>: DATABASE ENTRY DATE: 2001-12-06
ggcagaagccatcgtgtcataggtgtggtgtgtggagaagcggtggaccgaccgacgacggcggcaacccgcacggcgaggcgaggcgaggccgacggcggcggcgcgcgtccacgaaaagcgggggggtatctacctgtttttcgtataagcccctcaagatctaggaaatcgcggggcgtggtcctcggcccggggcctttaaatgcgggggcacccatgtaggccggagcagagcgccacgaggcgagttgttgggtgttccctagactagccgtctcttcctcctctccctctcctcctcctcccgccgccgcctgcaaccgcttcacgtggcctgatcctcctccggagctctccctttcgaccccaacaaatggagcccaagaggtcccctgcgctgccgcagcccaacgtggagaccaagaagtcccctccccgcgctgccgccggaggaggcggcggcggcacagctgccgtcggtggcgagtcgccgttgagcagcctgttccaccagccgtcgcatggggcaaaaggcaaagaagacatatactccattttctacaaagggcagaacgggactgcacaagctgggactgcagatggtaaatcccagtggactcctcctaaaagtcgcaccgtgtacaccaaggataacaaacagtcaaatcagtatgattcggttgatacgtcctgttttggttcttctgtgaactatggtggtcgagactattatggaatctctggacacaagcaatccacagaatccaatgattataaggcggacaaaaaggacacttccacagattctcatggtgactggtggcaaggttcgttttactactaagcgaacttggtggcctctcccttggtggaaaagggaatggaatgggaggggttggagctggttttgcttcactgttgctatgctggccgtatcagttacctaaatcatactagtgtgacatcgtccatcagtggtggcagtatttggatcatcacacctgggcagatgtagtgtgtctttaccttttcatttcgtagcttgtgctttagatgtgaaatgaatcgaacttacaagcacagtaagttttaggtcgcaggttgcataaatggtccctatccattctgccaaatctggtcagtaaccagattggatcagtttggtctggctctcttagatcgaagtatatgttccttgtactctcggatcttcgctccggagccaagaaggctggagaagtggagatcacttgcattgtaaacatgtactcgtttaatttcaaagaacttagc

SEQ ID NO: 14901 - DNA, 2632 bp, Oryza sativa
  ref <308>: DATABASE ACCESSION NUMBER: AK065439
  ref <309>: DATABASE ENTRY DATE: 2001-12-06
ggcagagtggtgtggtggtattggcggacgccgctgacaccgtcgccgccgaccggccgttgtccggcaggcagaggccactggtgtccaaccgcggcaagttcgcgctaggtttcttccagccagaaaactcagagcattggtaccttggcacctggtactaccaaatctccaagcacacgccggtctgggttgcaaacaggggctctccaatctcgaatccggacacctcacaactaaccatagcaaccgacggcaacatggtattactcgacaattcaacaactgcaatttggtccacgaacatctccaacttcacctccaattccacggtcggtgtcatcctcgactccggcaaccttgtcctcgcagacgcatcgaacacctccatcatcctctggcagagcttcgaccatttcggcgatacctggctccccggcggcaagctcggccggaacaagctcaccggcgtgagcactcgtcttgtcgcatggaaggcacgcaatgacccagtccccggcgtgttctccctcgagctggacccgaacggcacgagccaatacctgctccaatggaacagtacactgcagtactggacaagcggcaactggaccggccgcatcttcaccggcgtgccggagatgacgccgaccggcagatacccgaattcgctgtacaccttcgactacgtcaacggcgagaacgagagctacttcgtgtacgacctcaaggacgactcggtcctcacgaggttcgtcttgggcgagatggggcagatccagttcttgacatggatgaacggcgccaacgactggatgctgttctggtcgcagcccaaggcgcagtgcgacgtgtactcgttgtgtgggccgttcagtgtctgcaccgagaatgcaatggcatcttgtagctgcctccgtggcttcggtgagcaaaacgttggcgaatggttgcagggagatcacacttcagggtgcagaagaaacgtggagctgcagtgcagcagcaatggctcggtggtaggaaggagtactgatcggttctacacgatggctaatgtaagattaccaagcgacgcagagagtgtggtggccgcaggtattgatcagtgtgaggaagcatgcctaagtaatgttcttgcactgcctactcctacaatggcagctgctcactgtggtacagagacctcatcaacctgcaagatgtgagtgtcattggtagccaaggcagcagcgcagttttgattcgattggctgcttcagaattgtctggacagaagcaaaagcataccaagaagttgatcactttttctgtccttgctactggtgctgtactactcatgatagctgttttggttgtcatcttgagaagaagaatggtgaaggcaacaacacgagtggaaggttccttgatatcattcacataccgtgacctgaaatctgtgaccaaaaatttctccgagaagctcggaggaggcgccttcggttcagtgttcaaagggtcactgcctgatgcaaccatggtggccgtgaagaagctcgaaggttttcgtcagggggagaagcagtttcgctcagaagtgagcacaatcggcaacatccaacacgtcaacctgattagattgctcgggttttgttcagagaaaactcgaagactactcgtctacgagtacatgccgaatggttcgttggacaagcatctttttggaagtaaccaacacgtcctgagttggaacacgaggtacaagattgctcttggaatcgcgaggggattagactacctccacgagaaatgcagggattgcataatacactgcgacatcaagccagaaaacatactgctcgatggctcgtttgctcccaaggttgcggacttcggcctcgccaagctcatgggccgcgacttcagccgggtgctgaccacttcgaggggcacggtggggtacatcgcgccggagtggatcgccggcacggccgtgacggcgaaggcggacgtgttcagctacggcatgacgctgctcgagatcgtgtcggggcggaggaacgtgcaggagcagggtggcgcggcggtggacggcctgctcccgttgctggcggcgagcacgctcggcggcggtggcggcggccgggatgagctggtcagcgccgtggtggacggccgtgtaggcgtcaacgccgacatgggcgaggtggagagagcatgcagggtggcgtgctggtgcatccaggacgacgagaaggcgaggccggccatggcgacggtggtgcaggtgctcgaagggcttgtggagatcggcgtcccgccggttccgagatcactccaaatcctcgcggacctcgcgaatcagtcgaataacttgcggtttttctccgatttaccgtcaaagtgaggcggttgcaggcttgacgccagtctgcgtttgggcggctaagcgttaaaatcgccagaacttgcatactcacgttaccaaaacttgctatacttcatttaactaacatgcttaacatgtggccaataaaattgaagccatacttcagccataggagagtacacttgccacacttttatgtgtcaatgacagtgggacccacatcatggtgaaggaatcttgccaaaagtgtggcaccaaccg

SEQ ID NO: 14902 - DNA, 1853 bp, Oryza sativa
  ref <308>: DATABASE ACCESSION NUMBER: AK065440
  ref <309>: DATABASE ENTRY DATE: 2001-12-06
gggagatcaatctgctttcacgtctcctctctctctccgcgtgcttcctccgagggtctcctcctccaccgccgtctcgcttcccggcacgcgcgcgcgggcggcggcgagctccctctccttcgccactcctccaacccctgtgcggctactccggtgcggagccggcgagcgagcatgttctaagtggctctcttccttaaatctctctacaagaggcaattgaattgaagacagcaggctttcataaaaggcatggctcatgatgaagctgttgctacacaaaagattgggaaaacaacctcccctcctaaggatcaaccaactccatgtccatttcctgattggtccgctgttcaggcatattatggccctggtgtcttaccaccgacatattttgccccagcaatagcttcaggccatgctcctccaccatatatgtggggtcctcagcctataatgccacccccttttgggaccccgtatgctgcaatgtacccacacggtggagcttatccacaccctcttatgcccatgatggcaaatccattgagcatggaaccagccaagtctgcaagcagtaaggaaaaaggctacaacaagaaacttaaggaagttgatggggctgcagtatccactgggagtggtgacagtaaaaaaacaatgacgtctagtggggattacagtgcagaaggctctagtgatgtaaatgatctaaaggtgggcaagactggcaggaaacggagattggatgatggagctggtgctgaaacatcagcagctgcaaagatggaaaatgctttacctcccagccatatattgggaagtactgcgattttgccaaatcacagctttccagctcaagtaattaggcccagtgctactaatgttgctaattcgagggcattgggcacaccaatatctccaccgcctggtgtgattgttccaagtcatacaggagtatcaacagaattactgatcaaggatgaaagggaattaaagcgtgaaaagaggaaacaatcaaatagggaatccgccagacgatcaaggctgagaaagcaggctgaaacggaggatctggctacacaagtagaatcacttacagcagagaacacgtcacttagatctgaaatcagtaggctatcagaaagctccgagaagctcaggctggagaattcggctctaatggggaagcttaaggatcctgcagcatcgacccaggcagaaacatctctgcagaaaaccaccacagcctcctctcctcgcgtcgtggagaactttttgtcaatgatcgacaacacgaacaagacgagtgtcagacacacagagcatgctgaacccaagcttcgacaactcctcggctccggcccggccactgatgttgttgctgcaagctaatctgccattttccctgtcacagaggagagactacgcgcatgcggcctggggattttgcaagctcacgctactactcacataacattcggcagtacagtgttaggtgtcaatttggtcagtatattcaggtgaccatctactactcaaaataccgtttccaattgctgttccctgctcaggcatggaagcttgctaggtgagaccaatgtaccacgttttagcagtgttgtaacataggggtgttgtgctgcatgccaacctcaaaccttgtgagatcgctaaacactttttagaattgaaatttgtggagaccaaactaaatgaaatgtaacctaccctttttacttgggtatatgggcccatattctttacatggcttggaactgtaactttgtaagatgtttttagtcaaacttctttaaaatttatatttataacactaaattagtttcatt

SEQ ID NO: 14903 - DNA, 1930 bp, Oryza sativa
  ref <308>: DATABASE ACCESSION NUMBER: AK065441
  ref <309>: DATABASE ENTRY DATE: 2001-12-06
ggatgactccgccgccgcgctacttgctccgtgcctcctccctctttccccgacggagatgaggtagttccccaccgccaccgcactccaccgcggcctgccctcgccggcgctgctcaccctcgcgtcgatggatccgacgccctacgcccaccgccctccagccatccgctgccgtctggcgtctatcgccgtcagtattggatgcaggccgctgccccggcgtcgactgctctcactattggatcaaggccgtcaaccaccgtcgggcgtcatccactgccacggccgcccgccgcccaatcgagcaggccaacaccccatctccaacgcctgcgagccttgtaggtgaaccatgtacagaggatgctggtggaggtgtgggggctaatcactaatcaaacatattttcgtggatctaacttattacctgagttctcctctttggtgatggagccggttcaggtgccctgtatgcctgtaatggaatagttgccacatccccaggaaatcaaaaggagtaaaaactgttcacttgttgcgttaatgtgtccctgactccctgacatgtcaaggagactgacaaaaggatttgaaatattccaatcgatgtggtacttcttcactaattcgttatcagaatggttccaatgatgcagcataggaggaggaagaaggttcaaaattcaagcacaatggaagtcggcaagcacacatgtggattcagatatgcagtgaataaacaaagaaacagtctatttctgccataaaagatttttttggacatgatatttctgccattaaagattggcaattgaacgaacgaatgtgcatggtctgttgcacacactggtcgttgtagatgctgaatgcatcgtcgaattaagctaggaatgtgattgaggggccgatgatgattatggtgtttgtcacgagtaacattgacctgatggtgccggcgttcaacacaacgggtgactagttgaatggtcaagcggctgcttacgctggtgcctaggttggtagacctggcgtgctcaagatcaccagcgcggtgagcatctctgccaccgatgctaggtggttgctgaggtgatgttcttcaacagtgggatcccattgctgctcattgtcgaatgggatggcaagccagttggtgatggtacctaaactaagttttgattaattggagcagtgctgattggaaagagaatattattggagcaatattattgggaaaatgtattttgtgggagcagtttggcaagggttttattggagcaattctggttggaattatatttgtatcggatcaatactgattggaaaggattttatcagaccaatgttgattaggaaggtttgtgtaagtgtggtcagaagtttatcccttcgcaattcaatagattcactctattatgcttacaagaactaatgtgcttttttttttgaaagaattattttctttgagatcttgatgtttcttgtccaggcattcccatgagttgcaaatccaaggaagttgataacacccatagtctcatacaatggaaagttaacctttctgcaatatttcagtttgtctcaactttcaattagcacaaaccgctgcagaggccaaagcaacaaaagccattttggcacagttgcagtgcctagaaaacatcagaaattgagaagaatatatactttgtgtggtgaatgtgagcttgaagtgcaagaaggtagatgagcagttagacctttctcagaagtaaagcgtcttcaagcacaacttctggcttttgggagtctctgagatcgacatgttcctagctaatcgatttatcaacttcaatatcatcatttagtaaacttatagtactttgttaacatggaattaggtgtgtgacttctaaagttatataaagtatcatcaagagtaaagtcc

SEQ ID NO: 14904 - DNA, 4128 bp, Oryza sativa
  ref <308>: DATABASE ACCESSION NUMBER: AK065442
  ref <309>: DATABASE ENTRY DATE: 2001-12-06
ggcaagcaacgtccgtgcaagtagtgctccattattctagcaaagaaggcaagcagaattcatccgcttaaggatcagaaccagatcgatcagttcgatatatcgatcgacaatggttgttgcatcagcagcatcgccgtgcgagtccagtgcgttgttcgcgacgttcgaccacgacggcgacggcaggatctccgcggcggagctgcggctgtgcatgaagacgacgctcggggaggaggtgtcggacgaggaggcggggcagctggtggcgtcggtggacgcggacggcgacgggctgctgtgcgaggcggagttcgtgcggctggtgcaggcggcggaggtggaggaggaagacgagcggcggggcaccggcctccgggaggcgttcggcatgtacgagatggaaggggaagggtgcatcacgccgacgagcctcaggcggatgctgcgccggctgggctccgaccaggacatcgacgactgccgcgccatgatctgcaggttcgatctcaacggcgacggcgtcctcagcttcgacgagttcaagatcatgatgaacgcctaaaccagctgctatctgctgatccctccgcagttcgtcaccgagttcgaccccacccaaaccctagccaccggggccgcgccgtccgtcatcgcgccgctccagaactccggccacttcctcaaccaccgctcccgcaagccctcctcgctccccaccccggaggaggaggccgccctcgccgcgtccgccgccggcggcccctccttcgtgctcgacacgtccaccgcccccgacaacccctcctcccacatcgcctatggcctcaccgttcgcaacgccgcggcggagttggagaaggcggcggagccggagaagacgcccccgcctcctcctgcagctggtgcccccagcggcgaccttatgctgcggaggtacaaggaggacatggccagtctccccgatcaccgcggcctagatgagttccgcgatgtgcccgtcgagggatttggtgctgcgctgcttgctggatacggctggtcggaaggtaaaggtattggcaggaacaataagggggataccaaggttgttgaatatgaccgccgtgccggtacacaagggttaggctacaatccctctgaggccgaccctaagaagactcgcgctggcgaatgggttgttggtgggaacaaggagacccagaatggaaatgcgaagaagagagaccgtgacagtagaggtagaacagaggatagagactcaagctcccgccagaagagatccggtgagcggagggcagagagagaggtccaagaaaaggatagaaattctcgacatactaaacaagttaagattggtggtggtggaggtgacaagatgcggtggttacacagcgatatcaaggttagggtggttagtgagaggttgagcaagaagctgtacttgaagaaggggagagttctcgatgttgtgggacctacaacatgtgacataattatggatgatcagtctgagctggtgcaaggggtagagcaggatatgctcgaaacagtcctgccacggatgaatgggctggtgcttttgcttgctggggagcacaaaggattatgtgggcaccttgttgagaagaattcagaggaggagaccggagtggtggagctgtccaatacaaaggacatgatacgagtgaaatacgaccagatcgcagaatatattggagacccagagtctcttgagtactagttcttcttattcttgaggagccagcattgtctaccaagagttcttctacgtgctaggtaattccaatttcttcttaatggtaaactataaagttgctgcttggacgtgaagttttgaacaaatttatagttttgctttgcagtaacatatttatgtaagtctgctacatagtgattgaagtctctctgagaccccgagtaatgggtcatcttgttttcatgtctcctttgcgtttgtttctttctaaagccttaagtaaactgtcattggcattctagtaattagcaacttgcaataattgatgattctgatagccctgcaatgaagggttatatatcaatgttggaagcttcctgaacatcctagcttctttaaatcttttacattgctatgcgtgtgaggacaatccttatggttattactgagttgcataggctgtaggcatggcctgatctcactgttaaacttcaatatctgcaaactaagcttgtgaaaaacatttttgtatgcatcacattatattatacatttactgtacatttataattaggaattttgttgaatatcagcatacacaactcgcttgggactaaagtataatgttctgttgttgattttcctggacatcataatgtgtaaatccttggaagggaattcttctttcaaatatttgtagagcctttatggagcatactaaaatttgtggagttttcattaaggggtttttgatgatttgccactctttagattggagatttgatgatttaccatcttgacccacatgtcatgaactcagagggtcccaaatgtcattgtcatagggtgacaagtggcaaatctgattattaataggtattgcagcacttatatgagttaatataaaaacttgctcttattttgtgattatcttgtatgttagctattgattgccattggaacaccgtgggatccaaactttgtagatcataataccccatgtcggtcgcatacacatgtggagtgcttcacagccataccattatggtactaatttcacttcaaggacacgcatgaccacaatagttgggccacagtattatactcacctgcctattaggctgactctctttacacttattttaaaatgagcttctatcatgtgtgcatattatgaacaatggttgcttgtatcgatttgatgatgataaacatccacagacattaccctgtgatgccataatcccataaccacatcaacgggatctaattattgcaacacaacattaaactggtaaatgtggattatgtttatcatttctgatgatacagtgcattttgttgcacccatcatacagttcccatttgtggtgctcatcatacagttccctctttttattttgcgcccatcaaacaatctaaaaaaacattgtcctgtgattttcctcactaatccattaacacttcttacaccttctggttcttcatttgcatgctgacaagtaatggggttatttgtagaatcaacaatgagaaggtcaataaccttccatcaaatatgtcatgacccgaggccatgactagataaacaccgttgggaagatagtcgggcggtgtcggctcctgtagaagggatacagattttgtctagggagaagaacattgttgggagggatagattagactaattgatattcattgcttaattcataataaacacaaccccatccttatatagatggtaccaacttgacccctaagtaaggacttaatttatcttatctctaactaactaataataatatctctaacttaattgatctgggctgcctatgggcctctgccttccggcccaatgcccatgacaaatatgcataaacttttgactaagttcctttggaatatcttgaatgcaccctttcggtcagcagcttccagttatgttggcacatattactccatagtgcaaattggtttaagcccattatttcttattcactgatgcataaatgcctggattttactgtattactgctctagtaatatagaatataattggtgggcctaatttatgtttttaaaatggaggaatgcacatttccccgaagatgtccttgatggattgtaactttaaggtgttaatgagggttacataaacctgaaaacagagaagccaattgcttatggatgttgcaaaaaaggtgaagctgaaagtagaagtgaacttaacatcatagcctacgcaaagcggtgaaaactgacatgctttcagatgacacatgtaccattctgtcccatgggtttattgacaatcaactggattttatgtatttgaagtatgatgccctttctctgattcgcatatcaatggaaaaactcaaaaccgtctctagattttgcagatg

SEQ ID NO: 14905 - DNA, 3102 bp, Oryza sativa
  ref <308>: DATABASE ACCESSION NUMBER: AK065443
  ref <309>: DATABASE ENTRY DATE: 2001-12-06
ctgttgtattgttgcgctttgcaggtggattaagaggattcgtgatggacagataacagtagatggtgaagttgccactgatccagatatgattctcagggagggttctaagttggtatatcatcgcttaccatggcaggagcccttcgcaccacatttacttgatgtgctttatgaggatgatgacatgatagcccttaataagccttctggcttgcaagttcttcctaaaggacttttccaacagcgtactgttttagcgcaacttcaattgaaagactggaagatgccttcatcattctgctcaaagcgaaaagatgcgcaatcacaccctgtacctgttcatagactcggaaggggcacatcaggtttgttcctctgtttttgttctgttcatgctcagaaaccttggagcattgacacccagttgagttccagtggatgtaaatttttgttcaccgaccatcaatcagtcaaactagtggtctagtctaaaatttataaattgttcctgggcattaaagccaattcgcttcgacaccaaactagtttctcagaagagactgaaccatatgatataaacataaagtgctgctcataggacttgttcctctaatattataaacaacacttctgcagtgaaatgtgaattgcagaaagatgtttgttcactactgagaatcagcacaactgcacaagctcgtatgatttccttttttttcttcgtttcgttctagctttgggtaaaatccataatccccactccctcgtttgcatatctttccagtttgatgtttcaggctcaaatcatgtagtttaagcactgcagtcactgaaataattgaaaaaagtattcgtatcaatgaaacatgcactgaataacaacataattaagaaatagcatgaacatgtgtcatgaggtggaaactgcatacttaacctgtagcaaattttgcttaaatagaaaatgagataagtgagacaaaatgaaacagcaggtgacttatcaggagtttatggatttttcactttaccttttgatgactttctatctcacaatctatgtgttgtatcctaggtttactgctttgtgcaaaaacaaagcttgccaaagctcagcttgcagcttattttgctgaaggcgctacaaacgctggaaagagcaggtataaaactactctttttcataattcgaaaaaaaattcttgctattttttcatcttgtttaagatatttatagggatgaaacagatatttgcaaagcgcggaaaatttcaaagttctatcgagcactagtaactggtatccttgaaaatgatgaggtattgaccttcccccctcatttttgttatgggaaatttattgtttgctattacttagagggcatttcagcatttttttttcaccccttgtctataacacatggtgccctagggccacatagtcagtatgccactctagaggagttggaaaacgatcaaatttccctaaccacataattccaaatttccaatacgttgaattctgttctattcaatatcaagctatattcgcatttcttttgtttgtgaccatttgtccttccagatcagtcatgtgtaatattgttgtttatataaggcataatttgtttccaatgccttgtaggttatgattacccaacctataggattagttcgttatcctggtgtcgcggaggggctttatgcagcatgttcctcaggttattgcactaccacattactggtctaacattgaattggcgaaaaggccaataaggagtaaaggatgagtttagtacttctgatgatgcagttcatactgaggaaagcataatcattatttcatatgcattattttttggactgttttttttttcagggaaaccagcaatgagcaaagtgcgtgttcttgagagacttaaaatccataatcatacattgatccaggttgaaattcattcaggacgcccacaccaaattaggatacaccttgcatacattgggcatcctcttgtagatgaccctctatatggcattggtggtcagccaaaatttgatgaaccagaacctactagtacagctgattcttttgcatatgatggaggttatgagagacctttgcaacctgtccctggagattgtgggtaccacctacatgcacattggctagttctttgtcatccaactacaaatgaggtactgtaaaatgaatcatattgaatttgggtgctattctctacctgactcgtacaatagctttcaatcccaggaactggggttaaattcatatatcgaaggtggggaaattacatattccgttgtttattggtggaaagacataattagaatatgatagtagggcccaaatttgtagtagaatagtgagcctcattaagttgcaagcctgcaaaatatattttccaaaaaaaggaaatacagctcgctccttctattaaaacttgggcctgaataaagcagttgggaggtgatattcaatatgctggacactgtacgcgctaagaattggctattgtacatcaatatattcccgaagataatggttaacgataagcattcatgtaattgaggactagcacttataaaaggacaactcaagatccagaaacctaaaagtgaccttcaatgttgcgtcctgactggaatcattgtaatcgctctattccttgcttagcttacactcatcataattttcttagcagatgatcaaaatcacagctcctctgccacatatcctacagactagagaggaacagcaagatacagctaagctactcggtggttgaacccttcaattttcatggtcagcttgagttcacaggctccagtgaagcagggcaccctatacaacaaaaaaaccaagtgaaaacttcaggttctgtactgggcaatggccatctattgctgcaaaacccatggagatggacgccgattgatactcctgtccacctgtgggtgcgtgctttgcgactagctaaccactgaacgctcccaagggctagttttttaatataatattttgatattttctattgtatggtcaaaatcaagaattgatctcagtaagtactcttttcgttcc

SEQ ID NO: 14906 - DNA, 1677 bp, Oryza sativa
  ref <308>: DATABASE ACCESSION NUMBER: AK065444
  ref <309>: DATABASE ENTRY DATE: 2001-12-06
gactcttcttgtctcgttctactctcacacacaaaagttcgctagtaagttacttccaaaaaaattaaaacgatttataacatcaaccggagtagtacgtatttgcaaattgcgggcatgagcaccttcaagcatggccgcagcaacgacgaggcagggaacaatcaagaagtcacaaggatgacatacaaacgttccagtaaacaagtcacatctgcaactggatcgcaacaaccgtctgtcagcgaaccacccgaaggcacaaggatgacatacagacgttccagtaaacaaggcacatctgccgctggatcgcaacaaccgtctgtcagcgaaccacccgctgatcggagaatgatatggagcaagcaatccaggcggtaaacacaatcgcgtacttccccggcccatgataaatacatagcgcgtgagcagcggaagcatgcatagaagatattcatcggatcgaagatggcgttcagctatattgtaataaggaacatataagaatccagccatacttcccggcgcaccatctcatacatgtgtgtatagcatacgtacgtgcgcgcgtataaatatccatacacaaccacattgccggtgtggcagggtggggaccggcagatgggcataggcacgaggtcaaggcgtcaagcaccttgcgatatttctgtagctaatctggcaagaaagagagcatggaaacaaagaaaacagagaggaacagagcaacgcttgagggaattcttctggatttctctatctctaatccatttcaatttttcaattacagagtccagcttataacataaaagccacacagaatatcaaggaaatattggaattaaaagatgggccttagtctattataatcgtccactataatcaactaaactatagtgatttactttggtgtatagttaacattaacgtaagtaattaatctacttagacacggtgtctaggtagttaattttcggtgtttgctccgcatcccacagtaggtgtgaggtaggtgtagaggtggtgacagccctcacgatgctgaagtcacctctgtccgggtgtgtagtagagtgatatctgggagcagcgagctgtccagtgcctgttgacggctgttaaatacaaaataacaccgtcaatacctgcataaaactataaatgtgaaacatcaatcatagtggtaggttttatttctaatgatttccaccagtgttggtgtatatttgtatgcaggtgacaaactactaaagttgagaggaaataaacatatagggaggggaattatacatcccgctggagtccatggagtgatgagcccacaaactatattaaatcattatttattgggccaacgctagaagaataataaagtgggacccaaatgtcaagaaataaaagaaggccggagacggttgggccagcccatggttcggccgaaccgccacaaagcccaattcatcccagccttccacatggacgtccagggttgctccctaatgacggttggagggcgtttaggacatttctcatagctgtaaccgtcatatgaagcctataaatagagctcctctctctcacttcactcacacaccaaagcatgagctgaattacaagaggctctagtgtactttattgtatattagaaaagagagagagtaaggtagaagg

SEQ ID NO: 14907 - DNA, 1936 bp, Oryza sativa
  ref <308>: DATABASE ACCESSION NUMBER: AK065445
  ref <309>: DATABASE ENTRY DATE: 2001-12-06
ggctttggttccttcttcttccattccattgtgttgatgagttgagttggctcatctcatcgtcgccgtccttgaattgccgcctcccatcccacgaattccgcccctcccaccctcctgagatctctctctctcccccacctccgtatttaggtaggcggcgggcgcatcacgttctattgccccctcctgcccgccgccgccgccgcacagccggcgatcgagcggaattcccattcctttccgcccggtttccggcgctgccgcccccctcttaccatcccgggggggcccagaggccaggagctgtcgccggaggatttcaatttttcggagccatttgatgctaatgccacaccaccactcctgctaaagctgccctcattatgaactcgctggacaatgagtagcaattgcacattgctgatttccatctcctgcggttacattcgtacacgacagcatgggaaaacttgcagctgttgttcgcagtgtacttagattaacaaatgaaagcatgaggattgttatggtaacaattattggagtgctcttgggcttcttcattggaatttcattcccatcagtcagcataacaaagcttcactttccttctagctttgtatcatacatagaagacagaaactctgggctcactacacaagctttgcttaatcacgcctggacttccgcccgaaatgcaagggaaaacagttctgaaccaagttcaaacactactttgaagatttatgtcccaacgaaccccaagggtgcagagagactagcaccagctattgttgtgccagaaactgacttccatttgcgcaggttatggggagaaccaagtgaggacctgcccttcaaaccaaagtaccttgttactttcactgttggatatgcacagaaagaaaatatcaacagagcagtgaagaagttctctgacaattttgctattctgttgttccattatgatggtcgggtgagtgagtgggacgagtttgagtggtcgaaacgagccatccatataagtgccaggaaacaaactaagtggtggtatgccaaaagattcctgcatcctgatattgtggcagcttatgagtacatattcatctgggatgaggaccttggggtggagcatttcaatgcggaggaatacatcaaacttgtcaagaaataccatctggagatctctcaacctggtttagagcctgatcggggattgacatggcaggtgacaaaaagaagaggtgaccgcgaggtccacaaggttacagaggagaggccgggctggtgttctgaccctcatcttccgccttgtgctgcctttgttgaaataatggctccagtcttctctagagatgcatggagatgtgtatggcatatgattcagaatgacttggttcatggatggggccttgattttgctctcaggaaatgcgtggagcctgctcacgaaaagattggggttgttgattcacagtggattgttcaccaagtggttccatctctcgggaaccagggcaagtcagagaatggaagaccagcatgggaaggggtgagggcgcggtgcaggaaggaatgggggatgtttcagacgagaatggcggaggcggagaaggcgtactacaagatgatgggcatcacccctccgaactccacactggtgtagatctaagctaggctgattcttcatcttcatcttcactcccatctctgcctctgtctgaatgacgaggattctgatgtgttttacctgctgtacagacagttctgatgaactgatgagtgtgtaggtaggtggtcagatagagtgtggattggatggtgatgattgtagagcatacatttacacatgagggagggagggccatcgatcatgaggagggtgttatacataccatctataaaatcgattattttgtgtttttgtggtggt

SEQ ID NO: 14908 - DNA, 2338 bp, Oryza sativa
  ref <308>: DATABASE ACCESSION NUMBER: AK065446
  ref <309>: DATABASE ENTRY DATE: 2001-12-06
ggtctaaacagcagttaggatcggtcaaagcaaaaaaaaaaaaaaaaaggaacgctcccttttgtgcgccagcccgccgccgcctcctcccgccggagccgctcagctcctcctagcgcgcgccagcccgctgccgccgcctcccgccggagctgctcgcctccttcacgtgctcgcccgccggagccgcctcaccctacccaccgctgcctgcttccctgctcgcgccgcgccgtgatggagaggaaagagaggcggggtctgctcgccctaccccgccgcctcctcgcgtgcgcaggccggacatccaggcgtcgccgccggaaaggggatatgaggtggcggagattcttgctaggaggaggagagggggccattggaggagggctagaggtcgctgcgcatggcccgtgggcggtggagagatgaagccaggaggacgtcagcgtcggcgaggttgactgggcaagaggcgagcgtcaacagacgttccagggaggagcagtccgctggcgcggtcgcatgagagggtgccgaccggaggcagagccgaggacccctaggaccgcacccgcgccaccactgctgccatcgtcaacatcctatatgatttttcgttgttgttgttatcagggatgcgctggaacaagggcacaggaccagggccgctggacatcatcgatgctagcagataaggacaccaacaacagttgaggttgatgttccatattcatgcttgcaatgtgtttgatgaaatgtttaactagcactagcatcatctcttgtttacaatttgactatttgtattgatgtcatactaaccaaatttcaggttgattgtttactgctttcaaattaacaattcaatggttcttgatgtgttctacttaacctttgcatttgtagtagtgtaattctgaaggtacaaaacactatttctactgaacttcgtcaatttaagcaaaacttttgaacatatggtcatccattgaggctcccgcaattccagtttgcatgttctgccaccattttggatcatattttccatgcttatggaaggacttaatgaactgaagtagtttgtgttggcagtgatctccattggatatcccgtctcttcagccggtcgtcaatgatacaaccaggtcacgcatgaggtagcagtccactccaacccacctactgaagacttgtctcatttggtttgattgatgcgtggagtgaggcacatgctgtccagatcaaggtacaggcaagtcggtttcttgcacttaattttttttcatgctatttgtgaatgttggggatttctattcatggagaaacaatgtttttattttccttttatcagtgtcatagcgttcttcaaatccagggtagtattatacggattttatctattttgcatacattgtgcctgtaaatttttgcatgaaaatgtatccaagagcacaagtaatttcgagtgtagtaaattagtacaggtttatcttgagaaataaaatattttctctcaagaagtccaatattagaatgtctacttagataaatgtgtgttttcttagaaaaaagttaatttgtaatatagtagtaaaatcaattaggattgtcaagtcaaggcataatagtaagatttagttcgcacagctagccctcttaatttctattagtgccacctacttcttaatttcttacgctgatgtctgacaaaattctgtttggttcctttctgcagtagaacatcagcttatgagatctgaaagcaacaaaagggtaccaattttacacccatgtaaaatccagtgatttcagtccattctttgtggctattttcatactgcatcttggcatttgctatccgtttaatatgcttggcaaatgaacttgaattagtacaagtggatctttagatttgtatgtagaaggtcgagatgtttgcaaatgacatatgagttgagttgagtgatctagaatttagttcctatagtggaatatggatagctccagaaattgatttttttagtccatttattttaagctctactatttgttaagtttattctcaaaatatttaatttatagtattatccacaataattggagggcaaaactgaccaaattaaagttgccatatgttcatctggagtctgaaagctggccttggtctgcttcattttggtgttgttgtgactccaaccggtgaccggagcccgtactcaccgctagctaccatccccaacctgccccaatctttctccaggttatgttgctagcacttgatctgtacacgctgtgggataattgcttgttgacaaggaagatcaaatcctgatggtgg

SEQ ID NO: 14909 - DNA, 2985 bp, Oryza sativa
  ref <308>: DATABASE ACCESSION NUMBER: AK065447
  ref <309>: DATABASE ENTRY DATE: 2001-12-06
gaggctccagtagctagccagtccagtccaagagatcgatcgagaaacagaggatcggagaggaggaagaaggagaatccaagtactgggaggcaattaatttgagttgagatcgacttgagagctagcagaggctcatctcatctaggccagcagaggctcttcgctcgcttatttcatccatggcttccaaaggcacagaaggaggccatggtggcgtggagagaaaggagcagcagcagcagaggggttaccagctgccccgtgactcccggggatcactcgaggtgttcaacccctcatccgcttcctccttccgcactgctgctgccgcccccaagtccgcctcccccttccttgctattcccgacagggaagaggataatgtggtggcacagcagcgggcagcagagtggggcctcgtcctccagaccgaccaccacacaggcctcccccagggcgtctccgcacgaccctcctctggctctgcacgcaccagctctgaggacaacccacagcaacagcagagcgccgccgccatcccacgggtgtcggaggagctacgggcggcactatcagtgttccaacagacgtttgtggtgtctgatgccacccaccccaaccaccccatcatgtacgccagcgctggcttcttcaacatgaccggctatacctccaaggaggttgtcggcaggaactgccgcttccttcaaggctctggcaccgacccccatgagattgacaagatcaggcaatccctcgcaaatggctccaactattgtggccgcatcctcaactacaagaaggacggcacgccattctggaacctcttaaccattgcccctatcaaggatgaggacggcaggctcctcaagttcatcgggatgcaagtggaagttagtaaatacactgaagggaaaaaggatactgttgttcgtccaaatggactttcagaatcactcatcaaatacgatgctcgacagaaggatcacgcccgtagctcagtgtctgagctcttgttggctctcaaaaatccacgctcattgtcagaatcaagcaataacaccttaaaaagaaaatcacaagaatccctaagcatgtcaatgagcgaagttcctagtaagagaagctctgaaagtggatctcgccgaaattctcgtagcggaacaaggagctcgcttcagaagatcaatgaagtacctgatcaagtgaatagaactagaaaatctggtctgcgtgcatttatgggttttcttggtatgggccatggaagtgtagagaagaacatgctgaaacctagagatgaagatccactgatcgatagtgatgatgaaagacctgagagctttgaagatgagtttaggaggaaagaaatgaggaggggtatagacttggctactacacttgaacgtattgagaagaattttgtcatcacagatccaaggttgcctgataatcccattatatttgcatccgatagctttctgcaattgacagaatacaaccgtgaagaaatattagggagaaactgcaggtttcttcaaggccctgaaactgatcgtgcaacagttaggaagataagagatgccatagataaccaggcagaggtcacagttcagctcataaattatacaaaaagtggtaaaaagttttggaacctctttcacttgcaaccaatgcgtgatcaaaagggtgatgttcagtactttattggggttcaattggatggaactgagcatgttcaggatgatgctgcaaaagagggagtcgtgctggttaagaaaaccgcagataatatcgatgaggctgcaaaggaactcccggatgctaatttgagaccgaaagatctatgggctaaccactcaaaagtagtcctgccaaatccacatatgaaggatactgcatcatggagagccatccaaaaggttctcgagagtggtgaaagtattggtttaaaacattttaggccagtaaaaccattaggatctggtgacactggaagtgtacacttggtagagttgttgaatacaggagaatactttgccatgaaagctatggataaaagcatcatgcttaaccgcaataaggttcacagagctactgctgaacgccaaatccttgatctattagatcacccattccttccaacattatatgcatcatttcagacaaaaacgcatatatgcctcattactgactactgcccgggtggtgagctctttgtgcttctagataatcaacctctgaaggttctacatgaagatgcagtcaggttctatgctgccgaagtggttgttgcactagaatacctacattgccaaggtataatataccgagacttaaaaccagagaatatcttacttcatagagatgggcacatctcccttacagacttcgatttgtcttgtctaacatcttgcagaccgcaggtctttcttcccgaagatgctgatgagaaaaaagggagaaaaaacgggagttaccccatattttttgctgaacctatgcgagcatccaattcatttgttggcacggaggagtacattgcgcctgagattattacaggagctggccatacaagcgctgttgattggtgggctctagggattcttctatatgaaatgttgtatggttatacaccttttagaggaaaaacgaggctgccttcctcgcccggtgcaaggccaactccgaggccacgctcggcaagtacggcggcgccgccggcgacgccgccacgtccgagagcttgtacgtcaagggctacacctactagaattcgtcccaatcactgggtggcgcctatgcggccgtgcctatgacagtagtagggtctcggtccaatccgcgtggcccacgtggcggtgcggattgcatcaagattcgtgcggatatacatgtgttcctttctgctgtatactctcgattctctgcttccttcccctctagctcttatattttaacaaaagctgcgtctaaatgttc

SEQ ID NO: 14910 - DNA, 1940 bp, Oryza sativa
  ref <308>: DATABASE ACCESSION NUMBER: AK065448
  ref <309>: DATABASE ENTRY DATE: 2001-12-06
gatttttcctcgcctttcccttcttccatctcctcctcgtcgtcgcggcgcgcgagctagggtttctcgactcgccctcgccgatccggtcagccatgtcgaagcaaggagggaaggccaagcccctcaaggcgcccaaggccgagaagaaggagtacgacgaggtatgctgctgtgctgtgtgacctttgctcccgattcgtggttccgtctaccgattgatcgtttcgggttaggggttagcgatccgcgcttgtgttttgactgtgcaggccaccgtgttgtagatcggttcgtgtctggggtagttcatagtggttttatcctttagttggttagttgaaggtgaatttgtagaattatcatgcgcgatgctgtttgtcctttaaatctgcgtattgacttgtggccttgtcctcagttagggatccgttcggttaatccccacgaggaagggactggaggggggattgagtaggtgtggaagtggaatcaatccccttaaatccccgtggcggagggattggctgatatgccatcatatttacttacattccttggatatgttgtgttagggggttattaacttattattggataatgattgtgttaaaagcttgttctgttcatgaagtcctagtttctagggcaaattactttcttctaactactttgtcaacatgaaatgagcaaccttataatatgtttgatgctaaccttataatatgtttgatgctatcatgtatggaaatcatttgttcatggtctggaattgtgtgcttgatgctttcaccttttctcaccttgcaaaactgacctggttgatgatgtttggaaaatttgcattcggtagcagtgtagcatcaacttatctcaccttctaaaattgtgctagctgttatttttgggtgatgtccccagtcacagtgagcgtatggtcttacttgtccgatgggaatacaaagaatatgatctcactcgtcctaaatttcttctatctaattaaacttaatttgtcttgatatacttctatgggtttaagttgtcttgaatggatcattagtctatgcttatggtcatcttaattttcaactgaactaagaccttaaaggctttgaagaaatgagcatgtgttcagtgtatgagcctttggcttgatttgactattgataattgataacaagtactactagtatttactattgcttgatactccagttccaccagctttcttgtgaaacataatctacatctcttgaaggggaactgcattgctagaaaaagaaaaatagtggtgctttattttttttcctgggaataacatgtcgctgcctggctttattagaatcaagcagcgcaaaatcagataagcattttgaatttgctgtttgtccaagttgagatgatgtggccagtatagatttggtttaacaaagtgatttggatggatgtaattgtagtttatgaattgttaataatgtgtggtattgtaagtagcgctttatctggaaaactagtgcatatttgattgaagcaatgatgatataaggaacttgaatggttagttgcagacttgtagttctgattttgttgctttctgtagagtgatctcgcgtatctgcagaagaagaaagatgaggaaaaggcactgaaggagcttaaggccaaggcaggacagaagggtgcactgggaggctctggtctgaagaagagcgggaagaaatgaggctgataccaatctgtaatgcctgaaaaatgataaaccagctacctgtctgtgttacttcactatgtgcggatgtaacaaaactacctttaagcatgttatgcattaagcaatgttgcagttggttgcttgatccgaagatgtttcgggctctcttctgctagctatgatacatctggtcccgtatgatgataatataacataactcatggtg

SEQ ID NO: 14911 - DNA, 2552 bp, Oryza sativa
  ref <308>: DATABASE ACCESSION NUMBER: AK065449
  ref <309>: DATABASE ENTRY DATE: 2001-12-06
gagggggagagagagggagggaccgcgcggcggcgccgccccggtggaatccctgccctgatgtcggcgacagcgaagggcggcagcgatagctccgccggaagctccggatccaccccctcgtcgccggcgacaggcaggggcggcagcgatagctccgatgccaaccagccctcgccggtgaaggagcggggtgttgtgctgtcggagctgctcgggcacatccatgggtactacaaggctgcgctcggccggctcccggtggaggagacgccggcgctcatcccgcccctccttgacgccggcgtctgcttcggcctcatggatcccatctccaacatcatcgtcaacaccgtctccgaacccctcctgcccgactgcacggcgtcggaggaggaagaggaggatgggaagtcgaggaagaggaagagggggagagacgaggcaattttgtccgagatcgccgcggatgccagctgcatccgctgctttcctccgaggatggggcggtgcgagacctcgccggagcggaggaggaacgtccccgtcgcgcagcgctcgctcgagggcctcgtcaccttcctcatctgctacttccgccacctccccgtctcggaggccttgcactacctcctgctcaccaaggccgacctgctcgccgccgtccacctcatcgagtacactcggggaattggaggcaggctgttcccgatctcctccccaaccacagaggttgccctccgctgcgctgccatctccgcctcgcacccagacccgccagcatttgcagccagatcactctcgctagcttcgcgtcttggagatcagcctcctcgcagattctcaccgatggatgctacctgtctcttgatgccatccaccgcctccacgaatttctccaggaacctctcaaggagccacccgacttcccgaaacctgtccggcaggcggctcttcgcttgaatcactacatcaaaggaatcagcagcttgaacaagttcccccatgaattcacagatactctgagaactcttctcctggagaaaatccatgtgttgtacctcaaagcgatcgcgcggcttcccagggatgatttgcgcagacgctatcaccatagcctcctcaaggcaggccattgctttggtcctgctaatgaccgtgtctccaacatcatcctcaacaccatctggtacgacaccacattccctccacatgaggagcttaagctggacatgatctgcaccaacagtctcgtgcgcattgagtgccgctccctcaacggccttcttgctttcctccacaacctcttccctgcattatctgaacacgatgccatgatgtaccttttccactccaatgctaaccttgaacaagtcacttttagagcaatgtgcgatcatgatatatcctgctctcatgaggatgcttacaaggcagcagcagacgcggcatggcatcctcatcctgatgctcaagctgaattcgctgtgtcaacccatccaatgctgttgcccattgacaagccatcgctagcggttagccgcacactcacttccaatgaggtggagctcatttcaagatatttttcacagaaatcataccctgccaaatctgtgccatcagttcctgaattggttcccagagctgacgagttggtcaaacgcagccagcaaaatttcatggctaatcaatatttcatctgcagaaaggtgaaagctgcattgaagagatatgcaaaagaaaagggaaccgagtatgaacttcatgtcatctgcggtacaaattttgatgtacctgagaatggcagatatggttactttcggaatcgcaaaggatttccatatgctcatgtgaattttctggcaagaccaaagggttcacagcgtgataacactgctcctagtcttttcttcctggagtgcagcaatggtgaagaagatattggtacactattttcatgctgcgctgaactagagtcgcctacagattctggtaggtgctttcattgtgagtgcaaaggaactaagattgtgcatccagctattggaacataccgagggcgtgaaacagacttcgaggaaatgtcttgtgggaaacaggaaattgacagtaaaggacttattatctctgagaagatggctattgagtttgtgggtttatgtgaggatgacagtatctattttgatccttctaaggactatgacttcgctcttggcttgaacaacttagttagggaggatgatgaagctcttgaagagcttcacagagacattgccgagtgcgagagaatgaaagtctgtgacatgtcctgtgagccagatctgttggcggaaatcacagaggatgttttgcaagattgtcaagggcatcttgttccccagtgctaaattgcaatcttatttggtaggctatgttaatcagttatatgatggtgaaatttatttgtctatgctgttatgttatatattcatgtgcacacttaaaagaccagatccattttaatgtgcaatgctaatcgctttgcagctagtctgcaaacttatgtaatgccg

SEQ ID NO: 14912 - DNA, 1647 bp, Oryza sativa
  ref <308>: DATABASE ACCESSION NUMBER: AK065450
  ref <309>: DATABASE ENTRY DATE: 2001-12-06
ggaatctccgccacaccacatcccggccgcgcccccggcctcgcgggcgtgtcacccggagactgagcgcgcggcgccgcgttggagtcacgccacgccatggagagaaccgtggtgctgtatcccggcctcggcgtcggccacctggtgccgatggttgagctggccaaggtgttcctccgccacggcctcgcggtcaccgtggcagccgtcaagccgccactcgactctcccgatttctccgccgctgtcgcgcgcttcgcggagtgcaaccccgccatcaacttccacgtgctgccgccgccgccgccaccgcccgcgcccgtgggctccggctccgacggcaagtccgcgtccccgatcgtcggtatgctcgggttcctcaacgccatgaacgcgccgctccgcgacttcctctgctcgctgccctccgtggacgcgctcatcgtcgacatgttctgcacggacgctctcgacgtcgcctccgagctcaggttaccggtctacgttttcttcacctcggccgccagcgacctcgccgtcttcctccacctaaccagcatgcgagatagcatcaacacaagcttcggggagctcggtgactccatgatccacatcccgggctgtcctccgttcaaagcttcagagttaccatcagatattctcagtgacaacgaagcatccaggcttatcttactgatgttccgtcggcatccagagtcgagaggaattcttgtcaatacattcgagtcgctggagacgcgcgcgttgcgcgctctggaggacgggctctgcgtccccggccgtgccacgccgacggtctactccatcgggccaatcgtctcgggtggcggtggcagcgacaaggatcacgactgcctccggtggctggacgcgcagccggacaacagcgtggtgttcctctcgttcgggagcttgggaaggttctgcaagaagcagctcgaggagatcgccattggcctgcagaagtcggagaagaggttcctctgggtcgtgcggagcccgcgcatcgacgaaaagaacgtgttcgagccgctggcggagccagacctcgacgcgctcctgccggccgggttcatggaggcgacaagggggagagggctcgtggtgaagctatgggcgccgcaggtggaggtgctccgccacagggcgaccggcgcgttcgtgacgcattgcgggtggaactcgacgcttgaggggatcacggcggggctgccgctgctgtgctggccgctgtacgcggagcagaggctgaacaaggtgttcgtcgtggaggagatgaagcttggcgtggagatgaggggctacgacgaggaggtggtggtggcggaggaggtggaggcgaaggtcaggtgggtgatggagtccgagggcggccaggcgctcaggcagcgcgcggccgcggtgaaggatgcggcggcccaggcgatcaaggaagggggctcgtctcatgccgcgtttttcaagttcctcgaggacctgccgctgcaggtctccagaggcatggttagtgcatgatttcgagccatggtaatttgtcgggcactgtgtttacctgcgactgtgagcaacataatttgagtactgtatggttctcttaggattggataatggatgttctttctg

SEQ ID NO: 14913 - DNA, 2576 bp, Oryza sativa
  ref <308>: DATABASE ACCESSION NUMBER: AK065451
  ref <309>: DATABASE ENTRY DATE: 2001-12-06
gtattgggtttggtggttgggtgggagggagggagctggggggttggccagccatggcgtcggcgcaggtgtcgtcgtcctccgccgccgccggtgcggcgtcgtcgtcgtcctcgcggaagaaggatctccacgcggggaagaagctgctggcggagtaccgtaagaagaagaacaaggcggcgaagaaggctgctgaaactgcagaccaggcaacggcgcctgttcctgatacactagagaaccctcctccaaatgccaccagtactaactcgggagacaagttggtatcggacgtggatgtgaacacaacaagcacatcatctgtgccaccagtctacgagaatggcccaacgagttattccagaggtgacgagcccttgtcaaatggacctgcccctgtaaatgtgccagtcagtgttagtaatcctgccccatcgcatgatgtcagtagtgttggagggagcaagatttatgggaacttgagcttctctgacttagttaatgggcataatgaggattggagaggcgatgctgctcggaaaagggaggaacatagtcctgacaaggacgtgactttaaaatctaaattgagtgcctttggaaactcagatgaggtctcccattcttcagatgaggtcttgctgagtcagggaagaaatccagtcttgagggaagtaagtgacactgagcagtctagttcatattcatctggcagcctttttggaaagttagaaggcacgcaaagtcagggttactctgcaaacaatgatatctttggtcggttccgagccacctctaaagactcttcccaagcagatggcttagcgtatgccagcagccgggagtatggaagtgccttcaataattcttggaatacatcaaattccacacctgtttgttttgataaacaggatccttttatgtcatctggttatccaactacatacaatcgatctcggccatcttttcttgattctattggagtacaaagagctccaacaactgaagtcccatacgtggagcctgcaaaggctagtaaaccatttggcaactcgaattctgagagttcattttttcagccaccaaatcaacaatccgctggaagcaatgatgtggatggttctctaaaatcaggaagacaagaatataacaacgagaagggatcatatggaaattccattcgtactgattcctttccttccaaagatgaacggaatctgcaccatagtactcaaatgttccaaaacttcacaattcctgggaaagatgatgattttgctgcactagagcagctcattgaggatttgacaaaagagaagttcgccttacaacgtactcttgagaaatctcaagaattggctcaaactttggccacagacaactcagctttgactgataagttcaaccaacaggcacaagttatcagcaacctgacatctgacatggagagattgcagaacgaaattcaagctcaactgctggcacttgagtctgtcagaacggaatatgctaatgcccagctagaatgcaatgctgcagatgagagggccaaagttcttgcagcagaagtcattctacttgaagataaggctcttagactgaggtcaagtgagttaaagcttgaaaaggaaattgagggtttgagctctgagatttcttcatacaggcgcaaagtttctagtctagagaaggagcgtcaacatcttcaatctactgttgaggctcttcaagaagaaaagaaactcctacactctaaattgaggaatacttctgtgactgagaaggtcaatattatagaaaaaccttcagctgataaaagagatgcatcaactgcaacagaagatctagatacaggggaaagcagctcttcagaaacccttaccagtgccattgacacagtagaagatggtgaaacatctgtatcgcggtccaataatgtggctgattttacttatttagaagaggtgtcttctagcatcccacatgatcagcttagaatgatcgacaatatcaactccttgatgtcagagttggcagtggagcgagaagagttgctgcgagctttgagaattgaatcatccaattgctccaagctgaaggaattgaacaaggatctaacgcaaaagctggagattcagactcacagacttgagctgttatcttctcaaaggatggctaacgagaatgtccttccaaagccgatcgacacacgctccatcaatgatgcaactttgtatgctggtgaaggagatgaggttgttgaacgggtgcttggatggataatgaagctcttccctggtggtccaaagcgacgaaccagcaagctcctctagtggaaagtagagttttggtataccataatgttttcttttcatttatatatgatatttttttgccctgttttggtgatagcatgatgagaagttgtatattggaggagagccccttgatgtaaccattcttttttctacagaaaatgaaatgtatggtttgacttctgtggagctacacttttgtattggcaatgaacagaatagctgccagcaggaaaaatacgcccccttatatattcc

SEQ ID NO: 14914 - DNA, 3635 bp, Oryza sativa
  ref <308>: DATABASE ACCESSION NUMBER: AK065452
  ref <309>: DATABASE ENTRY DATE: 2001-12-06
gcgcttcgatgggggaagccgaggcttcctcctcctcttcctcgcggaagatttcaaatccctcctccacttctccaacgccttcgccaactggaaaccccgaattccccgccgcctccccacccgcgccgcaaacccctaaaccctagccgccacctccacggcggcggccgccgtagccatggatttctactccgacgactccgacccggacatcgacgaggacctgcagagggacctggacgcgctgcgccaatcctgcatcctctccgggaacgaccccgacgcggcggtcgcgcaggtctccgcctgcctcgccgccccgccggcggcggcggcgggagcggaggtgaatggcttgtctgatgacgacgacgaggaggaggacgaggatttggccctcgtccgcagcatacgtgagaatctcctcctcaacaaggcctcgccgtcctcgcccctgccgcgcccgatctgcgcctggccgccctccgactcggaggacgacgaggacgacctcgagacgctccgcgcgatacagcgccggttctcgcactaccactccggaataggatgattttgtatgatacgacctgggaatccgaataactgggataaacttgcaaggtacctccagtgggtcagagatgaacacaaaaactgaggcatcaaaggaagggagtggcaatatttttggaaatgaacttgatgaagaatttgatgcggagaagcacaataaagaggcaactaccagaactgggtttcctaaagctgccttgttgttagtggatgctcttaagaagaacagagcatgccagaagttcattagaaggaagatgattaccattgaagcaaaaattgaagaaaataaggatctcagggatcgtgtaaaatgtcttttggattatcaattaagctgcagaaaagcatttggcaaaattttgtgccaaaaggaggatcctcgtgttagattgatctcctctcgaaagccatgtgcacaatcaacgaagaataaagataagaagacacctgcattatttcttggccctgcagataaccctcatgtttcaaagtacaaaatggtactgaagcaactccctatgtctcttcagaagcaaccgtggtcagatgttgagaaagagaaacttgctaaaggaataaagcagcaataccaagaggcattgattttgaactcgatcaataaaggaagttccaccggtgacttcagtgctgtagatatggcatatgcactgacgaatactgctggcaattttgaggttactcccgaaagtcttagatcggtcctgccattaataaactgggacaaaatagctgctatgtacctgcctggtcgatctggtgctgaatgtgaatcgaggtggctaaactttgatgatccattgattagtcataatgcctggactgctcgggaggaaaaaagacttatactaactgttcaacagcaaggaatgaataactggattaacattgcagttacattgggtactcacaggacacctttccagtgccttgttcgttatcagcgaagtcttaatcactgcatattgaataaggactgggctgaagaagaagatcttcaacttcaagctgctgtcaacacctttggaactaattggcaacttgtatcagctagtatggatggtcgcactggcaatcagtgctctaacaggtggagaaaaaccttaaaccctgaaaggtcaagagtggggagatggtctcttgatgaggataaacgcctcatggtagctgtgaagttgtttgggtctggcagctggaataagattgctcagttcattcctggtcgcacacagagtcagtgcaatgaaaggtggcgcaatgttcttgatcctgatatagatcttggggaatggcgacctgaagaagactccatactattggcatcagtcgatgagtttgggccttgctggtccaagattgctggggcgaagattcctcaccgtactgacaatatgtgcttgagaagatggagaaagttgtgtcaagataaattgccttcagttaaggcagctcaacaaataaagaaatccattcttcaatgcaactttgttgacagagaaacagagcgacctgccattggacccagtgacttaatgccacttgttcgctccaaagttgatggaagtgatgagaacactgtgagtgctaaagtcaggaagccccgaaaacgttctagaataccatgtgaggacaatgtactccctggtgacacatcaaattcttcaccttctatgaatctacctctttctgaatctattgatgctgaggctgctgtaaacacaaccacagcaaattcaaagaagaaaccatctagaagtagatcgaaaaagcaaactgatgaaaatcttgctgtctgtgatgtcaacaactcttctaattgttctagtggagccaggaagagaaagagatctattactgacaaaaatcaagttgtgcaaaagaaaatgaaggggtctatctctggtgataatgaggctgtcgtagagacagtgggcactatcagtgctgataatgaggtagccacgaaacggaagactggctctacatctgttggtgaagaaggcacaaccaagaagacaacgaggggctctctctctctggtaaaggagaagtcaacaagagaatgaggggctctatctctggtgttcagaagggagcaaccaaacaaagaatgaggggttcagtctctactgataatcatggtgctgtaatgaaaagcaagagagcaccatcaaggaaatcagccgaagagaactcaaaagctgatagcatggctaatgcagcctttgggtcggaccttccaactgtggcttctgaagatagagatgctaataatggaaatgtgaaaaatgggagactcaagtcaatgccgagacccaagcagataaacatgactgagggatctgcagacaaattttccacatccacgcggcttgctgattgcatgtcattcggccgaatcaatggatccagcagggttgcaagacacttatgtgtgagtgtcaagccgttaagcaacatgatccaatcaaatggaccttctgatgtgtcagctaaggatcccacttctgctgaaacagatcccacttctgttgagaatagcaacaccgcttgaacctctattgactatcagcgatactcggagctttacttctgcggatgtggtattgttgataggtgcaacttcttgaagtgggaggaagatatacatgggaaaaaaatcatattcaaaggaatctccataaaacaaaaccagcgccttcttgatgtgatctgttactgaaccggtacactggtagttgtaagtatagtagatgttaactggggtcatcctgtacaactgtactcttattatagactcgaattaagaacaaccactgacatgccatcttccaccgtgagaatagaaaaccattctttaccatattggtacccagttttgtatgccattggggatatcaaaatggtgtactagattgtaacttgttatccggagagttggtaactcgtttccggttggtgtacagtacttgtcctacttggtacctggacgtgagtagttcatctgattctgaaacaatggcattttcattgatttg

SEQ ID NO: 14915 - DNA, 3286 bp, Oryza sativa
  ref <308>: DATABASE ACCESSION NUMBER: AK065453
  ref <309>: DATABASE ENTRY DATE: 2001-12-06
gacgggcgactgagcagctgagtccaacatcgccgggagagagatggcggagacatcgtcggcggcggcggcggcgcagaccgacgcggagagggaggaggcgctggaccggatgctgacgcggctggccctcgccgaagacgcgcggctcgcgccgctgctcgcccgcgtcctcccctacgccatcacctcgctcgcctccgccaccgcatccgtccgcaagctcgttatggaaattctcagccacattaacaaacgggtgaagcacaggcctgagatttcactgcccatgctggatttatggaggatttatactgaatctacttcctccacaatagtccggaatttttgcattgtttatattgagatggcatttgaacgtctgctaagtgaggacaagggaagcatagcacctgatcttttaatcaacatatcaaatgttacagagcagcatcagggaatcatcttgagacttgtggtgaaggctattggtgaatgtaacacacataaggtgggtgacaatgttgcttcaaaatatcaacccataagtggatctaatgatggtctagtcttcgctgacttctgttttcacacagtactgtatcaaacaccacctcaaggtgttggatgcccggcaggactttcggttgctcaatcagatcgtgttactggaaagcagccactaaaaggtgacacacttacatcaagaaagctaggaatcttgaacgtcattgaagctatgcagttggcaccagagattgtttaccctctttatttagctgctgcttcagatagtcaagagtcagttactaagagaggagaggagttattaaagcgcaaagcttcagctgtgaacctagaagattccaaccttatgaagaaactgttcacactattcaatggtactgcaagtccagaaaatatagctgcagagctgaaagtcgccccagcacatagttcactgcgagtccgccttatgggtgttttctgccgatcgattgctgcagcaaacgcattcccgtacacacttcagtgcatctttggctgcatctatggaaacgggactacttcaaggctgaagcagttagggatggagttcactgtctgggttttcaaacatgcagcaaatgaccagctaaagttaattggtccagtcattctcagtggaatattacgttcacttgatggttcttccactactgaagcagattcttccagtagggatattaaaatatttgcctaccaggcaattggtttgcttgccactcgcatgcctaatttattcagcaacaaaactgacatggctatacgactctttactgctttaagattagaggagcaatctcttcgtttgacaattcaggaggcagctactgcccttgctacagcatacaagggtgcttcggttgtaatattgaaggatattgaggcacttcttttggaaaattctcaaatggagcaaagtgaggtccgattttctgctgtaagatgggcaacaacactatacgatatgaagcactgcccaagccgatacatttgcatgcttggtgcttcagatgtaaaactggacataagacatggtaaattatgtatacagccaacagcctcagttgctacactgtgatgagcagaggaacggaaaattgcttttcccaacaaaaacatttcttgcaatgataaagtttctaatgaagtgctttcagaaaagtgatggctcggattttcttcaagaagatctatctaattgtccagtatcaaaattgtgtatcattttagaacatgccatgtcatatgaaggatctagtgaacttcatgcattggccttgaagtcattggtcgatatttcctctcgtcaaccaaagttggtgtcatcgcgctatgtgaaccgtttactttggctaagaactttactgggccatgttgatgctgatgctcgtgaagcaacttcacgtctgcttggtattacttcttcagccctttcaagcactgctgcactggatcttctctctgagctcacttcaacatttgatcaaaatcgcccatcaagattcgaaaattaccatggattgttatgtgcaattgggtatataactgctggttgtttaaaggaatcttatataactgaagaaatagtgcagaaatcaattgatgttcttgtaaaagttgtcgagtctgagggttcagcattggcatccactgcgatggaagctcttggtcatattggtctccattgtttattgccttctattaatcgaaattcctctcaagctgcacttttaacaatcctgaatgagaagctggctaagctgctttcagaaaatgatactaaagctatacaaaagattttgatatcgctgggacacctatcttggaacgagttgtcatttgcacacctgaataatgcattggacttaatttttagtctttcacgctctaaggtggaagaagttctttttgcagccggggaggccctatcttttatatggggggaagttcctgtgaccacagatgtaatactagaaacgaactttgtctccctttcccaggccacaaactatcttactggtgatgcacccgtacttgtctcgagtaactctaataaaggaagtgattgtgaagaagcacacgcaatggctcgagaagaaattataaaacggttatttgatacattaatttatagcagtagaaaagaggaaaggtgcgcaggtactgtctggttggtctcacttacaatgtactgtggtcagcatccaaagatcctggaactacttccacaaattcaggaagcccttacccaccttcttggtgatcagaatgatcttacacaagatctggcatcccaaggcatgagtattgtatatgagcttggtgatgcatctatgaaggagcagctggttcatgctcttgtgaatacactgtctggcgcagcaaaaaagaaaagggccatcaagctgatggaggattcagaggtttttcaagaaggaactattggcaataatcctactggaggaaagcttagcacatacaaggaactttgtagccttgccaacgagatgggccaacctgacttaatatacaagtttatggatctagctaactatcaggctgctatcaattccaagaggggtgctgcttttgggttttccaagatagccaagcaagctggtgaggcacttcagcctcatctgcataccttaattcccaggcttgtccgttaccaatatgatcctgataagaacatccaggattctatggcacacatatggaaattaattgttgcagatcc

SEQ ID NO: 14916 - DNA, 1695 bp, Oryza sativa
  ref <308>: DATABASE ACCESSION NUMBER: AK065454
  ref <309>: DATABASE ENTRY DATE: 2001-12-06
gtcgtttcaccctgctcggaaaaaaaatcctaaaagcttaatttctttctttgttcttattactgtctcacgtgagacgcctgagctcaactgaatttctggccccctcttcatctccgtgagcttcgctgccctttttctttgccttctcttggtggtttaatttcatcagttttcctccatttccttctttagccattgttccgattgccgtctcttgttgcatgtgcattccttctctgaaccgtgcccccccaattcgtccgcgagctatacaaatttggattcgttttgttcgtttccagctcaccctgtaaatcgtttctcaagtcattcaggcatactcacatcgcacaaacatatatataccccaagattttgaatccatcaatttgcagacgccataggcgtacaagttatccattcaagcgctccaaaaatttgccaagaagtttgccttaaatttggattcatgaagtttgcgaagaagtacgagaagtacatgaaggggatggatgaggagctcccgggcgtggggctgaagcggctcaagaaattgctcaagaaatgccgctctgacctccaatcccacgagaacgacggctcctccgccggccgctgccccggccattgctctgtatgtgatgggagttttttcccatctcttctcaatgagatgtcagccgttattggctgcttcaatgaaaaggccaagaagcttctcgagttgcacctggcatcaggtttcaagaaatatacaatgtggttcaccagcaagggtcacaagagccatggggcattgatacagcaaggcaaagacttggttacttatgcaattataaatgccgtggccatgaggaaaattttaaagaaatatgacaagatacattactcgaagcaagggcaggaattcaaagctcaagcccagagtctgcatattgaaatacttcaatccccatggctctgtgagctgatggctttctacatgaacttgagaagaagcaagaagaacaacggtgctatggagctctttggggattgttctctcgtattcgatgatgacaaaccaacaatttcatgcaacctctttgactctatgcgtgtcgacattagcttgacatgttcgatttgcttggataccgtgtttgatccagttgctctttcctgtggtcacatatattgctacttgtgcagctgttctgctgcatccgttacgatcgttgatgggctgaagtctgccgagcgcaaatcaaagtgcccactgtgccgacaggcaggagtctttcctaatgctgtacacttggatgagctgaacatgctactaagctatagttgtccagagtactgggagaagagaatacagatggagcgggttgaacgtgttcgtctggctaaggaacactgggagtcacagtgcagggcattcttgggcatgtgattctaaagttggtggatttttttttctttagaggggcttcatatgtgatgtatagtttcttgacaaaatggaatttgccatttgttgtcacttatatcctgctctgttgctcctctttgtgtaagaagttggatttgtcatcctaaatgcaaaaacagcaggggttgttcactactgtgcacttagatgtaaatagggtagatttgtagtcattgttcaagtgcataactgtaaattcatttatatttgatcagtcc

SEQ ID NO: 14917 - DNA, 3335 bp, Oryza sativa
  ref <308>: DATABASE ACCESSION NUMBER: AK065455
  ref <309>: DATABASE ENTRY DATE: 2001-12-06
ggcactctcactcacacggagagagagagagagagagactagactagtagtaccaattaatggcggcgctctcctcctgcttactcgccgccgtccgacctcatcctccacctccacctcgaccgctctccccttccttcatcccctctgccctccgccaccgccaccgcctcagccaagcgccgcccctcgccacctctctcccacgaccacgaccaccatggtgccgcttctccgcctcctcgccgccaccgccacccgacgaccctgacgactacgagctgttggacacgacaggaaattgtgatcctttatgctccgttgatgaagttagctcacagtattttgaagctaactacaagccaaaaaatgatcttcttaaagctttaactataatagcaacagctttggctggggcagctgcaataaaccattcctgggttgctgaacatcaggacattgcaatggtgctagtgtttgctctcggttatgcaggtatcatatttgaggaatcactagcgtttaacaaaagtggagttggattgctcatggccgtttgcctatgggttatcagaagtatcggggctccatctactgatgtagcagttcaagagttgagtcatacaaccgccgaagttagtgaaatagtctttttcttgctcggtgcaatgaccattgttgagattgttgatgcacatcaaggatttaagctagtgactgacaatatatctactcgaaatccaagaactcttctctgggtgatagggtttgtaactttcttcttgagttctatccttgacaatttgacttccactattgtgatggtttcattgcttcggaaactagtacctccatcagagtacagaaaattgttaggcgctgttgttgtgatatctgcaaatgctgggggtgcatggacaccaattggtgatgtgacgaccactatgttgtggattcatggtcagattacaacgttgaacacaatgcagggcttgtttcttccctcagttgtttcattggcagttccactggctctgatgtccctcacgagtgaagcaaatggatcttctcagaaatcttccagcttgctgtcatcagagcagatggctcctcgaggacaacttgtatttgctgttggccttggagccttagtgtttgttccagtgtttaaagctctcactgggctgccacctttcatgggcatgatgcttggtcttgcaactctttggatcctgacagatgcgatacattatggggactctggaaggcagagattgaaagttccacaagcgctgtcacggattgatacacaaggagttctatttttcttaggaattcttatgtcagttggcagcttggaatctgctggcattttgaggcagttggcgaactatctcgatgccaatattccgaatgccgaccttattgcaagcgctatcggtgtagcatcagcaattatagacaatgttccacttgttgctgcaacaatggggatgtgtggctttcatgggaatggaaaaggtggatttcttttggtatttccgcaaggtaaattgaacttttactctaataataagtggagctgtggaacaacttacacaatacagaatcgtatgttacagaacaagaaacttattcggtgtggttgatatttccctgtcgaactgttaaatccaatccatatatgctcatcatatctttcagtaattctgataagggctgggaacagggaaaaaaattgattttggactgcagcttggtttagcttctctataggaaaacaattgtgatatcatgcattgatggtacgtacgtaagggcaagattgtgcttttctgtaagggatgaaataccatgctttcattaattagttatagttttatgttttaaaccaagctcgcttatttgtttacggcataactttgtttatagatttgcacaagtgtcttctcaatgatttggatgtaaagtagattgcccacctttcttcaactatttgtgcttttcggagaattgcaacactaatttataagtccatcgtgctgttagtgtcatctcagaacctcaaatccttaacgattggtagtaagttgtgtgtacttgtacggaattagcaactacaagtgactaggcccgtagaatatatgtaaacattgaaatgatctatgtcttttgagtccacattgtatttataccgcttggttttgcaggtgagtggttttgcccttgcaggttatgcagctggtatcatcacttatctagctgcacaaaatctccctctatcccttcccacttcactagccgagatcccatttatctcggggtcatgaaagggtgaccagattcaggtatggaaatggacatattttattgtctggccagcttatgtaagcataatcaggatgtgttggcaaagaaaagatgtcccatgattacatgggatggaataaacgaaaaataaatatatgccctgatctccaacctccaagtttcccaacattgaccggaaggctttggggtgctggtgaactatggtatgctaagagaggagcgattttgataacacaagcttagaggctagagctgcacgcttgtaattcacgaattctattccatcttgttgagaagaaaagaggagctgcaccttgtgtaaaatttgaagatcctgaaatcatatcatcactgggtttatttttgccctgttgtttgcctacacttgttgggtacttgtgttttctgtactccgttcgaggaggtgaccattgctatcacactatgccattgaatcatttccttctaccttttgtgaagaggtgatatggttccatttgagtcaaagtcaagtcaaatgtaatggactaggaacatcatgtggggacagatgctttcccagaagcagaattgctacaccactactccctccgtcccaaaaaaaagacaaaccctggttttcgtgcccaatgtttgaccgtctgtcttatttaaaaaaattatgaaaaaaaataaaaagacaagttacgcataaaatattaattatgttttatcatctaacaacaataaaaatacaaattataaaaaaatttcatataagacggacagtcaaagttggatacgaaaacccagggtttgccttttttttaggacggagggagtagtgctgtgtctaccgggtctgcctgaagaaatgacaaacatggcctagggcattcctaatgcctattttggctgacaagggttacattgggaccatcctaataatatagctactatatctgtgttctgtaattactactccctccgtcctataatataaatgattttaagtttttgttgcc

SEQ ID NO: 14918 - DNA, 2078 bp, Oryza sativa
  ref <308>: DATABASE ACCESSION NUMBER: AK065456
  ref <309>: DATABASE ENTRY DATE: 2001-12-06
gggcggtctcctctccatttttttcctcctatcgattttgcaatttagcccctagggaggcagggaatccggctccggtccctgtgccgctccccccggctctccttgcctcccttgctcctccgatcgaggctgaagcggcttcaggatatacatttttgtgggaatggggaattcttgccaaaatggaacctatgggaacaattaccagaacagcaaccggtttcagaatgaccgttttgcttctcggtacgttgatgggaatgatactgaggattgctactcgggctcgtcaagggccagcttagcgggtgctctgcggcaagggctgaacctaaagtcccctgtccttggatacaagactccaaatgtaagggagctctatactcttggccgggagcttggacagggacagttcgggaaaacatacctctgcactgagattagcacagggtgtcaatatgcatgcaagactatcttaaagagtaatctccgatgtgtgtcagatatcgaggacgtgcgccgtgaaatccagataatgcaccatctttcgggccagaagaatatagtgacaatcaaggacacatatgaggatgagcaggccgtgcacatcgtcatggagctctgtgcaggtggtgagctcttcagcaagattcagaagcgaggtcattacagtgaacggaaggctgcagagcttataaaaattatagttggcatcatagaaacatgccattcacatggagtgatgcaccgggatctcaagccagaaaatttcctcttactggacgcagacgatgaattctcggttaaagcaattgactttggtctatctgtgttcttcagaccaggtcaggttttcagagaggtagtgggaagtccatattatattgctccagaggtattggagaagcgttatggaccagaggctgatatatggactgctggagtgattctctatgtattgctgactggtgttcctccattttgggcagatacacaaagcgggatatatgaaaaagtactggatggacgtattgattttaaatcaaaccggtggcccaggatatctgacagtgcaaaggatcttataaaaaagatgctctgcccttatccatcagagcgtttgaaagcccatgaagtgctaaagcatccatggatatgtgataatggagtggctactaatcgagctctggatccaagtgtacttcctcgtctcaagcaattttctgcaatgaataggttaaagaaattgtctctccagattattgctgagcgtctttcagaagaggagattgttgggttaagagaaatgttcaaggctatggacaccaaaaacagaagtgtggttacatttggtgagcttaagggactgaaaagatacagctcagtgttcaaggatactgaaattaacgacttaatggaagcagctgatgacaccacctctaccatcaactgggaagagtttattgctgcagcagtgtctcttaataaaatagaacgtgagaaacacttgatggcagcctttacatactttgacaaagatggaagtggttttatcacagttgacaagcttcaaaaggcttgcatggaacgtaacatggaagatactttccttgaagagatgattctggaggttgatcaaaacaatgatggtcaaatcgattatgctgaatttgtcacaatgatgcaaagcaacaactttggacttgggtggcaaacggtggaaagcagcctgaatgtagccctgagggaggcaccccaagtatactgaactcctgtcgcctggcacccccaagaattcagtttgttctcctgagcctttcatctgtttatcacaacacatagttgtggatttgagagaagagagccaagactagatggtttatcagtaatcaccctatagcagtggtggaagaagactctcttagtacctaatagcatataaatgtgtggtctaaagacatcgtatatgtatgaacctcataagttcgttcgttcgttcgtttggttggttggtttgctaccctgctatctaataataatatcaataatacccgaagaacccctcttggttctgc

SEQ ID NO: 14919 - DNA, 2558 bp, Oryza sativa
  ref <308>: DATABASE ACCESSION NUMBER: AK065457
  ref <309>: DATABASE ENTRY DATE: 2001-12-06
tgaggtattctcttctcttatcttcttctatcaagatatacaatgcttcggtttgatagttgcctcagctgagaacttgggacagaagagaatttctccatcagttgtatcatttctcctttggaatttaccttcagttataacatctgacgacctgcaggtcttaaatcaatttcaaaagagaaattcagcaatttggctatcttatatgtttttattggacaataattgggatatttctgaatatccagaaggataaaaagaattaatagtgcgcagtacacatataggaccccatgtttgattacacacagaaaatgagagatataccaggtatccatatttcctaaaggagtgcatcaacaatattatgagttctgagtgaaaaataagaagcaagaatatggtctcctattctcaagttgtctgaaaagattttgcagctttctttttttcctgagccagctttgctggttttatattaaacggggaggaaactgtacagcatcaccgaaaacggtgagaaacagagaaggagcaaaagaaaaaaaaacagaggagacgacggacagacaagagggagcagggaaaaaagcagacctacaagtatcgcaggaaggctacagcattaatctcgctaaatcttttgccccagatcctatccatgtgttggatttcatccatatcttcgtcacctagtgtggcattgcgagttttttgaaaactcgccggtttcgttcacaccaaatctcccaaacttatcagcatgtaaagggagcactttgattttgcagctttcaattgaaaactcaaggatttctgtattctaatgcaggatgtaggttcagaatacacaagggatggttcagttgacatcaacaaggagccagccctgaagcacagcacagggaactggagggcgtgcttcttgattttaggtgttgaattttgtgaaaacatgacctactttgtaatctcgaggaatctagtcacattcctcaccactgtgctccacgaaagcaaggtcgatgctgccagaaatgtctctgcctgggttggagcttgcttcctcacaccggttgttggtgcctttctggcagacacttattggggcagatactggacaattgttgttttcctcccggtgtacatcactggaatgctcatcgtgacagtttcagcatcacttccaatgttcttgacatcttctgaacatggcaatgttcatcgttccgtagtgtatctagggctctatcttgctgcccttgggagtggtgcaatgaaaccatgcacttcatcctttggggccgaccagtttgatagcactgatctggaggagttaccgaagaaggcctccttcttcagttggtccttctacatgactactgtcagcaccttgctgtcaagcacagtgcttgtttggttgcaagacaatgttggatggggggtgggttgcgcaatcccgactgtgttcatgatcatcagtttccctgtattcattgccggctcaagagtttacaggtttaggaacctgggatttagccccctcaagagcctctgtcaggtgattgttgcagctgttaggaagtgccatctgcaattgccagaaaataagtcacttttatatgagccatccaattcatcttcaacaactgaagcaagtcataaaattcagcccaccaatcaattcaggttccttgacaaggcagccattgtactgcccccatcagacgaaacgtgcatcaagcccatgagctcatgctcgctctgcacagtgacacaagttgaggagctgaagatgctgctgcggatgttccccacctgggcatctttcgtgatctttttcgcggtcaatgggcagatgtcctcaacgttcattgagcagggaatggccatggacaaccatgttggttcatttgcaatcccacctgcatccctcaccatcatcgccgtgctcagcgtccttgtcttggttcctgtgtatgagatcatatcagtgccactggtgaagcatttcaccggacaggacaaaggcttctcacatgcgcagcgcatcggaatcggcctttcactgtccatgatcatgatggtgtacgcagcattgctcgagatgaagcggctggcaatcgtgcaatcaagtggcttagcagaccacaatgtagctgctccaatgagtatcctgtggcagacaccagcatactttctgcaaggggtttcagagattttcagctgcatcggtatgtctcagctcgcaatcgcttcaggagcttacttcaacacgttcgtgcttggcgctgtcgcagtgatcacgacgagcagtggagcacctgggtggattccggataatctgaatgagggccatctggactatttcttctggatgatggccacccttagcttacttaatcttgccatgtttgtgtattcttccacgaggcacagagagaacacagcttcatgaccagatttatacataagacatgaagcaccaacgaaatctagagggttatcataacatcaacgagttatacaagagagatacaattatcattttaacg

SEQ ID NO: 14920 - DNA, 1435 bp, Oryza sativa
  ref <308>: DATABASE ACCESSION NUMBER: AK065458
  ref <309>: DATABASE ENTRY DATE: 2001-12-06
gggtgggagacgaggcgagacgcgcctcggttttatccgcgtccctagcttagagagagagagagagagaaagagagagagaagggcgtttgacctgtgaccccggcggcggcggcggcgacgacgagcgcgccatggcaggttcaccaccaaagccgtgggaacgtgctggggctgagggaacttctggcccagcaccttttaagcccccatctggtggcaccactagcgatgtagttgaagcttctggtacagctaaacccggagaaaccgtcaccgcgacagagaggaacctctctgccaatgtaaataaccctgtctcgaggcctatgccacaacgtccgtggcagcagacatctggctatggaaatacttatggaggttatggatccaatatgtacagttcgtacggtggatttggcaatacctatggtagtggtggactctacggaaatagcatgtattctagttatggtggaggttatggtggtagcctttacggaggttctgggatgtatggtggaggcatgtataacagtgggttgggaggctcttatggtggttacggcatgggtggcatgggtggcatgggtggtatgggcggtatgggcatgggcccttacggtaaccaggatccgaattcatttggccctcctgcaccaccaccaagtgtctgggtgtccttcctacgagtgatgcatggtgttgtcaatttctttgggcgagttgcattccttgttgagcagaacacacaagcattctatttgtttatcacagctatgttgcagctctttgatcggtctgggatgctttatggcgaacttgccagatttgtcttgcgcatgttaggaatccgaacaaagtcaaagaagggcaaggttcagggcccagataccccagctttcgagggacctgcgcagcagttcattgaggcaccaaaagggaacaactcatgggacaacgtttggggaaactgagacgccttctatataatgcaaaatttaagttgaacatacagtttacaaaggaattatcatggcatgagaggttgcatgtcagcagtgaatcgaaacgaagagtactgttgttaaggtgaattacctgctggaatcgggttgacagatagatactctactttctgaatttcacgccgatctgtgatatatccgagtcctagtggacaggtccaagatgttgtgggcaggtacagtttttgcccagatgatgcaatggtatttaaagtaagtatgttgtatcttgtgggtaatcaatactgtacctggaagagttgggcaaaatgtattaatgtatcgttttccttgtttttcatcataacatatggagttgattttgactgaagtttgcctcggacgtgctggtggagtggtggtacttcatcaggactgtcatgcaaatgctttggtttgttctctgt

SEQ ID NO: 14921 - DNA, 1186 bp, Oryza sativa
  ref <308>: DATABASE ACCESSION NUMBER: AK065459
  ref <309>: DATABASE ENTRY DATE: 2001-12-06
gaattcggctcagctccaccaccgctcctcccgacctagcgccgccgccgccgccgccgccctgcaccgtctccccgccggccgcctccacccgcaccgcgcggtgcccccctcatcaccaagaacggaagatgacagaagctgctgagtggaatgatgagaacactaaaattatctgtgaactttatgctgaacaagttcgggctggaaatcgaccaagtactcatctcaacagcattggatacagccaagttgcattgaagtttcagcagagaactcatttgctttacaccaagagacaacttaaaaacaaatgggataaacttaggaatgagtacaccatctggaagaaattgcttataagagggtcaggtttaggttgggacagtacaaaaggaacaattgcagctgacgaaaactggtggaacaagacaaatacagagttgccaggtgcaaaaaaattccgcaaagctggaatgaaaaatctggatcatttgagagtgatgtttgatgatattgccagtaacggtgtggatcatacaccggtgccagcaacaagttcgccatctactctggagagtcctgtaaatgttgctaatcttgacggactagacaatgacatggaagataatgatgacactcagctggaagaggagtctcccttgaatcggaacaagaaaagacctcgccatgctaataatgctaacaagaacaagagtagtaggactgaaattgctttgctcatgcaagctcaattgaagggtatggcagatttggccgagaaagcacaggccacttttgagaatttcacctcccttgttggctctctaggatccagcattcagtatgttatgacattggttcaagaatgtggagcacggagtggaagcgacgagcatttcattgcaactgagttgtttgtcagtagagaacaaagagaaatgttcttgactctgagtaccgctgaggagcgtctagaatggcttagaagaaagtataaagctaagtatggtgcttaagaaatatgatcgcggagcttcctgacatcgtttcacttggctcttgttgccttaggtattcaagactatttttcttttcttttgtatcggatgctagcatgtattagatcctgacaagtgtgatcgtcaacctgtgggtgtaaaggctgatctatgaatgtacaatc

SEQ ID NO: 14922 - DNA, 1623 bp, Oryza sativa
  ref <308>: DATABASE ACCESSION NUMBER: AK065460
  ref <309>: DATABASE ENTRY DATE: 2001-12-06
cccggggactgctacggggacagcactgccgtttccaccctagtccaggcaggaattacaagggttgtggttggtcttaggcaccccttaaagcacctgagaggaaaggcaattcaatcactacgaaatgaaggcattcaagttgacgttgtgggcgaggatctgcacagtaaattatttaaggaagctcttaagtcatgcctcattgtaaatgccccattactttaccgagctgccttccgtgttccgttctctgtcctgaagtatgctatgactgcagatggaaaaattgcagcaagcagtgggcatgcatcttgggtaagtggcaaatcatctagaggcagagtatttgaattgcgtggaagaagcgatgctataattgtaggtggaaatacagtacgccttgatgatcctcgcttaactgccaggcatgtcaaggggcatgttccagtgcgaattgtaatgtcacagtctcttaatcttcccgaggaagcaaatttatggaatgtacatgatgcatacacaatagttgcaacacaaagaggtgctcggagagatctccaaaagaaacttgctttgaagggtgttgaagtagtggagtttgacatgctgaatcctagagatgttatgtcatattgttatgatcgtggttacctctccgtattatgggagtgtggtgggaccctagcagcttctgctatatctgcaagtgttattcataaggtgtatgcattcttggctccaaaaataattgggggagtgaatgctccaacaccagtcggtgaactagggatgaatcaaatgactcaagcgattgatttaattgatgtttcttacgagcagattgatagggacatgctcatgagtggattcatccaacctattcctgatctctcacctgtaataccatctgtggatgaaatgccttcagttgatccagaagtatctccatatgaaactaatattatatccttctacaagacttgggatacctttggtgccttctctaacttttctccccatccaattcacatgcccgatgaaaatggagactatttcacatggccaacagtggagcactattaccaggcacacaagtttattggtgttgatgatcctcaagcaagagagattgtccaagaaataaagctggctaagagtcctgaagaagctgctagaataggacgcactcggcaaagagaatttcaagaattggtacgaccagattgggattccatcaaaattgaagtgatgtacagagctacaaagcgcaagttctcaacttattcccatctgactgacatgctgttgtcaacggctggctctgttcttgttgaggcgtcgccccacgatttattttggggcggtgggcgcgagggcgaaggtatgaattacttgggtagattgctgatgcaattgcgatcagagattctaggaacaattcaaacagctgttgaggtaggggagccagcttgatttgctggagaggtgatcataacagcagacgttttgatctggggtatttatatgtatcattatggtgattgccttcaaaattttgtgaaacatttgtttctttatctctctaaattcctgtagaaatttgagatgctttcgttgctg

SEQ ID NO: 14923 - DNA, 1762 bp, Oryza sativa
  ref <308>: DATABASE ACCESSION NUMBER: AK065461
  ref <309>: DATABASE ENTRY DATE: 2001-12-06
tctcctcccgccgccgccgcacgcggaaccctagaaaaccctagcagcggcgagcaccggggagcgggcggccatggcggagcacgacctgacggcgcggatggcggggcagatggactgccacctggtgttcccgctgctggagttcctgcaggagcgtgcgctgtacgcgaacaaggagatcctggaggcgaagctccgcctcctcagcgggaccaacatggtggactacgccatggacatccacaagtccctccacgacaccgacgaggtccccgacgacatggtcaggcgccgcaccgacgtcgtctccaggctcagggcgctcgacgaggccaccgcccccatcgtctccttcctccagaaccagcagctcgtccaggagctcaggccagacaagcagtacaacctccacatgctccaggaccgcttcgagattggtcctgagcagattgagactctgtatcagtttgccaagtttcagtttgactgcggtaattactcagatgctgctgtctacttgtatcaataccgtgctttgtgcacgaacagcgagaggagcttgagtgccctgtggggaaagctggcagccgagattttgatgcagaactgggatgttgcactggatgagctcaaccgtttgaaggagattattgattcaaagaacttctcatcaccactaaatcagctccagaataggatatggctgatgcattggagtatttttatcttctttaaccatgaaaacggcagaaatgggatcatcgatctgttcttccaggataggtacttgaacgcaatccagacaaatgcaccccatcttctgagataccttgctacagcagttgtcgtgaacaaaaggagaaggaacatgcttaaagagttgattaaagtcattcagcaggagcagcacagctacaaggatcccatcactgaattcttggaatgcttgtatgttaactatgattttgatggtgcacaacagaaactcatagagtgtgagcaggtcatattgaatgatcctttccttggaaagcgcattggggaagggaattttgtcactgttcctttgagagatgaattccttgaaaatgctcgtctgtttatctttgaaacttactgccgtattcatcggtgcattgatattggcatgctttctcagaagctgaacatgagctacgatgaggcagaattgtggattatgaacttagttaggaattcaaagctcgacgccaagattgattcagtgtctggaactcttatcatgacgaccaatcatgttaacatccatgagcaggttatcgaaagcttaaagaatcttaacatgcggactttcctgctagcaaagaacattgtggagccggctcaagcagcacaacaggcagctcggtgagattgacagagaagaccacagttttgaggcgcccggaattatttaagtagagacaatcctctaaacttttggagttttgttgtttagcattgactccgttatcagtacctaagatcatctaggaggtggtttctcgttcgctacagcatatgccgacgttttctttctattttgtacttggaatcctgtggctgaagttaatcctttcgttggtactacaatcaagtattacctgattgttatggtgtttcgtgttgaagtgaagtgcggaagtgtggtcatttttataattgtaggttcaatgtttttcttggttctgctaaatttgtggcgccacattttaccttgatttcagtcaattatttgacc

SEQ ID NO: 14924 - DNA, 1462 bp, Oryza sativa
  ref <308>: DATABASE ACCESSION NUMBER: AK065462
  ref <309>: DATABASE ENTRY DATE: 2001-12-06
gtagggaggctagcctgtgtgggtggagaaggcggtgggaaaggggagaagaggaagaagaagaagaaggcgcaaatggcgacgggggagtcgcagcaggcgtctcggcgggaggggcgagagcgcgacgagcacgacgcgtctcggcgggagcgggagcgcgaccacacgcacgggaggcgcccccactcctcgtccaggtcgcggcgggacgatcccagtccgaggaggagaagagaggacaggaggcatcatgaatcagacagaagtcatcgccacaggagtcgagctgaagaaagtgctaaggcagttgaccgtgaccagaagagggataggccattgcaagatgccgcgcagcccgatgatcctttgcgagcggagacgaagcccctagatgatgccagaaatggctctcctgccaggcatgagagatctcctaggggaaccaaacggtttcctgaatcaagagatgctaggcggcctcgatcgttctttcagcacgatgaacgtggcagtgctgggcaaggtggtcggtgctattaccgccaggctagtgaccggggaagacaaagggatgaaaaggagcatgttggagatagagagaaaaacaaagatgaaggaaaggctatgcaggatgaacaacaaaatgatggtgaatctacatggaagcatgatgggttcttccagttggaggaagaagctcaccctgccaaaagaaggccaccatttaatgagatgggcatgccactggaggggaaagaatctgtgctttctgttacagaaccagattcaaggtcacataaacatgatcaagctgggcctacctctgcaataggagaagaaaggagaaattatcacccacggggatttgataggcatgagggacctttcgtaaggccagatggtcaaggtatgaggaggggattttctgatcacaggaatgctggccaaagaaatggctatgattcatgggggcgttttgctggtagaggaaggggcagatacaggtttaacaactcatatgatgggcgaaacagcatgcaccaggctgctggtgatcaagcagaaaaatggaagcatgacctttatgaacaaacaaatagaagccctactcctaagaccgaagaagagcagattgcaaaaattgaagcattgttggcgctgtagctactgcttgggattgctttctggtcatatttgcaatggctagataggtgatcatctacttggtgtcattggtgttgaatgctgtcagaccgtctatcctgatgctgcgtcactcaaatgcagctggctgaattttggggttgacaatgttttcttcttccatttaagaaaatgtgcctgatattctcggtttacttgatgtaggatccatgaactaagaacaagagtaaacaatttgcctcccattaaaatgcctatcgaaggccgaagtgttcttgtaagatgatgtctactc

SEQ ID NO: 14925 - DNA, 1765 bp, Oryza sativa
  ref <308>: DATABASE ACCESSION NUMBER: AK065463
  ref <309>: DATABASE ENTRY DATE: 2001-12-06
ggattttgacatggtatcagagcagagatcctaaccctagcctcaatccgacgtcctccccggtgcgccggcggcggacgccgccgccggcagccacaccatcaagccgtcagctctgtcaagatgcattagcttctcgtcatcgtctcattcatcttcaagtagcagccagtagcagcagccagcagcagatcgtctagacattgactacctcatcccatcgccagtcgcggccgccgtatcctctgccggcgggcaaaccgtcgtcgtcggccgtcgcagcctcgccgcctcaatcactggtctcgtcctttcatcaccactcgcagtattcgtcaagcaaaccaacagcagcagccctgctttcgtcgtcttcaagcagcaaatcattaagaagcagcagccattgagctagttgcagacttgcagcagcatgtgtcagcagcagcaagtcatcttgatccatttcatcctcaagcagctgaggaaactcctctgctttcttctacattctcaccaaatctaagtggatctgttgcatttaggcttcagtttgagcctctgcttgttgtcctggaactccattttgtgcactatcatcaacatcctttgtttcctatcctatattttgctagtatcagattgccatgctataagcttgattgctcatcatcattttgtgcactgctagctccttgatttatacctaatatcagttggcacaagttctaaaacctcccgcatcatgcttctatcatgtgctgcaacacatcaacagcataaaccagtggattacttgggatatttctaattgaaattggcttcttgattagtagatgatcttcaacctttagttcgaaatggttctcttccattgatatgccatgatttggatgaagcatctagggtctcagtctcacagtcctacccacaaagagtagtgttgatttgttagcctctaatcgtattccatcaacagatctacttatttcttctacatttgctatgtttgcttgctgctgccatcaacaattctactaatctccttaggcctattgatatactatgttgtcatatttcctttacaatccttttgagtccatccaagtccaatacacaacgattcgttgaagcgtgctaatctatcttcatcactagttccccactggagctggtttatcacaccacatcatctgcattgtcaactccccatcggagttatcatctccaacttcaccagctccatatcggagttggacatcgttatcagtcaaggaccgaagaacaatttgtaaaggtccattatcatcaccatcaacatctctagatctacaaaggtctgaagaacagtttgtgaaggaccttcatcctcttcatcatcatatccacatctccgaatcagtgattggccgaagaacggttcgtgaaggctttaaggtaccaaaggagctgaagaacagtttgtgaaggctccaagatcctcttcattgaggaagggatggatttccatcttcatcatcattctagagttgcacgattcgacaacatcttcaagcatggactgtggatttattctagtgtgtcattaatctatatttagtttcaaatgcaatgttacatatacattgcatttgagtaggggtgttaagaatatatatgtattagtgtgtatgtgttaaggggtatttctgtcttttcacgttgtagtcatctcatattagccctaagggccaactcaatgaataaatagttaaatccccaatcc

SEQ ID NO: 14926 - DNA, 2893 bp, Oryza sativa
  ref <308>: DATABASE ACCESSION NUMBER: AK065464
  ref <309>: DATABASE ENTRY DATE: 2001-12-06
gaccaaatggtgccaaatctagcaatttctccccactccacccagaagaaaaccgtgaagaaattctccggagagaaaaaatccaatcttttctcccccgagcacacatccctgtccggaataatgctcccacgcgaattcctaacatctcaccatctcttcctcatatccacaagccagcgtatgggtgatgtgttcttgatgatccccaaggacggacctgtccggcgaatctacaaagtggtgagtaggaaattgtggtaaaaaatcccccttttgccgatggtttcggaggattgctgttctggggagaagttttgatctcgccggcctgttttgtgtgagcccgtgaagcttcgaaccccagagaatttctcgcctcttcgcatgcggagagttgcaagcttgtaaaaaactactgttgattgatctgaagtctgaacccatggagaccagaacaaatgagtattcccgtaagggggcaatgtgggagctggaaaggaatcttgatcaacccatggatgcagaggctggaagactcaggaatatgtacagagaaaagacctatccaacaattttactgctacggctagctttccaaagccttggtgtggtatttggagacttaggcacatcacctctatatgttttctacaatatctttcctcatggaatagaagatacagaacaagttattggagcactctctcttataatttactcccttacactcattccacttgttaaatatgttttcattgtcttgagagcaaatgacaatggccaaggaggaacatttgccctttattcactgctttgccgtcatgcaaagataaatattattccaaatcaacatagaaccgatcaagatctaacaacatacagtcgccgcacatatgaagaaaagtctcttgctgccaaaatccaaagatggttagaggggcaccaattcagaaagaatttaattcttattcttgtactatttggaacttgtatggctgttggagatggaatactcactcctgccatatcagttctttctgcgactggtggaatacaagttgaagaaggcagaatgagaaatgatgtggttgtaattatctccgtgctgatattgattggactgttcagcatgcagcactatggtactgataaagtcagctggctctttgcaccaatagtatttgtttggttcatactcattgggattcttggtgctgtaaacatttgcaaatatgaccattcagttcttaaggctttcaatcctgtctatgtatatcgttactttaaacgagggaagactagttggacttctttaggtggaattatgctcagcataacaggcacagaagcattgtttgctgacctttcgtattttcctgtacaagctattcagattgctttcactgtggttgtgttcccatgccttcttctgcaatatactggtcaggctgcgtttatagctgcaaacacaaaccaagtcagccatgccttctatatctcccttccagctcctatactttggccagcatttgccgttgcaacagcagctgcaatagttgctagtcaggccactatatctgcaacatattcgattatcaagcaagcacttgccctagggtgctttccccgagtgaagatcatccatacttccaagaagtatctcggccagatatacagccctgatattaactggatcctcatggttttctgcatagctgtcactgcagggttcaaaaaccaatcccagattgcaaatgcatatggtactgctgtgatcatggttatgcttgtgacaacatttctgatgatccccatcatgctgctggtgtggcgaagccattggaccctggtcgtcgccttcaccgtgctgtcattgcttgtggagatcccctacttctcggccgtcgtgcgcaagatcgatcagggaggatgggttccgctggttttcgcggcaggcttcatgatcatcatgtatgtctggcactacggcaccctgaagcggtacgagtttgagatgcacagcaaggtgtccatggcctggatcctggggcttggtccgagccttggccttgtcagggtccccggcattggcctggtctacaccgagctcgccagcggtgttcctcacatcttctcgcacttcatcaccaacctcccggcgatccactcgacgctggtgttcgtctgcgtcaagtacctcccggtgtacaccgtgccaccggatgagaggttcctggtgaagcggatcggccccaagaacttccacatgttccggtgcgtggcgcggtacgggtacaaggacatccacaagaaggatgacgacttcgagaagatgttgttcgatagcctgattctgttcgtgaggctggagagcatgatggaggagtacagcgactccgacgagtacagcaccctgatgatgagcctcccaaataacccagggatcagcaatggcggcgtgaccaccaccggcaccaacaatgtcatggaggtgatgagctgcacgtcgacccatgactccattgtgccggtgaactccaggtccgacgacacgggcagcagccaggtgatgccggcgtcggggcagatggcgttccagagcgtcggcgacgagatcgcgttcctgaacgcgtgcagggacgccggggtggtgcacatcctcgggaacacggtgatcagagctcgcagggattcagggttcgtcaagaagattgtcatcaactacatgtatgctttcctgaggaagatctgcagggagaacagtgccatcttcaatgtgcctcatgagagcatgctcaatgttgggcaggttttctacgtgtaatgtaatcttagtagcactagattgtaaactaaacatgcatgtgattgtatcattcagaccgacttg

SEQ ID NO: 14927 - DNA, 2953 bp, Oryza sativa
  ref <308>: DATABASE ACCESSION NUMBER: AK065465
  ref <309>: DATABASE ENTRY DATE: 2001-12-06
gagctgacctgaccccgagccgagccgtacaccaccggaggaggaggaggaagccggcgaggtgacgctgcgagatcgggaggtagggttcggggggaggttttgggtttggtggatggtcacggcggcggcggagttcgtcgatgggcaggtcgttcagggactcgctgaaggtgctcgaggccgacatccagcacgccaactcgcttgctgctgaatttagaagggaatatgatggcgcctgtcttcagatgagaatgtcatactgtccagctgcacacttcttcctttttcttgtgcagtggacagattgcaaccttgctggtgcacttgggctgttgaggattctcatttataaggtttatgctgatgggactaccaccatgtctgctcatgaaaggaaagcaagcattagggaattctatgctgtcatatttccttctttgatgcaactacatgaagggatcaatgaagtggaagacaagaaacaaaaggcaatctgtataggaagatatagaagacgagatgaagatcagaaaatggtgatttcagagattgatgataacatcgaggaggaatgtggcatatgtatggagataaatggcaaagtagttcttccaacttgtagccatgctatgtgcattaaatgctaccgtgactggtacacatcttcactcttctctctgtggcgtttatattgtataagggggttcagttcagaaaatatcttttatgtttctctagctgtatagcaatagcacttctgcatgatgaaaattacatgttggatcttcagtttaattaattaaaacaatgagactgttgctaaccatcatggtgtgccagtaatatttcgattccttcaatttattagaatcaaatgaaagaattaccctgttcctatgtgcttactaataaaaaattggacccttttgtgcttccttgaactctctgcggcttgcgatttaaatcattaattctgttgagcctggacaagtgaaagacttattcaaagaaagctcaagagtttgatgtcccatgcctttctgatggagaacctaccactgcttcttctaatcctgaaacagggcttggcctgttgacttagtcattgaaggtcctccaaccttaccccacccacggatgatattctaaaagatagagggtcacagatgattaaaaaatagatacaaagacatttaaagtaaaggggtgtatatattattcatatcctctatctacggaaaaaataaacagagttcgtttttgggttccctgaaggctgaaggtcccagtggattggtcttagcttgctagctactatactactagttcatgttctggaaacttgctggtggtagttgttaattggagcctttgaggctatgtggttaacaatctctaatggaatggagcaacctcatttcagttcttattaaatggctggttgctttcagtgacatatttatctttcaggtttattaatttctggttcaaatgttcaaaattttggatctttgatacaggaagtaaagaatagtgattgaaatggtggaggtgtgacttaatccagaaaattggccctcctaattttccctaatttataaaatctacactgtttaatgcacataatgccttgagacattcagaaatgaatcttgtcaacttggataataacgcgttaatgttacctcaattgagaaggcaatactggtgtgggtaaagctcagcatagccaaactgttagccatgccagaactattagccaattgctgccggttgtatgttggcatattaagtgattcaaagtctcagatctgctttcatggggtaccctggcacatagctatcagttattcagtctattctttttggtaataattttgtggagaacatttttactctttgactattctgcattagcagcttgagcattgctaagttcgaactagtactagttgattgtaaatcctggcatactgttatagcgcaaagaagggcttgagttactgcaggttacatatattttgatcttagcatgtcatttgtatctctagcatgtagttctcaataatcctaacatgaactatctgcaaatatggcacctttctaactcttactacctccgtcccataaaaattgaatttctatggaattaagaacatattaggaggatagacaaatgactataataaccctatttaatgaacgtagtacatgcataaattccatatataaatgtgattaaaaggaatgttgagataataggttagagatgggatggaaggaaagaagattacaaggaaatgtaatcagtttaattggtcccacatcagtagaaatacaatttttatgagataaaggttcaaaggtaaaaattcaatttttatggtacggaggaagtatactttatcatgtattcttcattgcaggagatcaagatcccagtcttgtccattctgccgcgatagtctcaagagagtgaactcggccgacctatggatatatacagataacagggacatagtggacatagcgacggtccgaaaggaaaatcttaggcggctcttcatgtacatagacaagttgcccacggtcatccctgaaactgtttttgacgtttacgattcccacgtaaaatggccttgcactcatgcacaaattctttgctggtgtgttactactagtgctgtagaaattgtggagcccttggtgttcatgctgccccgcttgtagaagctgtaagcagctaagctcgccgaggaggctcgctatacaaaggtatatatgtaaattgtcttggctgtatggtgtgtacctttgtgaggagttaggagaatctgatgccagtcagtctgtaagtaaggaagaaccagcaaccattgactttgtttcttttaattgtaagcatttcactttcacccatgaaacagtgaagaatgccatcctgacg

SEQ ID NO: 14928 - DNA, 2263 bp, Oryza sativa
  ref <308>: DATABASE ACCESSION NUMBER: AK065466
  ref <309>: DATABASE ENTRY DATE: 2001-12-06
gcccaccacaattcaaatcacgctcccctctccatcgatccacccccaatatacgtggctctgcttcctcttcccctgttcctcctcccctgtttcctctcgttcttctccaactcaccctgtttctctcaccaaatgcccgtagtacgctgctaaccatgtccatgtccatcgcgctccacgccgtcctcccccccgcagccgcaactccccgtcggcggcccacccgcctccgagcgagctcgacggaggcgccagcgagcggggagaaggggcaagaggacacggacaggaagagtggaacggggatgaggaggaggaggaggagagcgaagaaggtgcaggaggtggggctggaggccctctacgacgacggcttcggggaggccaccgtcagggactacttcgacgcgctgagggccacgccactcgacggcggcggcggcggcggcccgccggcggtccacgcgccgccgctgctgctcttcttgccaggaatcgacggtgttggaatggaacttatcatgcagcacaaatctttgggcaaggtatttgaggtccgctgcttgcatataccggtcaatgatcgtacaccatatgaagggttgttacaaattatggaggaatctgtcaaatatgagcacaatttgtcaccaaacagaccaatatatatcattggagattcctttggtggatgtttggctctttctttggcatcacgaaatccagaaattgatttggttcttatactagtaaatccagcaacatcatttgcgaaaactccgttgcaggcaatattgcctcttttggaaatggtgccaagcaaccttcctgtcactctccctcaccttctcagatatttgattggtgatcctcttaagatggcaatggttagcattcagaacaatacctctcctcaagatactctggaaagtttttcagacagtctttcttcaatgctacctttactttcagaatttggacatatcgtacgaatggatactcttgtgtggaagctcaagcttcttatgtcaggtgtagactatacaaactctcgtcttaatgcagtacaagcagaaattctgcttcttgccagtggcaatgacaatcttcctccaagtggagaagcagatcgactgtttaaggcactgaaaagttgcaaagttcgatacttcaggacttccagcgatagattactcatggagagcagctttaatctgctaactgtcataaaaggagccagcatgtaccgccagggcaaacaaagggacactatcactgatttcctcccacctacaataagtgaattcaagagaacatttggtgaagatttcaagctgcttcaccatttgctgagcccagtcatgctatctactctgagaaacggcaaaatcgtccgcggcctcgccggtgttcctgacaaaggccccgtcctgttggtgggttaccatcagctgttggcaatggagatcacttcaatggctgaagagttcttgagggagaagaaagcagttctgcgaactttggctcatccagtgttttttgtggggaattatgagattttgcgccaggagctatctttttttgacgtagtcccattgtatgggggagtacaagtcagtccgattaatacatataggttatttgagagagatgaatttgttctcctctatcctggtggtattcgagaagctctacatagaaaggatgaagactaccagttgttttggccagatcaaccagaatttgtaagaatggcagcacagtttggagttactgtcataccattcggttgtgtaggagaagatgacatgttagagatagttctggattacaatgaactaaagaacatcccttatatcagagaaacaatagagtcgttcaaccaagattgtccaggagtaaggagtactgtaaaaggagaggaaggaaatcaggtcttacacttgcctgctgttctacctaaattaccaggtcggctatactatctatttggaaaaccaattgaaatgaaaggaatggacggtgtacagagggatagggagagtgcaaaccaattatatttggacatcaagtcagaggtggagaatataatgtcttatctgaagaggaagagagagcaagatccttaccgaagcatcacagcgcgcacgttttatcaggcaacatggggagttactgctcaaatccctactttcgaaccatgaaaattaggttcaaatgtattttgtgggaatgagattaatttatgaacattgacagc

SEQ ID NO: 14929 - DNA, 2866 bp, Oryza sativa
  ref <308>: DATABASE ACCESSION NUMBER: AK065467
  ref <309>: DATABASE ENTRY DATE: 2001-12-06
gacggtcttccccaccggcgacgacgagaagcggcggcgcgtgccatgtcgaggttctggaggccggggtcggagaagccgacggcggcgatcgtcgaggacgaggagggcggcgtcctcttcctgcccacaagcaccagctcctcctcctcatccgggtttgggtacgcgagcttggagcggcagcggcagcggctgccggtgtacaagtaccggaaggccatcctctacctggtggagcggcacgccacgaccatcgtcgtcggcgagaccggcagcggaaagtccacgcagatccctcagtaccttaaagaggctggatgggccgagggtggtcgacttataggctgcactcaaccaagacgattggccgtgcagttgcatcaagagtagcggaagaagtaggtgtgagactcggagaagaagttggttacacaatccgatttgaggatcaaacaaatccaggtatgaccatgattaaatttctgacagatggggtattgatcagagaaatgatggaagatcctcttctgaccaagtatagtgtaattatggttgatgaagcccatgaacgatccatttcaactgacatgttgctgggtcttctgaaaaagattcaacgacgtcggcccgacttgcgtctaatcatatcctctgcaacaattgaagcaagatccatgtcaacttttttcaacattaggcgaaagaattctatgcttgagtctgctgatcatttgcccaacccagaacctgctattctttctgtggaaggtaaaggttacacagtggaaatccattatgttgaagaacctgtttcagactacttacaggctgctgtgaatactgtacttattattcacgaaaaggaaccaccaggggatattttggtatttttaactggccaggatgacatagacgcagctgttaagatgctaaatgaagaaattcaacaccgtggaagacattatttagacctgctgattctgcccttgtactctggccttccgcggggagatcaagacctcatttttactccaacttcaaaaggtaaaaggaaggttgtgatatcaacaaacattgctgagacgtcattaactctagagggcgtggtgtatgttgttgatagtgggttttccaagcagaagtgttacaatccggtgctttctatttatactcaattatatggtccactgttcttctagatatactacacttctacaatttggctaccctagatatatctatactcttgttccttttcatagaacctttttagtaaacttttttctaatctttcttgtatatttcttggtttagtccttttcctgtctataacttgcatccttttggcctagatttctgatatcgagagtttagttgtcgcaccaatatccaaggcatccgcaagacaaagagcaggccgagctggaagggtgcgaccaggaaagtgctttaggctttatacagaggaattttaccttaaagaaatgcagccagaagggattcctgaaatgcaaaggtctaaccttgtttcctgcataacacagttgaaagctctaggaatagacaacattttgggatttgattggccagcttctccatcaccagaggcaatgattcgagctcttgaagttctatattccctgggaatccttgatgaagatgccaaactaacagtaccccttggcttccaagttgctgagatccctctggaccctatgatttcaaaaatgatcctttcagccaataatttcggatgctctgatgagatattgaccatagcagcatttctatctgttcaatctgtgtgggtttccatgagaggagtgaaaaaagagtttgatgaagctaagctccgttttgctgctgctgagggagatcatgtgacgttcctgaatatctacaaaggatttcatcaatctggaaaatctagtcagtggtgttacaagaactttttggaccaccaagcattgaagaaggttattgacatcagggagcagcttgtcaggattatcaagaggtttggcataccactaacatcatgtgatagagatatggaggcagtaagaaaagctattattgctggtgcatttgcttatgcatgccatctagaggaatacagccagaatgggatgtacaaaacaataaggacctcacaagaagtttatattcatccttcttctgtgctatttagggttaatccaaagtgggtcatctaccagtctctagtttcaactgataagcactatatgcgtaatgttattgccattgaaccatcatggcttacggaagctgcaccacatttttatcagttccggacacccaatcctgcccttcactaactatatgatgcctgcagggaattattgctaggcacgtattacaaaggaggaacctcccaagctccatcaccactagtctagcgtctcaagagtttcactgatgtcggatcgagcatccctaagtgatactaccatcgaatccggtagccccaagcttcacaagtaccagatcggggcatccgcatgccccaacttgcgactgccgccattgctcatcattgtcataggcactactttgtgagaagctcgtcatcatagctgcaatagccacctcaagctcgtcactagtagttattgccaccgtcgttatagttatgtgttgtagccgcatgagcaaccttgccagaatagggatgaagactggagagagaagagagaagggatcagaggtgaagagagagaaaagatagcggagaaatggctgacatgatgcgtgtattttttttctctttgaaacgaaccacacaagataggtgtgagatttcattttaatgtagcattaaaaaaataaaattacaaccctg

SEQ ID NO: 14930 - DNA, 3151 bp, Oryza sativa
  ref <308>: DATABASE ACCESSION NUMBER: AK065468
  ref <309>: DATABASE ENTRY DATE: 2001-12-06
gacacggtgcccagccaaacacctccacctccacatctctctctcctctcccccaccctctctgccattcgcttgctttgcttcccaaagcttggagctcgtccaccagcagcaagaagaaggagagctcccttttcgtaccacctcgccgcgtcggctgctccgaatggtggtcggtctccgccggcgcgtctgctgaccgaccgacccggcctgcccgcctgcctgctcggcgtacgttctccgagatcccaccggcggcgggatctcgccgcgggaatgcccgccgcgcggcgctccggcggacggcttacggaggaggtgaacatgatggtggctctgtccgggaggaagaggaggctgcaagccgcaaccatggtggctttgtgtttcttgtcatccatttgcgtttccacagcgcaattcaagcctgccgacaactacctggtggactgcggatcctccaagagcacgacgctcggcacgaggacctttgcggctgacggggctgccccggtgaaggtggacacctccctggaaatccttgccggcacgtcggcgaatggggttgcgtcattcgataactcggcgctttaccagaccgcccgcatcttcacgagcccttcatcgtatactttcccgatccagaagcagggccggcattttgttcgtctctacttcttcgcctttgcctaccagagctatgatctttccactgccaagttcaccgtgtcgacccaagaaatgctcttgcttagtgacttccaacagccagacaagactgcgccattgttcaaggaatactctttgaacatcacccaagacaagctcattatttccttcaagccatcgaatggaatcgcattcatcaatgcgattgaagtggtttcagtcccagatgatctcataggtgatagtgtcccgatggtcaaccctatgcagcagtacagcggtttatctacacaaccattggaaacagtgtaccgtgttaacatgggtggaccaaaggtcactgcagacaatgataccctctccaggacctgggtcactgacaaaaagtatttagtgaacccatctgtgactagagaggttaatggggggaaggtcaattatatgaaaggtggaggatcaacaccgctgattgctcctgatattgtttatagcacagctacagaattggcagcttcgaatacaacgaacgcacttttcaacatgacatggcagtttgatgtggattcaggtttcagctacttgataagatttcacttctgtgatatagtcagcaaggcacttaaccaactctatttcaatgcatatgttggcagcttctatgcgcagcatgatattgatctctcaattcaatcaatgaatcagttggctacagctatctatttggatgtggttctttcatcaaatgatgcatctaacaagctcagcatcagtattggtccatccactttgaacaatgcattaccagatgggattctgaatggtcttgaggtcatgaagatgagcagtggctcaggttctgctttcactgttggatcatctggttcaaacaagaatttaggtgtgattattgggtcagtccttggagctgttggtattctgataattgtccttgtcatagtacttctttgccgaaagaaaaagactctggagaagcagcactcaaagacttggatgcctttctctatcaatgggctcacctctctcagtacaggaagtagaacttcttatggtactactctcacatcagggctgaatggaagctatggataccgatttgcctttagcgtgctccaagaagcaacaaacaattttgatgagaactgggttattggcgttggaggttttgggaaggtctacaaaggtgtgttgagggatgacaccaaggttgcagtgaagcgagggaacccgaagtctcagcaaggtctcaatgagttccgtacagagatcgaactcctttcacggctgcggcaccgccatctggtgtccctgattgggtattgtgatgaaaggaatgagatgatcttggtctatgaatatatggaaaaagggactctgaaaagccacctgtatggctcggataacccctcactcaactggaagcagcggttggagatttgcattggagcagcaaggggacttcactaccttcataccggttctgcgaaggctattatccaccgtggtgtcaagtctgcaaacatcttgcttgatgagaatctcctagcaaaggttgctgactttgggctatcaaagactgggcctgagttggaccaaactcatgtcagtactgcagtgaagggtagctttgggtatcttgaccctgaatatttccgaaggcagcaactgactgagaagtcagatgtctactccttcggtgttgttttgctcgaggtgctttgcgcaaggccagtgattgaccctacgctcccaagggagatggtgaatttggcagagtgggggatgaaatggcagaagagaggagagctgcatcagatcgtcgatcagcgagtttctggttcaatcaggccggattctctgaggaagtttggcgaaacagtggagaaatgcctggcggactacggtgtggagcggccatccatgggagatgtcctgtggaacttggagtacgtcctgcagctccaggatgcagattcatcgacagtatcagatgtaaacagcatgaacaggattgtcgaactcccgtcgcaagtccagaacatcggcgccctcgagagcatcagcgtgacaatggcggaagctggagcttcacatgagcctgatcatgacctctccgacgtttccatgagcagggtgttctctcagctaatcaaagctgagggaaggtgaaagacaaactgggtaatctgtagtgtactttgtagaagtgaggaagccctgaaagttgtttcttatttacttcagagatcatatgtaattgttctttctttttttctttctttccttctttctcatgctccatgttctactgaacgatgttttcaaatttgttatggccttattagccatcgtgagcagatagagcttttcttgttttgaatctattctgctctagaacagcgtgtactgctgccctggcaaaatgctggatctggatgtgtgatgttgttgagtagtttcc

SEQ ID NO: 14931 - DNA, 1536 bp, Oryza sativa
  ref <308>: DATABASE ACCESSION NUMBER: AK065469
  ref <309>: DATABASE ENTRY DATE: 2001-12-06
gtttttagcccactcccaccccagcctccgcccccacccccgtgtgccggcggcggcggtgtagatggtcgtggcgtggtggccgtcgcgaggatttcgggtgcagagtacggtgacttgggtgccgcactgaatctatgattcgattttacctgttttggttggatggaggagaaccggagaagtggcgtttcgagtcagcaggttgtctttgaaacatttactcaggtgatgttgccagttgccacactattatataccagtggaacaccaaaaggagtgatgcttatctgctgaaatctcttgcatctggtcgaaagagcagtaacattcacttcttttacctgaaagtaatattgaaatataaactgtacttttcttgatgtgatttcttgtcatgtgaacatcagaacccctgttcctcttctatccaaattaagttctatgcagttatgtttgtagatgaaaactttctgggatagtattagcagtacctggtgatagtttcctaagcatgcttccaccatggcatgtgtatgaacgtgttatcaagtacttcatcttagcttatggaattcaacatgtttacatgattgtcaagtatctgaaggtaacatttcaggcatcgtcatagttagtaccatcaagggtcttatgatgtcattaaggatttattgcgaccaattacatgacctaatgctgtactattctttagcagcttactgaacgctgcaaagttgagtttgatatattataagcaaatgtaacaatcgtcaggtccagaccttctaatctactttagggaaacccaagtgtcatacttgatatgatagggttccttccctttacagtattctcctttctggtcactattttctatttcttatgaagatgctgatgttgttcaggtgttttgacttctactctattgataggaagttttgcaacggtaccaacctcaatacactgtatcagtaccactggtctatgagactctctacagggaatagtcctattgagcaatcccgtcaaaccatcatttattgtgcatatggtcaattggctattggcaagaattgttgctgcacttctgtggtctttgcataatctggcaaagaagttagtattcaagaaaatccattctgcaattgggattccaaaggttcttggcacagttggtacccagtaaagcacacggaaatcaaggtagtgagcatagagaatagtgaggttctcgcagatggttcaaagggggttgtgaaagtcagaggacctcaagtgatgaagggatattacaaggatcattttttccagtttactgatgccaagttttaactataaattaaattgagctgtaaacagttgtttgggtcaaggtgaacacatttttgggtagaaatgcacatcagattatatatcttggtaaagacataatgctgcaggtcacagataacacttgcttattgtaaacatcatagttgtagcaatgatgaggttctagcaatggctaaaagaaagcctattcttgatgggaag

SEQ ID NO: 14932 - DNA, 2391 bp, Oryza sativa
  ref <308>: DATABASE ACCESSION NUMBER: AK065470
  ref <309>: DATABASE ENTRY DATE: 2001-12-06
gagtcaagaaaaacaaggcaatggcaatagcatttctcgagcattagaccttcccctccctttccagcattctgctgctctccaatccggcctccattgtgtagcagctagctccacgagcggcaagatgcacccgaccttgttgtgcttgccactcttggcctccttgctcctcctgtgccaccgcgcgcgcgccgagtgcgagccggcgacatgcggcaacctcaccgtcaggtacccattctggctaggcggccccaacttcaaccagtccaaccagtcgtcgccgtcgtcagctctggcctcctgtggccatccggctttcgaggtgtggtgtaacggcggcgtggcgtcgttgaggggctcgcaaatcctcgtcctcagcatcgactacaacagcagctcattcgtcgcggcacacaaaagggtcgccgacggcggcgacggcgtgtgccgcaccgacttcaacatatcgtccagcctagccctcagcccgttcacgatcagcagcagcaaccgggccatctgcttcctctacagctgcaacggcacggagccaccggagatcgacggccttgtgaacgccaccatctccagctgcagtaagcctatctacgcgtacctcggcgggatctacgaccgtgataatccaccggcgatcaaagccgggaactgcacgtactcgtacctgccggtgctgtggccggactcgccggcgaacttgacggcggggacaaactacagcccgcagttcaagaaggggttcgtgttggagtggcagaagaacgggttcggcgactgcgacgcctgtaacgggagcggcggtcagtgccggtacatcaacgattccgcggcggcgttcgcgtgcctctgctccgacggcaagctgcgccgctcgacatgccccggttcaagaagcaagagtcacataataggaatagcatgtggatcaagcggcggaatattattgattgtatctatattcatttttgcttggcacaaacgcaagaagaggaaacaaacccgagatttgaaagatctcatgcatagttcatcttcaatgcaatcatacagcaaagaccttgagttgggtggttctccccatatattcacttacgaggaacttgaagaggctactgctggatttagtgcctcgagggaacttggtgatggtggttttggaactgtttacaaaggaaagctccgggatgggagagtagttgcagtgaagcgcctttacaagaacaactacagacgagtagagcaattcctaaatgaggtagacattttgtcccgcctactgcaccagaaccttgttatcctatatggctgcacgtctcgttctagccgtgaccttctcttggtctatgagtacatcccaaatgggacagttgcagaccatctacatggaccccgtgcaggagaacgaggcctcacatggcctgtaagaatgacaattgcgatagaaacggctgaggcactggcataccttcatgcagttgaaatcatacaccgtgatgtcaagaccaacaacatattgctggacaacaacttccatgtcaaagttgcggactttggactatcgcgcctgttcccgcttgaagtcacccatgtatcaactgttccacagggcacaccagggtatgttgacccagtgtaccaccagtgctacaagctaaccgataagagtgatgtgtatagctttggtgttgtgttgatagagctaatttcctcaaaaccagctgtggacatgtccaggagccacagtgacattaacttggctaacatggctctcaacagaattcagaaccatgaagttgatcagttggttgatccagagatcggctatgagactgacagtgaaacaaagaggatggtagatctggtggccgagctggcctttcagtgcttgcagatggacagagagagcaggccaccaattaaggaggtagtggaggtcctgaattgtatcaagaacggggaatgtccagcggaaaagatgaacaagaatgcgtctccaaaggaagattcgcatctgctgaaggacagcctacagtattcgcctgactcagtaatccatagatttcatagccaatctactaaccactcggtagcatcaaactctagcggatgatgagaaactttgtattgattctgatgaaataaggataactaagttgtcccctcttggttgatggactaattaatactacaagtgtttgactatgagcttggcagaaattcagacaattggtgaatgcggtaggagaaatacagggttcaaacaatctcgtgtaatctagtgttcagtgtgttcatgatttcaggttagcgagtggtatcagggagaacacatcccattgttaccctaactagaggttgcaattttgc

SEQ ID NO: 14933 - DNA, 2958 bp, Oryza sativa
  ref <308>: DATABASE ACCESSION NUMBER: AK065471
  ref <309>: DATABASE ENTRY DATE: 2001-12-06
ggctagtctttatcctttgctttccacttgatttctccactgactcatccccatcatctcctcttctgttcagaatctcctcctgctaaagcatttcgttgctgattttttttttttttttgctggaattcttgttgtggggtaaggcgcaaagcgctgcgaggcaaggcataacagctgaaagttgcaatctttatcggttttggattcctcctcctcctgctgctgctctctctcctccaaggctccaacacatcctggtcccgagagaaaaaggggagatatttttttgggggcgcatgattcgatcccttgttgtttgctgttgttgccttgctgcgcaaagatttggtcctttctcggtctgtttcttggcctgttcagctcggtggtggtggtgttgttggtggtgcagttcttggagtcacatggttggtggtggtgtgggcagttcttgatccaggctcagattgaaactggcggtcgagagattcctggttgcaggagaagttcttggtcgcatttcgggtggtggtggtggtggtggtggtggcagttcttgatctgctccctcgggagaattcgattgatgtggtgggttctcttcttcttcttctccttggagctcagttccccaattcgccattttgatgaggagctcccactgtgagagctactgcgctcctcccttgtgcaacctcccctgcctccccaaatccaaagacgattcgaccacggacgatgccgccgccgcgtcgtctccaactccggccaccgtcgtcgccgcagctttcgctgaggacaagcctcctccgctgcagaagattgaggcggcggtgacggcaaacaaggatcatgatgatgatggtgatggtggtggtgatgagggtagcaaggaagtggtggtgacagtggttcccaagagtagcctgaagaagactaattgtgaggacagtaagaatgtggtgaagggcaatgtgaaatggatggatttgctggggaaggatctcactcaagttaaagaatttgagccaagcgaatctggagactcggatgacgaagacggcaacacctgcatctgtgtcatccagattcattcctagatatcaggtgggctcaagtaaagttgacacaagtgaaagatactttgatgagtggcaaaagaagctgcccaatacagatgaaatccgcaagagcaagcctagatcaagatatttcacaatatctggggtggaactatccccagataatatggcagttgcaactgtgtattttgtgcaaggggttttaggccttgctcgacttgctgtgagtttttacttaaaagatgatcttcatcttgatcctgcagagactgcagttatatctggcttctcatccttgccatggttgatcaagcccctgtatggctttatcagtgattccatcccactctttggatatcgacgaaggtcataccttattctgtcaggattccttggtgctatttcatggggtttgatggctacattggtggatagtaaatacagtgcagcattctctattctgctggggtcactttctgttgccttctcagatgttgtggtggattctatggttgttgagagagctcgtggcgaatcacagagtacatctggatctctccagtcactatgttggggatcctcagcttttggaggaatagtgagtgcatatttcagtggttcacttgtggatacttatggagtaagatttgtctttggtgttacagcttttttacccctgatgacatctgctgttgcagttcttgtaaatgaacaccgtctatcttcaggggaacgtgctatgtcacactctggttcaggattcattgagacctctaagcagcatatccggcagctttggacttcagtaaagcaacctaacattttcttgcccaccttgtttatattcctctggcaagcaacacctaagtcggattccgccatgtttttcttcatcacaaataagcttgggttcacgccagaatttctaggacgtgtaaagcttgttacatctattgcttcattgcttggtgttgggctttataactattttctaaaggcggttcctctaaggaaaatcttcctggcgacaaccatcataggttcagcccttggaatgacacaggttcttcttgttactgggcttaatcggcagtttggaatcagtgatgaatggttctctattggggattcgttaatcattacagtcctaagtcaggcttcatttatgccagttttggtgttagcagctaaattgtgtccaccaggaatggaagcaactctgtttgccactttgatgtccatctctaatgctggaagtgttagtggtggtctagttggtgctggtctaactcaattttttggagtcactaaggacagctttaagaatctagctctcttgattgtcatctgcaatctcagtgcgctgctgcctctgcctcttctaggcctccttccagaggaatcaggtaatgcagatgacgaagaaacaaaacataattgacttgaggatttctctagctctgcccgtccaactcagatacagcccatcgtcttggagttgaatgaatctgcagggaaagtatgaactcatactgcggaagtgcagatagcttcaattggccactgctttcatcacttaggtcaaactttttttagtctgaccattaacttgcaagctggtaccatggttcaagatcatcagaaaatgagcttcaatgctaaacagtacaggtatatcatttttttctccttttccattttacagtttagcacgtataccaaagtctaatttacaatgtgtctatgtgtactgagcaagtgttgtaatttttgtactctttatgttgctgatttaaccccatgaaaagtagatgagggggttaactattgtagttaaaccatgaattccttataaatatgaatgtattctgcc

SEQ ID NO: 14934 - DNA, 1746 bp, Oryza sativa
  ref <308>: DATABASE ACCESSION NUMBER: AK065472
  ref <309>: DATABASE ENTRY DATE: 2001-12-06
gttctgttgattctgttcgccgcctccatcgccctcatccaccaaaccgagcgcgccgccgcgccgcccctccaccagagcccgagcgctccgccggtgccgctgccacgccgtccctccaccggagcgccgaaaagccctcgtcgtccccctccactgccgtccaccttagtcatcaaggtccggcgccgacaaaccacgcggcccctggcgcttcattgcccctcgccggtcccttcgctttcccccgccggacacctcgctgacccacgccgggattctcgatgatctccccaacggccgcctgccctcgttttgcatggagtcgccgaccctcgtctgatttggaatcggagtcattgccacctctctatttttattcagaaatttggaatggctgacaatcacattagtttggaggaggttgcaaacaatgaaagtgtgataaccaaggagtttagaagcgaggcagaaggatataagttctataatgattttccctttgttgatatattcttgaaaactagatgtatctttagagttacaaaaaggtgagacttcttgtgattttgtaattactgtgtaagttccccatgcactgtttttcaacttgggcttatataattaagagtaaattgcacacacggtgcatcaacttagcaggtgggtgcaatttggtacaagaacttgagaaatgagcgttctagtgtaataacttggcagctaagtacaatttagtataagaatttcataagtgatcgcttaaatgcaacgacttgcaagatatgtatgattttgatacaataagttaagaagttatatgacaacttaattatttggagcactatttatacatattcaatttttaagtaattattttgacaatatactggcatggatgtgtacataagcatatttatatttttatcctaataactaataactgaaagtcaattaaactggatgtagaaattattatatttcggttaagattagggaagatgaagaaaacaaaaattctttaaggtaattggatgtacagtataattcttaaagattaaattcaatattataaggtaatatccctaggattgctatgtaatggcatattgacatcgtgaaaaaaactcacctagcatattcttagctaagttgatgcaccaaaatactaaattgtcaagttcttatactagaacatacccacttgtcaagttgttacactcgaacgttcaattctcaagttcttgcactatatcgcacccatctaccaagttgttgtaccgttggtgcaatttactctataattaacatatgatggatgttaaattcaatgttttctgaaaattattacacagtctaactgcatcatatatttcctatgttgcagcagacgaacagttgatattgccatctctgaattcattgtcgccaggagatcagttgatgttgagaatctctgcgaggagaagaaatgaagtgttttgctttggtttcgaattcgttgcagtttctgtgattcagattttcagtattacagaaggcatggaagtgcatgaaagtagtcgtactgaaaattgcattggtggctcatattttgttcttcatgattacaccttgagatttttgtaccctcaaatttaaccgtagaagaaataaaagggtaaggtagtttaaatgtaataagatcacaattctgacagtactggatattgcactgctagcttataatttttcccccttcagttc

SEQ ID NO: 14935 - DNA, 2350 bp, Oryza sativa
  ref <308>: DATABASE ACCESSION NUMBER: AK065473
  ref <309>: DATABASE ENTRY DATE: 2001-12-06
ggggaggaggggagcacagcgatttcttctccctctttcgccgtcgcattcgcctcgcgccgcgccgcgcacaatcccatccgctgctgcccaaggcttgtttcgcggattcggattggtgctgactcgctcccgattggcaccgggaggtatgaattctcgctaggatttcggtgggcggattgctgacgaggagagggttgggggggagtggagttggatgtgatcgggttgtgggaaatccctagtttgtggtgttgtgatggatcatctggctatcattgcgacggagttgggggattcgtcggacttcgaggtggagggcatccagaatctgacggagaatgatgtcagcgacgaggagattgaggccgaggatctggcccggcggatgtggaaagacaggatcaagctgaggaggatcaaggagaggcaggacaggctcgcccttgcgctgcagcaggctgagctggacaagtccaaggggaagccgatatccgatcaggccatgcgcaagaagatgtcgagggcgcaggacgggatcctcaagtacatgctcaagctgatggaggtgtgcaacgcgcgcgggttcgtttacgggatcatccctgataaagggaagcccgtgagcggcgcttccgacaatattagagcttggtggaaggagaaggtgaagtttgataagaacgggccggcggcaatcgcaaagtatgagtcggagaacttggcgtcggctgatgctccgagcagcgggatcaagagccagcacagcttgatggatctccaagacgccactctcggttcacactttcgtcattgatgcagcactgtgatccaccgcagcgcaagtacccattggagaggggcactccacccccgtggtggccttcagggaacgaggattggtggattgcgttgggccttccgagggggcaaattcctccgtataaaaagccacatgatcttaagaaggtctggaaggttggggtgcttacaggtgtgatcaagcacatgtccccaaacttcgataagatcagaaaccatgttaggaaatcaaaatgcttgcaggataagatgactgcaaaagagagcctgatttggttgggtgttctacagagagaggaaaggcttgttctcagcattgacaatggcatgtcagaggttactcaccacggtgctctggagtacagaaatggggacacacacagcagcagtaatgagtatgatgttgatggttttgaggaggctcccctttcaacatcatctggagatgatgaacaagatctttctccggctgcacagttgagcgaggagcatgccccaacaaggagagaaagagctaaagtcaaacgccctaatcaggttgttcctaagaaggcaggaacaaaagaaccaccaaagagaaaaagaccacgccacagtgtcaccgtaattgagcaggaggtacaaagagctgatgacgcatcagaacattcaaggaatatgattccagatatgaaccgactggaccaggtagaaatccaaggcatggctaaccagattacaagcttcaatgaggaagctaatacgagtgaagctttgcaacacagaggaaatactcaagaactggcccatcttcctgccgattttaatcactatggcaatgcgcaggcaacaattgctactcctgtaagcatatgcatgagaggccaggctgtaccttatgaaagcagtgacaattccaggccaaaaactggaaatatcttcccacaggattctgattcaggctttaacaatatgcctagtagttaccagaccatacctcctaagcaaccacttccactatctatcatggagcatcatgtggttcccttgggtatcagaacaccagctgacaacagtccttatagtgatcaaataattggtagtgggaattctacttctgttcctggagatatgcagctcattgattacctttagactatatcagtatcagtagcccaatcccagatattgatgatttgctgctgcatgatgatgatctaatggaatacttgggaacataacataggttaggctccaatgcctccttgcatttgtttctgtcgcccattttgtcagtaggattaccatcgtaacttgagtatggaaggctatacttcttattttgccatcaaatatcaatcttgttagttgataccgtttctagcatggcaaattatacctgacttgcattctttggaaatgatatatcaaatgatgaccgaattgtaaatgggaaaggtgtatatgatttaagtttgaaatatggccttttctgaagaaagatatctagtgaagaatgaacatagtttttgtaatttttttagcc

SEQ ID NO: 14936 - DNA, 2495 bp, Oryza sativa
  ref <308>: DATABASE ACCESSION NUMBER: AK065474
  ref <309>: DATABASE ENTRY DATE: 2001-12-06
ggccatttcctctcgcttgcaatctcaccattaacaggctgtaccaggaagcatccatttcgatcgcaagaagaataatgggtgagagcagaggcagcattgccttcttcgcgagctacaggccaccggtggctctggacatattctgctgcccagctccaccgtctagcccgaaggacgagctgcacctgacggacggcgactcctacaactacaactgccagcccatcccaccggcggcgctcaagacggtcgtggagcgcctcggcgtgtcccgcggcgacgccgtcgagggcgacatcgattccggccgcatcaccggcctcgtcttcgtctccgagagggagcacaacctcgagacgctccacatcgccctgcgcttcaacgacgacggcgaggtccaggtcttctccctggccgacgcctatggcggcgacggcctgttcagcggcgcccgcatggaggacagcggctgcattgccggcggctacgaggtggatggccgcacggttgaccattacctcgtgtatgtgtccaccaaggagcaagtgcgagaacgtcgcagcccgtggaacgtcgcttacaagaccaatcttagaaccggcgagactgaacgcctcacaccaccaggaacatttgatataagcccatctgtgtcaccatccgggaagaaagtagcggtggcttcgtaccaagggaagaaatgggacggtgagatcaagaacctcaacaccaacatctacgtgatgagcttggagaacccgtctcaggatcgcgagcgggtgatcgagaacggcggctggccgtcgtggggcagcgaggacgtgatcttcttccacaggaaggacggcgacggggagaacagctgctggggcgtgttccggcacaccctgagcaccggcgagaccgtccgggtgacgccggcggcgttcgactcggtgactccggcggccatcgacgagaccagggtggcggtggcggccatccgccagaagtccgagttcagtgatgtccgcgtcgaggcacagtacaggcacatcgaggtgttcgacatgagatcgccggagcagccgatgcagatcacccggaacaccaggccaaaggccgaccatttcaaccccttcgtgatggacggtggcaagttcattggttaccaccgttgcaaaagcgagctcctccagcacggcgatgatctcccgagaaaatttcacaagctgcaatccccacacgaagatgtcggtgtgttcagggtgtccggtgtgttcccaacattttccaaagatggttctcagcttgccttcgttgacaacgagttcaaatccgtgtggctggccgatagccaagggatgcgtgtcgtcttcaagactgatggcccagacagcgtcttctcaccgctgtggaattccaagaaggatatactctatgtgtgcatgggaccttctttcaaagccagtgaaacgttggagatccattccatacacaatgtatccactggtgaccggaagtcgcggcagctcacgttcggaggattcaacaacgccttcccttccaccaatccagacggaacgaaatttgttttccggtcgacaagagatggaggggcaaagtacagcaagaacctgtacataatggaggacgccgacgccggagaaggcgaggatggcagccagtcgacggtgacgcggatgaccgccggcgagtggacggacacgcactgccagtggtctccgaacgggaagtggatcgtgttctcgtcgaaccgggacaggccggcggacgcgccggagcgcgaccacggcctcgacccgggctacttcgccgtctacctgatggacgtggcgtcccggtcggtggtgagggtgatcaggagcgggtacgacgtcgccgggcacgtgaaccacccggtgttcagcccggacgggcggagcatcgcggtgacgtccgacctcgccgcggtgaccgccgacccgatgtcgctgccgctcttcctgcactccgtcaggccctacggcgacatcttcaccgtggacatcgacccggacgacatggcgaggaacgaggacgtggaggggttcgtccgcgtcacgcacagccggtacgagaactccacgccggcgtggaccgtgttctccacgcacgacccgcacgcgcagtggaacctcctcgtcgtggaggacgagcacgtcccgtcgtgcccgtacgcgcatccggacggaggcgagagttggcacatgaccggccagatttgcatccccaaaaggcactgttaattctctcgccattgcattactacgtttcttgtttagaagcgttgttgtttgtttaacgtacgatatttattatctgaagacgttttcagcatttgcttggatgtacaacgtgtgtatgaactgtttgcgatgtaatatttgtttatttgcttgagatgtacttttttcttgtcagtaagacttttgcataaatcgaaaaaataatcacacgagtgtaatactacg

SEQ ID NO: 14937 - DNA, 1612 bp, Oryza sativa
  ref <308>: DATABASE ACCESSION NUMBER: AK098930
  ref <309>: DATABASE ENTRY DATE: 2002-08-28
gagcttaccaataccaattggagtagaaccaaccaaggaaagaatggcccggctgctactctccggcgtcgcgccgctccccctcctcccctgccgccgtcgcgccattgcatttgcgctcccacttgggaatgtccgcctccgcctccgtgtggccgcacccaccagccgcgtggccaccgtggaggaggacgacaatgaaaataatgctcctcctcctccttgtgaggacttcgacccgggcgcggcgcccccgtttggtctggccgacatccgcgccgctatccccaagcactgttgggtgaaggacccctggcgatccatggggtacgtgctgcgcgacgtggtggtggtgttcgccctcgctgccgccgccgcgcgcctccacagctgcctcgcctggccgctctactgggcggcgcagggaaccatgttctgggcgctcttcgtcctcggccacgactgcgggcacgggagcttctccaacaactcgaggctcaacagcgtgatgggccacatactccactcctccatcctcgtaccctaccatggctggaggattagccacaggacgcatcatcagaaccatggccatgtcgacaaggatgagtcctggcatcccctccccgagcggctgtacaggagccttaacagagccacccggatgctccgcttctccatacccttccccatgctcgcctacccattctacctgtggtctcggagcccaggaaagtctggttcgcatttccatcccagcagcgacctgttccagcccaacgaaaggaacgatgtgctgacatccacagcgtgctgggtggccatggctgccctcctcgcaggcctcaccttcctcatgggacccctcctcatgctcaacctctactttgtcccttactggatttttgttatgtggctggacttcgtcacctacttgcaccatcacggccacaacgacaagctgccctggtaccgtggcaaggaatggagctatttgcggggaggactgacgacagtggacagggactatgggtggatcaacaacatccaccacgacatcgggacacatgtcattcaccatcttttcccccaaatcccgcattaccatctaattgaggcgacggaagcagcaaagggtgtgatggggaaatactacagggagccggacaagtctgggccttttcccttacacctgtttggagcgctgtcccggagcttgaaacgcgaccactatgtcagcgacaccggagatgtggtctactaccagaccgaccctgctaactaaattaattttacatttccttcaattcttttaagcccggaggcttaaattagcttaattagatagctgcgactgacctggacatgtattcaacattcgatccacagacagatagaaagagacctatatatatcgccgatcaatcgatatatgtgcgtgtccgtgtggagatatggaggtcacaattctttccatggatatataggagtatacatacatgtattgaaggatatgtagctagatttgatgtgcgtgcgtgctgtactttgtaagacgcagcataaagctagtgacaatttggacaaggccatattgatatatccattatat

SEQ ID NO: 14938 - DNA, 2505 bp, Oryza sativa
  ref <308>: DATABASE ACCESSION NUMBER: AK065475
  ref <309>: DATABASE ENTRY DATE: 2001-12-06
gagaggagagagaaagaggagtgagaggagttaataatatcccatcattcacactccacggcatcattggcaactcctctcttccattccattcaaccacatctgtttctttaattgctgcgtttaatcactctcctcctcaccaaccgcttcgttctccgttggtgtatagttgccgcagcagcagcagcactcgccactgttctttctttctctctttctcctcctgctgctgcgttgctttcttcaggcagctagctcagctgcttgtgcgtgcatgggaaggagtaggaggaggaggctctgagagggagggaggaggaggaagaagaagaagaagatgaagttcatgaagctgggctccaagcccgacgccttccagtccgacggcgccgacgtcagatatgtgatctcagacctcgcaacagatgtcattgtgcatgtcagcgaagtcaaattttacttacataagtttccccttctgtccaagagcagcaagcttcagaggttagttattaaggccaccgaggaggggactgatgaggtccacatagatggctttcctggaggagtgacagcgttcgaaatatgcgctaagttctgctatgggatggttgttaccctcagtcctcacaatgttgttgcagcaagatgtgcagcagagtaccttgaaatgactgaagatgtggacaagggaaacttgatattcaaaatcgatgtcttcataaattctagcatcctccgtagctggaaagactctatcattgttctccagagtacaaaagcactattaccttggtccgaagagctgaaggtcatcggcagatgtatagatgctattgcttcaaagacatctgtggatccagctaatgtaacctggtcatacagtcacagcaggaaaggaatgagctgtactgaaatagttgaatcaacaggaagaacatcaatagctcctaaagactggtgggttgaggacttatgcgagctcgatgttgacctctacaagagagtgatggttgctgtcaaatccaaggggagaatgtcacctgaattgataggggaagcccttaaagcatatgctgtcagatggctgccagattcttatgatgctttggtcgcggaggattacatgagaaggaaccaatgtttggtcgagactataatatggttattgccgtcagataagacatcaggttgttcttgcaggtttctcttgaaactgttgaaagttgctatattggttggagctgggcaacatgtgaaggaagaacttatgtgaaggattagtttccagttgcacaaagcttcggttaaggatctcttactacctgctgcttcacccagtgatggcgcacacgatgttaagttagtccataatcttgtgcagagatttgttgcaagaacagcgatgtcccacaatggtggttttgttgagaaatctgatgacaaaatgattgagcttaactttgaacaagaatccactttggctttaggagagctggttgatggctatatatctgaagtagcttcagatccagacctttcattgtctacatttgttgaactagcaacagcggttccagaagcagctaggcctgttcatgacagcttgtactcagctgttgatgcatatctcaaggagcatccaaacataagtaaagccgacaagaagaagatctgcggtctgatagatgtcaagaagctttcaacagatgcaagcatgcacgccacgcaaaacgacagcctaccgctccggttggtggtgcaggtcctcttcttccaacagctgagggcgggttccagcaatgcgcttgctctaacggatggtggaggacacacgtgcgcaaagcctattatgaaggatcagagtgacatttgcgaaagacggataccaaggcatccaaactcgctgaacaagcaagcgaccagcctaagcgcgagagaggtcgagcaccggaagagcgagcacaggggaggaggcaggaacagcttcaaggaccagcttggcggcttccttctgcagtcaaggtccaggaggatctttgacaagatatggagcagcaaggggcagggagagaatggcaaaggttcagagacgtcaggtagctcacagagcccgccattgtcggctaagcctgcagatgtgaagccctctcccctcccacctcttaggaacaggagatattctgtttcatagggttcttgtttacttcttttaatttagctctgggttaggttgtacagaaaagataagttgatcagctggctgcacatcatttttggtttgatccttgctcagatcagtgaagagaaaggtgtgggggtaagggtgtaagcactaagtactaagcacttgttctacctgctgctttctgtatgtttatcaagttgtagcttactatagtgtcatcttgacttgagagagatttgctagggccttttattggaaatgtctatgaacaagaagcgaaaaactaatgaaaagggttcatgaggttggtgttt

SEQ ID NO: 14939 - DNA, 1522 bp, Oryza sativa
  ref <308>: DATABASE ACCESSION NUMBER: AK098931
  ref <309>: DATABASE ENTRY DATE: 2002-08-28
gaacctccatcttctcttctcctctcacgagctcgcagctcaagcgcacccagccatggcgactcctcagatctcgcgcaaagccctcgcctccctcctcctcctcgtcgccgccgccgccgcggtctccaccgcgtccgccgacgacgtgctcgccctcaccgagtccaccttcgagaaggaggtcggccaggaccgcgccgccctcgtcgagttctacgcgccatggtgtggtcactgcaagaagcttgcccctgaatacgaaaaactcggtgcaagtttcaagaaagccaaatcagtcctaattgcgaaggttgactgtgatgagcacaagagtgtgtgcagcaagtatggagtttctgggtaccccacaatccaatggttccccaaaggttccttggagcccaagaagtatgaaggtcaacgtaccgcggaagcccttgcagaatatgttaactctgaagcagccaccaatgtaaagatagctgcagttccttctagtgtcgtggttcttaccccagagaccttcgactctgttgtccttgatgaaaccaaagatgtccttgtagagttctatgccccatggtgtggtcactgcaagcatcttgctccgatttatgagaagctagcttctgtttataagcaagatgagggtgttgttattgccaatcttgatgctgacaaacacactgccttggcagagaagtatggagtttctggtttccccacattgaaattcttcccaaagggaaacaaagctggtgaagattatgatggcggtcgcgagttggatgacttcgtcaagtttattaatgagaaatgtggaaccagccgtgattcaaagggtcagcttacttcagaggctggcattgtcgaaagcttggctcctcttgtgaaggagttccttggtgcagcaaatgataagcggaaagaagccctctccaaaatggaagaggatgttgcgaagctcactggccctgctgccaagtacggaaagatctatgtgaactctgcaaagaagatcatggagaagggctctgaatacactaagaaggaatctgagaggcttcaacgcatgttggagaagtcgatcagtccttccaaagccgatgaattcgtcatcaagaagaacatcctttcgactttctcctcttaaagggtgtcccacgtaccccgacgagcaattggggtatagtcagtagcgcaatgcctgtctccaagaatggaaaacagaaagaaatgaaaagaaaaggcaatatcgatatcagcaagagatggcaatggaagttcgttagttgggtattctgttgaacaaacatgtatcccactgcccggcatgatcttttttttttctttctgctatttgcttttgtggttacagggattgacatagcaatcagctagtttactcaagaacacaagaggttttgtaaccatcccgtgatgagtgatgacaccgttctacgtttgtcaatccaataatttgataattcagtttacattatttctgtttaccctggtg

SEQ ID NO: 14940 - DNA, 2005 bp, Oryza sativa
  ref <308>: DATABASE ACCESSION NUMBER: AK065476
  ref <309>: DATABASE ENTRY DATE: 2001-12-06
ggacgtcttccttcccccaccctgcctcactgcctctacctcggcaggctcactcacctcgcttcctgtccgacatcgcgccgcatccccccatccctcgagctcgatcggagtaccggagagatcccaaaaattctctcgcccgccgccccgcccggcgccggcgcgttgcctcctcgatttcctctcccaggagtcgagatcccggagccccgcggattggctggccaaccgagccggggattctagggtttgtctcccccccggggttggttgcgatgctcgcgtcccgcatcccgctcaatcgctgagccgtcgccgccgccgtcgccggggagagatgggggagccgccccctgccggagaggggagcggcatgatgatgccggccaagcgccgccgcgagcgggtgttaccgtcgcggttcaaggactcggtgctggtgctcccgacggccgccgcgaagaagggcgagcccgcggaggccgcggcggaggggggagttgtggacggggagctctacgacgtggagctggaagaaggggatcccggcatgctgtggaccggcgacgagcggccggtgcagacggaggaggagctgtactgggcgtgcaggaacatcaggagaagcagcacctccacctccggtagcttcagcagcagcatcttcagcggtagcagcgcggtgacgtccttgagcaatgccggcggcggcggggggaatgggcggccggaggggaagcccacggtggtggtggagtgcaagccgaagagcgatggcggcgagaggaaagaggatttctactggccggaggaattcgtgctcggggatgttgtgtgggcgaggtcggggaagaagtgcccggcatggcctgcgctggtgattgatccactgcttcatgcgccaagggtcgtcttgaactcctgcatcccgggtgcactctgcgtcatgttcttcggatactctaatagcggcctcagggactatggatgggttaagcaagggttgatctttccctttgtggagtacctagataggtttaagggccaaactttatataagatcaaggcaagcagattccgtgaagcaattgaggaggctttccttgctgagcgtggcctttttgagctcgaaacggatgaggggtgctcactagagaagtctgtcaatgaccagtccatccctgacgggttactggaagggtctggttctaataatgagcaggaatgccaatcggaggctcaggttgttggcaaatcacctggatgtgatatttgcggtaatcgtcttccatgcaagatagcaagcaaaaagaagcaagcgggagaacgattactctgtaggcactgtgataagctattacagtcaaagcagtactgtggcatatgcaagaaaatttggcaccatacagatggtggaaattgggtttgttgtgatgagtgtcaaatttgggttcatgtagaatgtgaccagacatgcatcaagatggaggacttggaaaatgctgattatttctgtccggattgcaaatcaaaacgcaagaatatctccagttgaacaaatgaacacccctaacagttcagagtgagttaatttccttgaaagtctgttgaaactgtgatagttggaactaatatttgtcatttgtgcagacatgtagtatgtagggactagtgagggtggtacactggtactgaaactgtattgtgatatggtcaaacgggttctggtgccgtcatgttgttttgttagacgtgctttagaaaatagcattgtccataaactgtaatcactattttctctgtgacaatgtgacctaccaactagaaagcctgtactaggatccctatccgcaatgtagtatccacaaaggcacaaaccagcgtgtatgttgtacataaaccatgcatgcatatatgttgtaaatattaattatttgaaatgcttatgctgttgtatgtttagccaccgaagtaatgtagtttgacagttcttgggactttc

SEQ ID NO: 14941 - DNA, 1416 bp, Oryza sativa
  ref <308>: DATABASE ACCESSION NUMBER: AK065477
  ref <309>: DATABASE ENTRY DATE: 2001-12-06
gaacaggataagatagctcaaggtcaggcgaacagaaatagagagaacataactacctgaacctccctttcatgtaagctcagtcttcagaacaaaatcatggctactttatgccactctgctcataccagaacattcggaaagattggcaggagaaatgcagcaaaggtcctctgctcaacgcagatgccgccatctcagagcacaatcaaggttgttatcattggggcgacaaaagagattggaagaacggcaatagcggcagtaagtaaagcaaggggaatggagcttgcaggggccatagattctcagtgtataggcctagatgcaggagagataagtggcatggaagaagccctggaaattccggtgctcaatgatctcacaatggttctgggctcaattgcacaaaccagagcaactggagtggtggttgattttagtgaaccttcaactgtttatgataatgtcaaacaggcagcggcatttggtttaaacagtgtggtgtacgttccaaaaattgagttagatacagtaactgagctgtcagcattctgcgagaaggcaagcatgggttgcttggtcacaccaacattatcaattggctcagtgctcctacagcaagctgctatccaggcctcgttccactacaacaacgtcgagatagtggaatcaagacctaacccatcggatttgccatcgcaagatgcaatacagattgcaaataatataacagatcttggtcagatatacaacagggaagatatggactccgataatccagcaaggggtcagatacttggagaagatggggtgcgtgtccacagtatggttctaccaggccttgcttccagtacatcgatccatttctcgggccctggagagatttacaccttaagacatgatgtgacaaatgttcaatgcctaatgccaggattaattctggcaatacggaaggtgatacgcttgaagaacttgatttatggtctggagaagttcttgtaggattttattagaatgctggtaggaattttcatcccacatatcaagagaaatacaagctatggatattcatgatgttacccaagatacacaatcttgctgcaagttcaaggtggaaaccaaacacatgtcagcaatattcgggaaagcaaccatggtgataaccattgtcaccaaaattgagccaattaataaatgagtggttgaattgactcaaggcctcaagcatatgagttccatcacagaacataagggaactctagctgtaaggaactatgtttggtcctgggtgatgctgacgcaaaatgtttataacaatgcatggtgcgttgatagggaactgttttgatcccttgagatgaagtgatgtccccttgtttgtaaaacccatcaaaatagttatgagtaaccttt

SEQ ID NO: 14942 - DNA, 3724 bp, Oryza sativa
  ref <308>: DATABASE ACCESSION NUMBER: AK065478
  ref <309>: DATABASE ENTRY DATE: 2001-12-06
gtgacgtcgcccatggcggaagaggaggaggtggaggaggggaggtcctcgtcgtcggcgatactggacctgccggagccgctgctgctgcacatcctgagcttcctgacggacgtgaggtctcggcacagggcggcgctggcgtgcgggaggatgcgggcggcggagcgggcgacgaggtcggagctctcgctgaggggcgacccgaggtcgccggggttcctgttcctctcgcacgcgttccgcttcccggcgctggaacacctcgacctctcgctcgtctcgccgtgggggcatccgcttctctcctccgtgccgccctgcggcggcggcggcggcggcgcgccctcggcgtcgtcgtcgtcggggatgaacgtgtaccaccccgaggcgatctccgagcagaacgccttcatcgccgcccgcctcgcgggctgcttcccggcggtgacctcgctcgccgtctactgccgcgaccccaccacgctcgccaacctcaccccgcactggcaggcctccctccgccgcgtcaagctcgtgcgctggcaccagcgcccgcccaccctccccgacggcgcggatctcgagccgctgctggagacctgcgccgcgctccgggagctcgacctgtcggagttctactgctggaccgaggacgtcgtgagggcgctcaccacgcacccttccgccaccgcggcgctcacccacctcgacctcggcctcgccgccgccaccgacggcttcaaatcctccgagcttgggccaatcgcggcctcctgccccaacctccgcaagctcgtggcgccatgcttgttcaacccacggttcagcgattgcgtcggcgacgacgcgctgctctcgctggccaccagctgcccgcggctgaccgtcttgcggctcagcgagccgttcgaggctgcggccaacatccagagggaggaggcggccatcaccgttgcggggctagtcgccttcttcgcggcgctccccgcgctggaggatttcaccatggatctccagcacaatgtgctggaggccgcgcccgcgatggaggcgcttgcccgaaggtgcccgcggatcaagttcttgaccctgggttccttccaggggctgtgtaaggcctcttggttgcatcttgatggtgttgcggtgtgcggtgggctggagtcactttacatgaagaattgccaggatctcacggatgccagccttgcggcaattggccgtgggtgccggaggcttgctaagttcggcatccatggctgtgaccttgtcacttcggctgggatcaggaggcttgcattcacgcttcggcctactctcaaggaagtcactgtcttgcactgccggcttctgcacactgcagaatgtctcactgctctaagtccgatccgtgatcgcattgaaagtcttgagatcaactgtgtctggaacacaaccgaacaaccctgcagtgttgcaaatggcaccaccaccgaatgcgatcctgaggatgatgagcttggtgaagtgtacgagtctgcagccaagaaatgtaggtacatggaatttgatgatcttggaagctgggagattctcaggtcactctccctatggttctctgctggccagcttctctctccgctcatttctgctggtctcgatagctgtcccgtgcttgaggagatctcaattaaggtggagggtgattgccggacatgcccacgacctgctccaagaacaatttttggcttaagtgatcttgcaggcttcccagtattagccaagatgaaattggacctcagtgaagctgtgggttatgcacttactgcaccaacagggcagatggatctttcactatgggagcgattttatttgcatggtatcgaatcactgcagactttgtatgaattggactactggccgccccaagacaaggatgtgcaccaccggagcctgacattgccagccgtgggattgatccaacgctgcgttggactcaggaagcttttcatccatggcaccacacatgagcacttcatgaccttcttcctttcaattccaaacttgcgggacatgcagttgcgggaggactattatccagccccagagaatgatctgatgttcacagagatgcgggctgaatcttggcttaggtttgaggtgcaactgaacagccggcaaattgatgattagttatgtgggcacaaaatggtttgaagctgaatacagagatttatctggatggtgccattgctccactgtgcaatggcaggggattcctggcttggctgacaaatgggatggcgtgtgcagatgtgcaagccagttttgcatgtcattatcgggcatgttgagttgcaacaccggctacaacaaggattgaaagctgctttagtttccaaggaacaaccaatcagttccatcagaactgactaccaccatttgctgattcgttctctgcagtgatccccaatggagacctggcctttgcttcatctcatcctcaaactgtagcatgacaagaaagacgtgcggaacaagatcagcatcagaacatgacaaaaagattttcgcactagaagccggtttatccaattcctctgcttgcctcttccattcagctagttaagataatgcgagatcactggttttgtcaaagcaaatccagacgattcttggtgccatggaaaaagaagtcgtccatgagtgagagagctctcttgtcctaatccatcagcaagggcaataatgcttttttgattaagcagctggaggcctcacaaaataatgcttaagcaagtactactacaggattaaaagctggcctctagaaggagtagattaggtagaggagaagcttctcctttcctcttttgccacgttgaggcttattgctcacatgattgtcaatcaaccacgtcacacaagcacatacacacacttattatttgctcatagttttagttatttatcaacatttggcagatatgtgttggaaattcagatgctccttgatgccattttatcttgctgaatgtcttgaaagcaaagctggtgacaggagagatgtcatatgagcaggcagtcagttgcagccttgtggttgcacctccctttcctgctgtcctcttttttttgttttccctggtttctcttcatcagaattaaagcagatatttttgtggcggccgtggatttccattcatctgatgatcagctagtaatattctgcaagtgccttccgatagaattgagcgatgattctgaggtcagatactcatcagatgctcgaaggataagtgggtttcagacgatgctgcaaaagatattagccggcgagtgaggtgaggctactagcctactaggcttatcgccttgtataaaactaaaggagtcagtacagagacatcaggtaaagtcagcatatgcagctatccatctatgcatgcatgcaccaactgcaaagtaaaggtaaaagtgaaagctttgtcttccaggtgtatggaagaaaattatccttgtgatggttatgcaactcactcttttgtttgcacccagatatgtcatattggctttttcaccatggtgtcaaggttgatgtgaatgtgaatgtgattctactaatttgaggtcatgtagagtaattaagtaagcaaatggagcccgtcatgtcgtcatgcactgacaaggatatagtcctatggacctctattttgattaattggtggagaaaattcagagg

SEQ ID NO: 14943 - DNA, 1471 bp, Oryza sativa
  ref <308>: DATABASE ACCESSION NUMBER: AK065479
  ref <309>: DATABASE ENTRY DATE: 2001-12-06
ttggatacgttggtgttggtgcggacagcgtggacctggagatggagctgaggaagaaggaggcggcggttgcggccgcggccgccgtcgcggagatggagcgcggaagcaagggtctcgctgccctgggcttggagtccaagcccatctcctcgctacgccgtgatgtctctgcaggtactgacatggaaaaattgagccttatccaagtggcaagcctgatagagtcatcagcaaagaaagggatcacagaactcagcctccgggggaaactggtcgaccagatcgagtggctccctgtttcactcggcaaattgcaagatgttaccgagcttgatctttccgagaataggatcatggcactcccatcaacaattggcagccttagatatttgacaaagcttgacctacactcaaatcagctgatcaatctgcccgacgcgtttggggaactctccaacctaattgatcttgacctgcatgccaaccagcttaagtctcttccttcatcatttggaaatctcacgagcctagcaaaccttgacctgagctcaaatatgttgaaggctcttccagattgtttaggaaaattggcaaacttgagaagattaattgttgagacaaatgagcttgaggagctaccctatactattggatcttgcacatctcttgtggagcttaggttggatttcaatcagttaaaagcccttccagaggccattgggaagttggagaagctggaaatactgacattgcactataacagaatcaaaggattgcctacaacagtgggttcactttccagattgagagagctggatgtcagttttaatgaggttgaagtaatccctgagaacatttgctttgcgacaagtcttgtgaagttgaatctcagcaggaattttgcagacttacgagcactgccgaaatcaataggaaatcttgagatgctagaggagctggacataagcagtaaccagatacgggtactgccagattcgttcaggtgtctttcgaggctacgtgtatttcatgctgatgagactccacttgaatttccaccaagagaagttgtaaagttaggggctcaggctgtggtcaagtatatgaatgatttgaatgctgcaagaggaacaaaccagaagaaaacagatcggggaagcttctggacctggctcttctcgctgtttggttgttgcaaaaagaaccaagaagtgggattgccagtataactgaagcatttcatcatctgtatgtatgttgtgaattactcaggtctgcaaagaaaggaaacgtggataatttggttcctcttgttttttttgtcccttttttttggtgtgtatatatgtaattttgtcatgtaaggtccatttctagttatgcaagacctattaagattcatttctgtgtgtaacttcatttgtatgatagcatgttactgcttccatattaaaaactgtcttacagc

SEQ ID NO: 14944 - DNA, 3001 bp, Oryza sativa
  ref <308>: DATABASE ACCESSION NUMBER: AK065480
  ref <309>: DATABASE ENTRY DATE: 2001-12-06
gagcggcggcagcatcttctcttccccccctcgcagcctcgcgtctcgactcccttttcaaccctcctcccctccagtctccttccctctcttctcgtctcctctcccaccaccaccgcgccacctaccctcgccgcagcggcagccgcggttttaatgaaaagtagcacttgttaaagctactagttttgttagaaaatctaacatggggtcaggaaacctgatgatgaagaaggtggtgaggcccagctcttttgatttcgacatacagcttgataaaagttggacagaggatgttacttgcccaatctgtcttgattaccctcacaatgctgtcctgctaagatgtacatcttatgagaaaggttgcaggccatttgtctgtgatacagatcaaacccgctcaaactgtcttgagaggtttaaaggtgcatatgagctccctgccaatatgaaagtttcaaccattgcggtggcatatcagcttctagtgagactggcaatcatgattccagcctggaggagttttgggctaatcttttagagtcatctataaaaaacgacccaaaagttgttacttctgcctgcggtggttcctttgtgtccagtcagcagattaataatgggccgaagaattctggaaacattgtcaataccagtatggcaagtaatgctatcccagcacttaatgtggtgtcagaaacttatgctacaaatcatggcctcaatcaagtaaatgcaaatcattttggagctctgaagcatcaaggagatcatactcaatctcttttggcgtctgatgtagattctcaatcagatcaatttataagttcttcggtgaaatctccaatggatggtaacacatctattcctaatgaggtgcctgctaggcagaacagtcttggactgtggaagtacttggatgatgacagtcctggtttaggagataatccaagttcagttccacagagcttctgtccagtgaccaatgaaagactattagaaatcaatgagatctccccagaatgggcttactctacagagactaccaaggtcgtggtgattgggaatttctatgagcaatacaagcatttggctgggtctgctatgtttggtgtctttggtgagcaatgtgttgccggagatattgttcaaactggtgtttaccgtttcatggttggaccacatacacctggaaaagtggatttttatttgactttggatgggaaaacgccaatcagtgagatttgcagtttcacgtatcatgttatgcatggtagttccttggaggctaggctgccgccatctgaggatgattacaaaaggacaaatcttaagatgcagatgagactagctcgcttgttgtttgccacaaacaagaaaaagatagcaccaaagttgcttgtagaaggcaccaaagttgccaatctcatgtcagcattaccagagaaggaatggatggatttgtggaatattcttagtgacccagaaggcacatatgttcctgttactgaaagcttgcttgaactagtgttgcgaaataggttgcaagagtggcttgttgaaatggtaatggaaggtcataagtctactggtcgcgatgatctaggacaaggagctatccatctgtgttctttcctaggttatacttgggctattcgattgttttctttgtcggggttctccttggatttccgtgattcttctggttggactgctttacactgggctgcataccacgggagggaaaggatggttgccactcttttatctgctggagcaaatccaagtttagttacagaccctactcccgaatcccctgctggactcactgctgctgatcttgcagcaagacaaggttacgatggcttggcagcatatcttgctgagaaaggattgactgcacattttgaggccatgtcactgtccaaggatactgagcaatcaccatcaaagactaggctaacaaaactacaaagcgagaagtttgagcaccttagtgaacaagaactttgcttaaaagaatctctagcagcctatcgcaatgctgctgatgctgccagtaatatccaagctgcactcagggagagaactcttaagcttcaaacaaaagcaattcaattggctaatcctgagattgaagcatctgagatagttgctgctatgaagattcaacatgcatttcggaactacaacagaaagaaagcaatgagagctgctgcacgaatacagagtcatttccgtacatggaagatgaggaggaacttcattaacatgcgaagacaagttatcaggatacaagctgcgtaccgaggtcatcaagtgagaaggcagtaccgcaaggtaatatggtctgttggaattgttgagaaagcaattttgcgatggagaaagaagagaaaaggccttcgtgggatcgcatctggaatgccagtagttatgactgtggatgccgaagcagaaccagcaagtactgcagaagaagacttcttccaggccggccggcaacaagccgaggacaggttcaatagatctgtggttcgcgttcaagccctgttccgttcttacaaggcacaacaggagtaccggaggatgaagattgctcatgaggaggccaagattgagttcagtgaagggcagctaggagcagcatgcaggagttgaaatggtttttagggacagctagtttctctaattcttgtcttgtacattattggaaatgctagaacaacctgcagtttgccgacgctgtacattttaggaccatctgaatgatctgatacagcttttgctgaccccttatggctgatgaatttgatgttagccctgtagtaactgtggtggtttgcgtttggctggctttaagctggacataaacagcgtgtgcttcaatgtacatgtagatgcaatgcaagtacatatcatgttgtaaatgctaataagattagcaataatcagcaaagccctgagccaatgacaaggagtgtggtttttctctgtt

SEQ ID NO: 14945 - DNA, 2009 bp, Oryza sativa
  ref <308>: DATABASE ACCESSION NUMBER: AK065481
  ref <309>: DATABASE ENTRY DATE: 2001-12-06
gtcccacctcgccgtcgccgcactcccccccaccatggcgtcgcgcgacctcgccgagagcctcctccccgtggggggcggcgccgccaccgccaccgccaccgccaccgcccacgacgagtacgacgagcgcgcgtacgactccgacgacaaggtctccatcgccgtctcggactccgactcggaggacggcggcggcggcggcggcgacgccatgcgcccggccttctcgtggcgcaagctgtggcggttcacggggcccgggttcctcatgtgcatcgcgttcctcgacccggggaacctggagggcgacctgcaggccggcgcggcggcggggtaccagctgctgtggctgctgctgtgggcgacggtcatgggcgccctggtgcagctgctctccgcgcggctcggggtcgccacggggaagcacctcgccgagctctgcagggaggagtacccgccctgggccacgcgcgcgctctgggccatgaccgagctcgcgctcgtcggcgcggacatccaggaggtgattggcagcgcgattgccatcaagatcctctccgctggcaccgtcccgctctggggcggcgtcgtcatcaccgcgttcgattgcttcatctttttattcctggagaactatggagtgagaaaattggaagcatttttcggagtcctgattgcagtcatggcagtatcatttgcaattatgtttggtgaaacaaagccaagtggcaaggagcttctgattggtttggtggttccaaagttgagttcaaggacaatcaaacaagcagttggaattgtgggctgcataatcatgccccacaatgtcttcttgcactcagcactagtgcagtcaaggaagattgacacaaacaagaaatcccgtgttcaagaagcagtgttctattacaacattgagtccattcttgccctcattgtctcgttctttattaacatctgtgtcacaacagtttttgcgaaaggattttatggatctgaacaagctgatggtataggtcttgagaatgctggacagtacttacagcagaaatatgggactgcattctttcctatactgtatatctgggctattgggctgttagcatctggacagagtagcactattactggcacatatgcaggccaatttgttatgggaggcttccttaatcttcggttgaagaagtggttaagagcaatgattactcgaagctttgcaattattccaactatgattgtggctttattttttgacacggaggatcctacaatggacattctgaatgaggcactcaatgttcttcaatccatacagataccatttgcactgattcctctcatcacacttgtctcaaaggagcaagtcatgggatcatttgtggttggtcctatcacaaaagtgattagctggattgttacagtattcttgatgctcatcaatgggtatcttatactgtccttctatgccactgaagtccggggagcattggttcggtcaagcttgtgcgttgtattggcagtttaccttgcattcatcgtctatcttatcatgcgaaatacctcactgtattctcgcctccgctcagcaatgacaaagagcacatgagcgccttcagaagttttttgaacaaaaaaagggcaggacaattcccttatcggccttcagaactgttagtttctaccatggtgaagcagatcatattagaagaaagatgctcccccatgtaaaaacttgtactactgcctgcttgtattagctccaggaagaagcatagtaaaaaagtctatttgtattagctccaggaagaagcctaccgatgaactacactgtatattcctctgctgttgtataagtgcattagcgaattggttgggcttctccacttagggttgggataaaccacagtggcattcatgtgtttgaggttataaacagcagtagataactttgttacctttctcattttttggatgatgatggtctgcagaattgctgttgacacttg

SEQ ID NO: 14946 - DNA, 1397 bp, Oryza sativa
  ref <308>: DATABASE ACCESSION NUMBER: AK065482
  ref <309>: DATABASE ENTRY DATE: 2001-12-06
gaggggcctgtgcatatgacccataggcaggcgacaccgcggcggcagagcgctgcacgacctccgcctccccaatccgccccgtctccttgcccgccgccccccgactcccgtctcctcgcattcgctcaccggtgagcatcctaatccatcccatccggcctcggcctcgaatttcgtctcctcgcccgccgcttgcgccgatccccatcctgcgagcagaggtggcgcccggcgtcctctgcttccaccgcatcgtctatcgccggtgaccatccctccctccctatccacacctcatcagatggcggagctgaccacagccgctgatgtcaccgccgccccgccgcctccacctgggccaactccaccaccggagcccgtggtcacggccacggtcgttgccgagcagaaggtctctcctactgctcctccgctcgatgtgccggcacccgcaccgccgccgccgaagaagcgtaaggtggaggaggcggggttccataactccgcctactacaagatccgggccaccgtcgccgacctccgtgttcgtttcgtgcagtgcttgtgtgtgggggatggcgtgttgatctccgtaaacctggggttttggggaaaaaaaatttaagcaacgacgctgcttaggagacctgccaaactgaactctcgcaagacttgtacaattgcacttgatatgtaacatgggatttcgcataatgatctgttctgagttacctactctctcttttgaaggtttacgaagctactgatttccgaaacagtgatgctgctcgcgagattctgaaagagatcaaggtagtcatggagctagccaagaaaatgaggcatgacctcggtgccacttttgaacctgctaagccaccagagaagcctttagctggagttgtgaaggatgggccagtggaaccacctccatctgcagaaaacaatcacgctcctcagacagagaagatgggggaaacaccaagaagtgagattgcgcaagggtcttgtgtgacaggtggatctcctatcggctggaattttcttgtgtggcctgggggtgaggtggtttactacgggcggacaaaagaagtgtttcgggcgggtcaagctgaaaattaaaatgtggtgttcaccctgtcttctgactggtaaagtggtaatgtatcattcaattgtggtaggacgatttatagaatgtggtgttcgcattcagtctttctgaccggcaatgtgccaatgtatgtactattcaattgtgcgaggaatggaggatgaatcgtagtagatcttagcattctgttgactgaggtaatgtactactgtattcaattgtgggagggtgatttttgctaaacatctgttagtactatgtactaactgatttctgcatg

SEQ ID NO: 14947 - DNA, 1531 bp, Oryza sativa
  ref <308>: DATABASE ACCESSION NUMBER: AK065483
  ref <309>: DATABASE ENTRY DATE: 2001-12-06
ggctcgcgcactacaccggcgagccgcgggcggcggcggcggctgggagtacgggagacgccggaatactagcctcgcatcctcctccctcgagttcgctgcgggaccgcgccatcctcgtcggagccccgggcccaggggacacgagcttctccgccctcttgtccttcggtcagcaccgacgccgccgtctcgctcgctcgctcgatcgagccgttgcttgtggccggaggaaaggcctcaacagtcaatatggctggctcattcattactggggctttaatgcttattcttggatatgcatacccagcctatgattgctacaagacggtggaactgaacaagcctgagatcgagaagttgcggttctggtgtcagtactggattttacttgctgttctaactgtttttgatagagttggggataattttgtatcatggttgccaatgtacagtgaagcaaagctggcatttgtcgtatttttgtggtatcccaaaacactggggactgcctatgtgtatgaatcattctttaaaccgtggattgcaaaatacgaagctgatatcgatcacaatctgcttgagttgaggactagagcttgcgacatggcggttctttacttccagaaggtttccaactatggtcagacaaggctttatgaaatcttgcaatatgttgcttcacagtcacaaacccaaacatctcgcccacaggcacgtgaacagcagcagcgcccaccaccagcacagactcggcaagtgaaccctgcacctcagcctgttcctgcaccttcggtgcctccactgccaccacaacccacccaagctccttctgctccaccaaggaaccaaacgcaggatacaactccagttcctgttcctcctcctggtgcagagtctcttgcccagccacaggcacatgctggtcctcctcaagctaacgccagcgacggccctcagaacactgaagctatgcagattgatccatctggtccatcaacaagcaacgcacgtcagtcatcaataccagacgaagatacgctcatccaggaggctattcggatgacgaggggccggcttaggaggcgcacggccgggtctggacctccaccaagttagaacctacaccaagggtgatctcgacacaccattcgctctatgctgggatgattctgcaccttcgggcgttcaactgataacagaaggaaatgctgggttggtgaaaagtgattcaaatatttcaaatcctcctggagtgaacgcacacattcctcctcttgatgtgatgcctgttgctgtcgtctcactactcccaaatgtgcataatagaggcaatgatgacacatatcagtagcttggcatgtcgaatgcatcaagatgggtcgaacttgtccatgaggagtcaggtccgtcatatttgaattttgaaaagttcaacataccaaagtatgcgtgactgacttgccgaaaatcatcacaaaaatcaaatgggtaattagtatagttgatcttgatccctttgtttttaatt

SEQ ID NO: 14948 - DNA, 3543 bp, Oryza sativa
  ref <308>: DATABASE ACCESSION NUMBER: AK065484
  ref <309>: DATABASE ENTRY DATE: 2001-12-06
ggtctccatgttcggcactttttatccttcctgtactgatgcttgaaagtcgacgactgtagcccagctccagaacgaagtcaatttggggcttttcagttcctctctccaaatcggtccaatgtctcttcccccagccgcaatcccctctcgctcaaccatggatatgatatctattgccctctcattaatggatgtcaataacataaggggatctcatcaagtactattaaacaataaggacagaacaggatgatatttactggctatgcaactttctccatctaaattcatggtggattcattcagctaactaagcatgacagcatcagtagtttcctcagttttgcagaggcttggtgaccttgtcatccaagaagctacctttttaagtgatgttcctcgacaagtatcatccatgaaagcagaactgagccagatgcaatgcttcttaaatgttgtggatgccaaatgtttggaaggaaacagcatgatgaaaaatctggccagtaatattcaagacgtggcataccgggtggaagaggttattgacaatgctcatttcatttttaggaggagaaagacttctgtatcaaaatatactcacatctttggtgattccattgacctccgtgaggttggcaaaaacatacaagttataagaaaggaaattagtgagatttttgagcggtacaacagatacaacgcagttaattctagcacttcaacggaagcacagcccatttttagggaggatgaggatttctatgcacaaaggcttgtgccgccgggtttggatcaaggaatggatatagttggattcgatcatgaaattgcacaaattaagagttacttgcttgaccaaaataacatgaatctaactgttatatcgattgttggtcaggcaggggctgggaagtccacacttgcaaaactagcttatagttcagtcataactgaaggttattttcacaaatatggttgggtatccatttctccaaaatattctgcccttgaagtattaagagatctcgtgcgacagataaggggcactgggaagataagcgagcgaaagagcatgcatttaaatttctatggtgagacagaggtttcaaaacttatttttgattttctgaaggaagagcgctaccttattgttttggatgacatctggacaacagatacctgggacaagatcaaatcagtatttcctgacaaaggaaatggaagtagaataattctgactacccgtgatatggaagttggacaacatcctaaaactaaagtgcaaattcatacccctgacctattagacgaagacaagagctgggaacttttccagaagaaggcatttccacatgatgtgcaattcacagaacttgaggtggtgggaaaaaaactctccaagaaatgcaatggcttgccacttgctctagtggttttaggttgcttcctttcacgaaaccacaatattcatacatgggagaaaatggttgctagtgtagactgggaaatcatgaaaaaggagggcgatgttggacgtatattagctctaagttatcacaatatgtcaaataaccttaaagcttgcttcctttatactgcatcctttcccgaggactaccctatcacagttcatgttcttaaaaagatgtggattgctgagggatttgtcccaaatataagaggatatacacaagaagaagttgcctacagatatgtagaagagctggcacagagatgtatgatccaaattgaagaaagaagtaaaaacattgggtggataaagaaaataaaagttcatgatgtgttgcgtgagtggggaattggacaagccaggaaggaaggtttcttgaaagtttgctcaagcggcacagatgtggagacttattatgcagatgaacagaggtgttaccgtgtagcatttcatggttactttgataatgaagtgggaaaatcagttctgaatctccgttctgtgctggccttcaaccctgatggcaaacgtctgttttctttcaatgggttgcatttgttgagggtgcttcatttttgcagttccttaaagacatgtaccttgcctgaagaaataaacaaattggtacatctgagatacctgggtttggaaggtagtactgttttcatgttcccttcttatatgaaaggtcttagaaacttgcaaattcttgaagcaagtacagctactgtcaaggcacttccaagttccctctggagcatcgcagcactaaagcatgttcatgtctaccaagtactgcattggaaagcccaggagattagaacgaaacgaagcttgcagactctttatgtattttccataatgcagtgtgatgctctgacgtggaaaagaacaatcaggtctctgcaaaaaatgagccaacatgtttcctggtgcttagggatagcctctactaaacgcgtgaaggaaaaagagacccaagaacatgaagaatacaatttagatataagggtagatgccttagaatccaaagttgatggtttagaattgtctggatgttttaaagagcgtcacgttctgaatgatgtgcttccacatcataatctattcccaaactttctattgcagctcaagatatcttgtcccaatatactaaatgatgatccaatgccaattctggagagacttccacgtcttgaagtgcttgaaattgttaactcatcatacacaggaaagagaataacatgttcttccgagggattccttgcattacgcagtttggtacttatggatattggtttggaggagtggaatttgcagcagggatccatggcgtttctcgctgttttgactctcaagtgtaccatgctgaggagcatctcaaatgtacttcaccagctggatgatttggtagagcttcgcttgatttgcatgcctcagctctctgttgatgatcatgagccagctagggggaggggatgccgtgtcatgatttcagttgacgaggaacaaacttctgatacttgaatttagggtttcccagcaaaataatctacgacgtcatcttaaacacaaagacttcccgatctttcattctggccatataggctgtttgatcattcatatacgcaaaatatattcagcggccttcatagaacttccatcacttgcatttgcaaccaggtctatctctttctctcctgatgtactatctcccactccttcctttccacacttgggatgccgcctcctgttccccacaaagcatcataccattcccaccccttttggtgaggtccaagatatcgaggcagaactgcagcagaatttccatccacaatcaccttctaaccagacaggacgagttttatttcttcctcaagtaagcagaggaattccattttctgtaagtttgtgataggttgtttttttcttgaccagagaccaaagaggctagctttttgtagaaagcagtatagtgtacataataggatgtgtttaactcaattgtatatagtgttttagttctgtatcgaaagagttcttatgcatagaagatgcccctc

SEQ ID NO: 14949 - DNA, 2519 bp, Oryza sativa
  ref <308>: DATABASE ACCESSION NUMBER: AK065485
  ref <309>: DATABASE ENTRY DATE: 2001-12-06
ggtcttcttcttcgtctccgtctccgtctccgtctcgtcgccgcctaatcccccaccacctcgaaacccagatcaaaccctccctccccttccacccccgcacgatccacctaccccctccccccttcttctccctcgcgcgcgcacgcagctagctagctaccgcgaggaaccgaatccaatcgagctcaggacgaggcggaggaggagaaaccaccccggattctcttgatccggagtccaagaaaccacggggtagtgccgtagtggaagcaatcaatcagcagcagcaggatcgacccccccccccttcttgattgctggtttggccggcggcaatgccggatccggccgggctgccatggctgcggcgtctgtgagccgcgtcgtcggcgcgtgtgaatgctcgtcgggtctagacggtttgaggaggaggagtggggagagggaggggggcggcggcgacgatgcagatccggctgtcgccgagcatgaggagcatcaccatctccagtagcggcatcggcatcggcggcggcaatggcggcggcggaggcggcggcggcggcgtggggagcgggctgctagacctcatgaagctcaaggccgccgcccgccacttctcctaccgcaccgtcttccacaccgtcctcatcctcgccttcctcctccccttcgtcttcatcctcaccgccctcgtcaccctcgagggcttcaacaagtgctcctccctagattgtctaggcagacggttaggtccacggcttcttggtaggggcaacgatggctccatgagggtcatgagggatttgtataggatgcttgacgaaataaattctgaagaagtacctgttgatttgaaggtcccagactcttttgatgaattcatctgggacatgaagaataatgattatgatttaaggtcatttgcttttaggctgaaggcaacaatggagagcatggacagggaattgagaacatcaaggttatcagagcagttaaacaaacactacgcagcaattgctattcccaaaggccttcattgcctttccttgcgtctaactgatgaatactcatccaatgctcttgcaaggaaacaactccctccacctgagttgatccctcgtctttctgacaattcctatctccattttgttttagcatcagataacatccttgcagcctcagttgtggtcagttcaactattaggtcatcattaaaacctggcaggatagttttccatgtcatcactgacaagaagacctatcctgctatgcactcatggtttgctttgaatactctttctcctgccattgttgaggtgaaaggtgttcaccaatttgattggttaacaagagaaaacgtgccagttcttgaagctatagaaactcagcacactgtcagaagtcgtttccatggaaatcaccttgcaagaaatagtgcaggtgatagcccaagggtttttgctgccaagctgcaggcagggagtccaacatatacttcagtgctcaatcatattcgaatatacttgcctgagttgttcccaaacctcaacaaagttgtatttcttgatgatgacgttgttgtccagcgggacttgtcatcactttgggatattgatctaggtgggaaggtaaatggagctgttgagacctgcagaggtggagatacttgggtgatgtccaagaggttcagaaattatttcaatttctcccatcccctcattgccaataacttcgacccttcggagtgtgcatgggcatatggcatgaatatatttgacctgagtgcatggagaaagacatccattaaagataaataccaccattgggtcagggagaatctgagctcaaacttcacactttggaggcttggaacattaccacctggccttatagcatttagaggtcatgttcatcctattgatccatcatggcatcttttaggcttggggtatcaggaaaagacagatatccccagtgttcagaaagcagcagtcatacattacaatgggcaaagtaaaccatggctggatattggttttaagcatctccagccattttggacaagacatgtgaactactcgaatgagttcataagaaactgtcatataatggagccccagttatagattggctagataaaccattctataaatattggcgtaaattatggaattaaattcattattttggagaccaataccagatagtccagaaggatacccacgaaatgctctctgaacagtaacccggagctggtacacgagcggatggagaatatttaatgaacacaaaggaaatattttcttcctatacactaggatctctttccctttatttattccatttgtatcatagctcatgaaattacagtattgtttaggatggttcttttgtatttattggagcaatataaattgcctgatttggcgggattgatggtaggcccatcgttattgtaattgttgggtatccagttcaccacatgaacaacatgggccagattttgattttgc

SEQ ID NO: 14950 - DNA, 2937 bp, Oryza sativa
  ref <308>: DATABASE ACCESSION NUMBER: AK065486
  ref <309>: DATABASE ENTRY DATE: 2001-12-06
ggttcccctcgcgccgccttcctacctcgccgccggcgacgccaacgactacccgcgccgccgctacgtctcctactcctcctcctcctcctcgacggagcagcgcggggaggccgaccaatacccaaaacctagcagcagcagcagcgagagagacagctttttcccccttctcactccccacccatatatgaacacgcgcggcgccgcagcgagaacctaaaaccctaaaccccctcctgaataaaagcaagcatggcggcgcccctccccgcaagccctagcaacgcccatggcgcggcatcctaggccccccaccccgtcaccgccgcgcgcgagctccgacaccgacgccgccttcgaccccgtcgtggagtggctcctcgacctcgaccaggcgcccatggcggacgaggtggccaagggcctcggtatcgccgaggagcccgcgagcttcgatgctggtaaggtttcgggtggttcggtgtccgagagccgcggggtcgaggagaaggggaacgccttgccagagcaatcgggcgcctcttttgacggcgaattggatgtcgagatggagcctaagacggggagcggaggattggttccgcaacttgtgcaggatcagcatccggcttcggatattggtgatttggctgtaagagaggatggttcagagataatggtggatgttgagaggagtactgtacctgttgatgctgacatgaacaatgtgtccttggccttggtgaaagaggaagcggaagggggaggagatagggaggacaagagcgacgaggaagagtccgagagtagcaaggaggagtcgtctgaggcttcgtcgagcagtgatgaggaggaagataagagggagtcaagcgaagcctcttcgagcagtgacgaggaagagcagatggccaagaaaactggcggtgctggtgacacggattccctctttgaagagggtgaattgatgcttgcaagtgatgacgatgatgaggaagcaccaaagggtcctatcaaatccaaacatgaagtagaggtccttcctccagtgccaaagattgatgtacagctggaaccacatcatcagaccctaccagtaggaacaatttcagctatcatgggtgagagagtgattgttgaagggtcagtgcaacacaatcccctgaatgagggttcgatactctggataacagaaagcaggatcccacttggtattgttgatgaattgtttggacctgtcaagaacccatactatcttgtacggtacaactctgcagaagaggtgcctgctgatatcagtgcaggaactgctgtctcttttgttgcagagtttgcagaccacatcctaaatatgaaggaactgtatgccaaaggctatgatggatctggagaaaatgacgaggaccagacagaccctgaattctctgatgatgagaaagaggctgagtacaaaagatcattacggctggcaaaaaggcagactgataggcagcatgagggtaagaaaacttcaggtgataagaagagagcacaacctaggggctctggatttcggaaagacatgccacccaggagccatgatggacctgcaccaggtcgccaatcgcaacctcattttcatcgccctgataaggctcctgtagttgatgcaatccgcccattgggttctcaagatggtcctatgagtgcaccaacaaagctgccaccaggcccagttcatcctgttatgcctgcagctaatcagcttacaaatcagatgggtggtcgcttcatgaatccgtctcagcagttcttaccacagcagcctaacgttgtctggccaggtggtctaacacctacaccacatccaaatatggggattgaaggagctgcttttgcagctaatatcatgcagaaccttctcattggagccaatcaataccagcaacagtttcagaaccataactttggtggcttcctgaaccaaatgcctgtacctccacctcagtttatgtcgcaaggtggaatgccttctaatccaatggcatttggtggaccaacgatggcacagatgaatcctccatttggtccacctcaattgcctatggatcaaggtaattttgggcaggctccacacatggctgggcatacagtgcaacaagggcctcctgcaggatttcccaatggccaaggatttgggcagtcagcatcgccgcagggagatggagagcagccacctatgcaattcagttctgggcagtttaatcaagggaactcatccttccatggcagaaggcagcaacaacggggaggccggcactcttctgggagaggcggtggccgtcaccgcagataaaagataggtaacgctggtggttttacaccagcgaaattttgactcgctgagtgaactcctcttgaatggttcagtctttgctttgatgtattcgtaaacggagacatgatcagttgcatgtaatattcaatttgtttcgtttacggtgaacttcactttggacacccttgtgtgtttgcctatgtttcacaatataccccggtttagtgaagccttcaaattaatgtatgaccagactttgcaaattggactgggtttgctgtgtcactttgttggtttccatcgtggcctgttgggcgcatccacgcgagtaatttctgtgcgcgctgaagtgcccgggtgaactagcttcattcacttacagagcactgaagttgtagtatgtgatgtccatgtcctccatacagtacatccggttccaatgttgtttgtcaaacactgaaacataactggattttgtatgaaccatgattctgatatatgagagtgactgtcttgagttccagatatgaattttgttaaatgatcgatccttgatgtacatattactgaactagtaagtcctgaggttcaaagaagaaataacttggggatgattc

SEQ ID NO: 14951 - DNA, 3577 bp, Oryza sativa
  ref <308>: DATABASE ACCESSION NUMBER: AK065487
  ref <309>: DATABASE ENTRY DATE: 2001-12-06
ggcttcgcttcttcgtgcttgagctcggccgttgatgctgctgcagctgccggcaatggctaccggacaacggcgttcctggtggacgacgaagggaggcggctccgtgccgagctcgtcgccggcggcggcggcgggaacacggcgtacggcggcgacgtgcagaggctagatgtgtatgccaggtgcgcacgtccacttcttagctttttttttttaccgcaaattgttttggtttttctttttttggctgaattgctctgcaaagttggcgaaaataattctgtagattcctatcgatttttcacatttttggcacgcattgcaaagtactatcaatcagttttgaagggcctgactgtacgcatcgactcatactgaactgtttgccagttgagaggtcactagcttgaatttttttttattatttagacatttctaataattttaataatacacttccccttgaatttattttcaaaaaatagacttttggctgcaccagtgatggctaaagaaggataccaccccagtggttgtggcgtgacagttgatgccatcgtggcagtcatcggatggacttggctgtgttctctgattctctcccatgggttctcaacccattttctctcgttttccgtgtgcacggcacgattttcaaactgctaaacggtacgtgtttcgagaaaagttttacacagtaaaattgattttaaaaatcatattaatctattttcaagttttttatagctaatacttaattaatcacgtgttaattatcgctccgttttccgtgcggacttgcaggggagggtttccaacccctccaaaagaagtatggcgaggacagtagtgaaccctggcatccctcactccagttttctctcttcacagcttgtacaaacatttttattttttttgagttcaattttcaacttaatactttgtctcaaaatataaggtgcctataatttttttaacgcaaattagttataaagcaccacaagttcacgtttttgttaagaatttaaaaagtcgatatttataacttttgaataataattaaattaataatgaatgtttagtgcacgtgatactattatatttatatttcaaaatacttaatatgaaaaacatatatactcatgttatattttagaataaacagagtattaattaattaagagtgaattgcactttaggccaccttttattactgaagttgtatttgtgaccactttatatttaatcttttcaatttggactagttatttttttatcaatcttttcaatttacaccactctaacgttttcgtctagccacatccaatctttaatccggcaaagatgcgagctacacgtaaagatgccaatgtgcttgagattgttgatgtgctcacgaagagagtttgcatgcatggtctaaaatgcagaaatagcgaaaatacctagttcaaagtaaaaaaaaaatggatggagggtagtccaaagtaaaatttctggtaattaaaataactcaaagtgtctcttaattaattatgctctaattatccggataatgagctgcactttggggcagctgagaaactatattgccaactaaccggacatgtattaaatttccacgagtctatagccaattgttttatgacattattcttcgacatgaccctcctgatcttgcccattgtgtcattgaccccattattcgcctttagtagagcaaggtcgatcaacttgtccaaattaaacgctacatcacctttattagtagcatggtcacacgtattattccaactagctgattgtccaaaatccagacaccacaccagtacaatgctctagtgcattacagcaatttgtgcaaaatatgctctgcactttcttgtcccatgcttgtaggtgtaacgtacaaatcttcagatgcaaaggtatagtagtatataagctaagaataatggataaccctggaaaaaagcaaaaggttagattagaagacgttttgacatccaaaagcagaaagccaaaaagatccatcacgaacttaatagaaaactaaccaattattggcgtatctagaggtacacgcaaacaggagtatcttacttcttcccttttgttgtgtttccagcgttttctcttcttcctggacctgttcccccgggcctgcaagcgataagatgtaatacctcctttaggttataaaactttctaacattgctcgtattcatatagatgttaattaatccaggcacacatatatgtctagatttgttaacatatatataagtgtagacaatgctagaaaatattataatatgaaacggaggaagtactatttaggcaaagatcagattctttcaataaaaaaacaattaaatggatcagatgaagcaatgattgatagtattatataagaaaaagataaacaaaaacaaattaatttaaagaagagtagaaagaagagtagaaattgtggtatcacaaatgctggtgtgtaatttagacatttactgtaattgttcctagatttcaaatttattctaaaatgtagttatttctctacctacctccaaattatcttagccaattccaacaatctcatatttaattttctcatctatgttttttttttgaaaaaatctcgtgaaatatctctagagaaatgcttgtaatttaggaatggaggaaatatcttataaatagttcaaacgaatcatttttcttgttctggcggtgcaatcacatcaaatgtgtacaacggggagctatttgttggtaattcagatgctatgctgatcgatcttttttgtaaacatagccgcaatatatacattaaaaaatgagtcagcaactcaataattttggtagagtgattggcaactgctacacaataagaaatgtccaggggtcttccggctaaatccacaagatgatgggctagctagcctggttcaaagacttgctccttttaattatttgatattaggtcatttcttaatatttatgttttttttgcaaccgctgcgcaacgcaactgtgtgttaaatgaaagcacatatggggcttgatttgtatttttgttgcttgcctagaaaaaaaaagattgttttgttcacgtgacacacgagtgcatcatgttaagctggcatgactttcaacttaattagcggcgaatagtcgtgacacgtattttgtgagataaatctctttcttcgaacagcttataagatgatgtgtgactaaagttacattcacctttatcatcaaatatcattgttgcacttattcatatcattatctaaatctcttattagtaaataaaaaatcatttatgagtaaactacgataaaaatatataaaaaaataaattttaaaatttaaatttaatttataagcatatgtataagcggaacaacgagactctatatcaccattatatttttaccctttacgaaactattgttgtctgtttctatcattcagctgcgggcccaggaatctcaaaccatgctggttccaactccaaaaagcacacgccctttttccactccagaaagaaagatcaaaagaaacc

SEQ ID NO: 14952 - DNA, 3168 bp, Oryza sativa
  ref <308>: DATABASE ACCESSION NUMBER: AK065488
  ref <309>: DATABASE ENTRY DATE: 2001-12-06
gactgagtcccagtcctgaatcccccaatgcggcgccccctgcctcgccggggacggcggcgaggggtgtcgcgacgggagctcactccggcgacggcgagcatcttcgcgcgcacaattatcccgaggatgtggctgggctaggatcgtgcagagattcccgcttccttttggtccaaatgcgactgggttttagccttttagggcaaaggggaagtattatttcctactgagttgttcatcgattcgcttgtctgaattgccaaaattgtttagtgtctaggtgattgtattcggttttttttttcaaactcttaatgcgaactgataatttctagtattggtgcccatggatgcacgctgagtcagttcagaatagaactgaagtagtggtcagtctcagtccacagttcacagtaaatattcattttagaagaacaaatcgcgtgaaggttgattagatgttgacctcatgtgttaaatttcagctaaatctgctattgcaacttcaaatgacatactttgttcgcgtggtgtactaattactaaacaactcatctaattacatggtagtgggaggcaagttccatgcaagtaaattgagaccggaacaggtcagtacttacagaaaatatgaaagggagcaggtggagaagaatttggatgaatacctcgagcaatgcacaaaaatgaaggtcaaatgtgagaaaattgttattgagaatgaagacattgctaatgggattacagagcttattttgctgcatggggtaagtaaactcgtcatgggagcagctgctgacaagcaatactccaggaaaatgaaattgcccaagtccaaaacagcactctcagtcacggttaaagcaaatccttcatgcaagatttggtttgtttgcaaggagcatctgatatacactagagattttgttgctcctatttctccaaattcacaatcacctgacactatcagaggctcaatatccaatctagctgcacggggaggaactacaaaccaatatgcaaacaatgcagttaacggttacgtacagaggtccatgtctgaaatggttgtccctgcatctagcagggtatcattgcaactgcattctcgatcatcgttacaggagtcccttagcaggctaaacatggagggcacctctgttgattcctgggatagcttccgcagaggaagctttccaagttcataccgagcttcttctactgtgactgaagaagtgttgagcgattctagttcatctggaatacctagagatggcatctcaacacttgcaggttgtgactttccaaactcagcactgcaccatgaacagggtgacgcaggttcaaatgctaacctatttgataaacttgaagaagccttcgcagaggctgagaagtataggaagcaagcatatgatgagtcactgagaagacaaaagacagaagaagaattgatttcatatcaccaaaaggccaggaaatctgaggatttgttcttaaatgaggccaagcaaaggaaagaggttgaggaaaccctagcaaaggcaaatgtggagatacaattattgaaggaagaaatggatgcactgaaacacaaccgagatgacctcagcagtaagctttccgacgtgagtgaacagaaagtgacactagagcaacaggccgtggaatatggaagcattatcattgatctcaaggatacagttgcagcaagccaagccctcattgattcaatgcaaatggagtttgaacaattgaagcatgaaagagacaatgcactcaaacatgcagaagagctgcacagagagaaacaaaacatggtatcgagctcagacttggaatggagcactgaattctctttgttggagctgcagcaggcaacacaaaatttcagtgatgcaatgaaaattggagaaggtgggtttgggtgtgtctacaggggtcagcttcgtaacaccactgttgcaattaagatgcttcgctctcagaacttgcaagggcagtcacagtttcagcaagaggttgctgttcttagtagagtaaggcatccaaaccttgtaactcttgtaggttattgctcagaagcttcaggtcttgtgtatgaattcttaccaaatggaagccttgaagaccatctagcctgtgaaagcaacacgtctccgcttacatggcagatccgtacacggatcatcggtgagatatgttcggcgctcatcttccttcactctgacaagcctcacgcagtcatccatggtgatctcaagccagcaaacattcttcttgatgcaaatttggtcagtaagcttggtgactttggaatctctcgcctcctaaataggtctagcacagtgtccacgagcttctaccaaacaacaaatccaaggggaacttttgcttacatggaccctgaatttcttacaactggggaactaacagcacggtctgacatatactcatttggcattatcatactgcgactggtgactgggaagccagctttaggcattgcaagggaggtggaggttgcacttgataagggtgagttggagttgcttgttgaccgatctgctggagactggccgtttgtgcaggctgagaagctgatgcttcttggcctgcagtgtgcagagcttagcagaaggaagcgccctgatcgtatgaatcatgtgtggagcgtggtcgaaccccttgtaaagtctgcttcgctgccagtagaaccagaatccattggacattgggtgaataagaaccgcacgccattctacttcatatgcccaatttctcaggaggtcatgagggatcctcacattgcagcagatgggttcagttacgaagaggaggccatcaaaggatggctcggcagcgggcacaacacctccccgatgacaaaatcaactctggaacatcttcagctgatcccgaatctcgctcttcgttctgccattgaggaatttatgcagcagaagcagcagcagattccatcatagtaattagttcagtgaacttgattattcttagcttcataagttgtaaagttgatagctcattctttgttcagaagtctgctcgtgtagtgtagctgttttgttttgtgagcagcaacttacaataaatcgtgcatgctcatatgagcaggtgatgatcagctagcaaatgtttgatgtc

SEQ ID NO: 14953 - DNA, 1659 bp, Oryza sativa
  ref <308>: DATABASE ACCESSION NUMBER: AK065489
  ref <309>: DATABASE ENTRY DATE: 2001-12-06
tgatcccgaatcctactaccatcctccttttcgtcctatcctctcccagaccatggggatggaagcgccagatctaccggcccctccgaggtacgcgccactcgtcaaactccccttttctttttccagtaccccaagatctgtcaccaccgcctgccgccaagttctaaacaatgcaggattgaggtggagaactgcttctccctctctgaaaatacagggtccatggtggacatgatcaatgtcgcggcacgatgtgcctttttactttgtgcaagtgagatttcatatgatgttggagaacgctacaatttcgcgagcattctgcttcatttcagatacacctgttgctcactgcacaaactcctggtaattcccatggcatctgatgtgttagtagtgtggtatgatgcttcatgaatttatactagtactaatgtgctagtgttagttatagaatgtttattcatcacccggttctttccagaaaatattgtacagcttatacccaatcttatggcttgttttcatctggagtgctcaagcctcaagggacatacatgtattactgctactaccaccacttaacaagttacatactcattttcatctgaatcacaattctaatacttgtttcttatgcccagtcaacactaacttaaaccagttaccagactgaacattagataacaaatgtcccagctcccttatcatactagtggttaatctctcacacgtcatattaacttagaaagatgctttaaatgataaccaagtattacaactggtgcctgatactctgatagaaacctttgttacattctaggactcggataaatgacatcatctattatcaacaagggataactcttctgtagtaggatatggatatccatgtgaggtcatcagagtagcaagttgatggatcatcgccatgatgctattgctgcacacggaagatgacctgatttatctataaatgatgcagtggtgctgatgaccaatgccatctctgcatcagtcaggtccaagtgaaagcgaaaaaaaggcttttcagaagacaagatcaagtgactggacggtcacaatgagagcaaactcgggacttatctttgccgtgatgatcctgataatgtgtggcgcatctgcagcttccagtgacaatgatgagctggtggcaccgttcgacacatccaatggcctgagaacgctgtgaacggccacttgggctgctaccccgggtgcttcagagactgtgttacaaggatgcctgaatgctgttctgtgaggaaatttgctgtcagcatggccgatctccttcggttcacgcatcagtaattcatctatttgcgttcagataacgttgtgaccatttctttcagtagcagtagcttgcgtcgctctccgcatgagtaatcttaagtctttggcaattcactgtaatatatactaatatgctcttccgcggggtcccccattttaattcttcaagccggcgaggtgtgtaatagattgggatggcctatggccgtgatctaagggcagttgatgtttgtgaattcagactgttcctgtcgatgtcatggaacgcattgtggacttgtgcttggttgtatgaggtgatgtttgattcactagcagtcactgttggttagatcc

SEQ ID NO: 14954 - DNA, 1527 bp, Oryza sativa
  ref <308>: DATABASE ACCESSION NUMBER: AK065490
  ref <309>: DATABASE ENTRY DATE: 2001-12-06
ttatctacttcctctacctcccctaatccactccactccaccgcagcttctcccgcggcgaggcggctcatcccatctccacagccgcagttgttgcagcaaggaggcatggcggtggggggtgaagaagagaagcccttcaacttcctccagattctgtgtggtgcgtcaactcctcccctcgtttgcttcatcctcctcctcctctgcccatggatgagggcgtcatagctggtggcaccgcgggtgtggtggtggaaacagctctgtacccgattgatacgataaaaaccaggcttcaggctgctcggggaggaagtcaaattcaatggaaaggattgtattctggattagctggaaatattgctggtgttctcccggcttctgctgtatttgtgggaatatacgaaccgacaaaaagaaaactactggagacttttcctgaaaatttgagtgctgttgcccattttactgccggggctattggaggaattgcggcttctctcattcgcgtccccacagaggttgtcaaacaaagaatgcaaacaggtcaattcaggtctgcacctgatgctgttcgtctcattgttggtaaagaaggattcagaggtctttacgctgtatgtatcttctgacctcatatatggtggaacctgtatttagccgattcaactctaatttttgttatccctgtatatttcaggaaaaataattatttgaatctgtttaatatgcctttttaattgaattgttgttacaatggaaaaaaactcattgccttccttgtcatactgtttctttttgtttgtagggatatggatcatttttacttcgagatctgccttttgatgccattcaattctgtatatatgagcaacttcgaattggttacaaagttgtggccaagagggagctgaatgatccagagaatgcacttattggtgcttttgctggtgccattactggggctataacaacaccactcgatgtgatgaagacgcggttgatggttcagggatcagcgaaccagtactccggaattgtaagctgcgcccagacaatcctgagggaggaaggacctggggcattcttgaaggggatcgagccgcgggtgctgtggattggcatcggcgggtccatcttcttcggcgtgctggagaagaccaagtcgatgctcgccgagaggaggagccgcgagccaccagccgggaaggatgagtgacagattttaccctcggccatggatggatgcttcaagttttgtgtttgttttgatcgatttcacatgagaagtagtgcatctctcgaggaggaagacaatgccactttgcgtcccaatgattaaattcccattcgtttaatgaattaatattatgttcaagttttttttaaaatctgattatactacattatagcttctctctctccctgcagtttacccatgctgtatgacttgtagatgtaacagtcggtcgttgccgatcaaattgtacctttgtcaatccagatagtattgcagcagtattt

SEQ ID NO: 14955 - DNA, 1677 bp, Oryza sativa
  ref <308>: DATABASE ACCESSION NUMBER: AK065491
  ref <309>: DATABASE ENTRY DATE: 2001-12-06
gatcgacgtcgcctcctctcctcctcctcctcgtcgctgcattccggttgagtgagttggtgattatctgtagggggtgaaaatggcgcaggcggtggtgccggcgatgcagtgccaggtcggggccgtgcgggcgaggccggcggcggctgcggcggcggcgggggggagggtgtggggagtcaggaggaccgggcgcggcacgtcggggttcagggtgatggccgtgagcacggagaccaccggggtggtgacgcggatggagcagctgctcaacatggacaccacccccttcaccgacaagatcatcgccgagtacatctgggttggaggaactggaattgacctcagaagcaaatcaaggacaatatcaaaaccagtggaggacccctcggagctaccaaaatggaactacgatggatcaagcacagggcaagctccaggagaagatagtgaagtcatcttatacccacaggctatattcaaggacccatttcgaggtggcaacaacatattggttatgtgtgatacctacacaccagctggggaacccatccctactaacaaacgtaacagggctgcacaagtattcagtgatccaaaggttgtcagccaagtgccatggtttggaatagaacaggagtacactttgctcagagagacgtaaactggcctcttggctggcccgttggaggctaccctgggccccagggtccatactactgcgctgtaggatcggacaaatcgtttggccgtgacatatcagatgctcactacaaggcatgtctttatgctggaattaacattagtggaacaaatggagaggtcatgcctggtcagtgggagtaccaggttggacctagtgtcggtattgaagctggagaccacatatggatttcaagatatattcttgagagaataacggagcaggctggtgtagtgcttacccttgaccccaaaccaattcagggagactggaatggagctgggtgccacacaaactacagcaccaagagtatgcgtgaagatggaggatttgaggtgatcaagaaggcaatcctaaacctatcacttcgccatgacttgcatataagtgcatatggtgaaggaaatgaaaggaggttgacaggtttacacgagacagctagcattgacaatttctcatggggtgtggcaaaccgtggatgctctattcgggtggggcgagacaccgaggcgaagggaaaaggctacttggaagaccgtcgcccggcatcaaacatggacccgtacgtcgtgacagcgctattggctgaaaccacaattctttgggagccaaccctcgaagcggaggttcttgctgctaagaagttggccctgaaggtatgaagaacttggacgatgaatcggggcaaataaatcccagcaaaatttgtttgctgcccaccagtcttgatcttgtatttcttctgtctggggattggtctgtacaaatctgcagtttctagaaaaccacgccaccttccattcgccagttaacattttggttgaacaccacacttgatctgggtctgtattttgagtccatttgtgagtgacagaacggatgatgaaacacatcagggacacttttaagtttcttcagtcctgcgtccttccctcgaaataaaaatgtttccttgttttttatcccgggct

SEQ ID NO: 14956 - DNA, 1375 bp, Oryza sativa
  ref <308>: DATABASE ACCESSION NUMBER: AK065492
  ref <309>: DATABASE ENTRY DATE: 2001-12-06
gatggaggcggcggcggcggcctctccaccggccggaagatggtcccgtcgtcgagctgggccgagcggcgcggctcgtgcgcgacggcctcttcttctccccctgccccatcgccgctcttcacaggatcgcggcgtggcggagcaggggcgccctcccggtcgccgtagatgtggccgcggcgttcgtcgagatacggctgcgggaatcggaatcccttcttcttcccggaatgtgatggctgtggatgatccgctggagtctgaagagatgtcggcgatgctgtgtagtatggcaatcatgaggtgaatccaatgcttgaatgccagcaaaaatggaaatttatattcccttgttctgtggcttgtgacaaatataaaagaaataaaggattcaggctgcattggacttgttcacgagataggagtgctctcttcagacagaaatgtagtccaatgttcctgtccagcaaaacttctgcagaagttgagtttgtccactataggtgaaagatgtctcatagatgcagcactactgctgtttgagatggccagcaataatgtgaaagagaaactgaggaagcttcttatgttatccctgggaaagttggctagaatttctatcctcacggagtcctccaaagaaatagaatcagctgacagggcaacagagaagctggaaatgttcaagtcacagttgaaacagaaggatgtatgtttggcagaaaatggcaacgggggatcattgaacacaatcttgttggagaaacgtagcagatggtctataacaaagtcttggaccccctgtgcgataggaatggtaccatgctcatttagttcaacggctgttcttccgacacttgatgtcatcgatcatgaattgaaagatgacacattggagcaacatgtaaattttgagcttgatgaccatactgaaagggctggctatcattctcatcctgagaagcaattggatgttgaatgcattccggcaatatctgaacgtgagatttcagatatgtcagaagtgacctttcctctgaaagtctgaagggtaagttactggttggtggcgtgtggaaggtgatgagtgaagggagctactcttgattaagtcaaagatgaaaattttgttgtaacagtagctagttaagttgtgtcatgtgtcctcttaaaccagcaatttcaggctgttacgaacggcggatagttctatcttaaagctggaaaaaaagagagggaaatatatgaccagtacttaaacttggactagggtgtcatttaggtctatgaacttataatgcacatccatttcctattttggtttaatatataatctgaggttcaaagtacaagtgactcaggttgggtgctg

SEQ ID NO: 14957 - DNA, 4113 bp, Oryza sativa
  ref <308>: DATABASE ACCESSION NUMBER: AK065493
  ref <309>: DATABASE ENTRY DATE: 2001-12-06
gattctaaaaaaaaaaagaaaagggaaagcccaacccatccgcaggcggcacggcggagtgagcgccggcggccggagcggaggagctagggttccgatggctgtggccgctgcccaagacctcccgccgaccttccatcccaacccctcgcctttgccttcctccatggagccgcgcctccgccagctccgcagggttccgctcctcgacttcgtcgcccgcatcgccgacctccatgccgatcaggccagccccgtccgcaagctcgtcgccgagatgattggtgaggttgggtcaaaacacatggcataccttcccaatgtcatgccttgtctgcttcatcttctcaacgatgacacacctgcggtcgcaaggcaagctattaaaacaggaacaaccttgtttgccaaagtactacgacagctagttattcagggcttgttctcaagtggtggcattgatgattcattaaaattatcctgggaggcactgctcaagcttaaatctgctgtgtcacacatggcctttcagccgatgagcaatgaaggagccaggttactggctattaaatttgttgaaaaaacagttctattgtacacccctgatcttgataccccaccggatccaccaattgaagttacagaagatatgggattcaatgtagcgtggctgagaggaggtcaccctttgcttaatgttggagatctggcaatggaagccagccagaaccttggattgctgctagaacagcttaagcctcctaaagtaaaatcactcagtacttccatgatcattgtctttgttactagcctctcagctatcgcgcaaagaagaccttcattttacggacgcatacttccagttttactttctttggatccagcaagttccattattaaagtgcaagtcccaggtgctttccatgctttgaagagtgcctttgctgcatgcctgaaatgtacacattcaagtgcagagccgtggcgagctcgcctattggaagctcaaaatattatcaaccaggctgattcgatagaacattcttcaaacagggtagaatcattgcctctggagacaacaagcacagataacagtaacaagcgtaatctgatcgatgacatcgataatgcgccagaagatggtgatcgttccaacaaaagaattaggcaatcacatcatgatcaagaacatactgaaaatgtaaagaataatgtggagctaacctctgctgataccccatctagcccgtccaactctgcaagtactggaaattctgaagctgtatatcaattagttagtatgtttgctgcattagccgctcaaggtgacagagcggctggatcactgcaaatcctgtcatccagtattgctgctgacttattagcagaggtggtaatggttaacatgcaacacctgccagtttctcatcctgaagtagaccaacaacaatctccttcagctggccagccatctggtgctccgagttcaagtcttctttcagcatgctttcctctgttagaatctttattgaagagaataaaccaaagtgatcgagaggtcgatgaagcacctcaaactatagattctgctgttgtgccatctgctgctggtgaaactgcagcaattcctgccattcctggacctacctcaagaaatgtacctatggaggagaatagtaatagttcatcaattccatctgatatggaaactatagaggctaaagaacccactgcagatgccgctaggttatcaattgagattcaagaatcatcagaagcttcccatgcttcaacagaacttcaaggaacccaagagcatggtggcagttttattagttcattgcctgctgataattcctcagctggtcttagtttggctcaatcttcagaaactcgtagtccaagctcttctatggtggaagcaagtcagactcagttctcatattcaagcacacttacttcacagcatgtgcttccaaagttggttgtgactaatattgatctcagcgatgaggctaaagatctacttcaaaaagaagcatttttgcggattcttgattgtgataaacaagatgcatctggtggttcaatagctcgtcttcccttgcttgctcacttgggtgttgagttccctttggagttggacccttgggagcttctccagaagcatgtactgtctgattatgtaaataatgagggacacgagctgacactgtgcattctgaacaggttgtatcgtgaagcagaacaggatcaagacttcctttcatcgagaactgcaacatcagtttatgaatcgtttcttctgactgttgctgaaaatcttcgcgatatgtttccggcttcagataaatcacttggaaaattactttgtgagataccatacttaccagagggtgtattgaagttgctagagggcttatgttctcctggaagcaatgagaagcaggacaaggatctgcagagtggtgatagggtaactcaaggacttagtgctgtctggaaccttatcatgttaagaccttcaaatcgagacagatgtctggagatcgctttgcagagttcaatccatcatctagatgaggtccgcatgaaggcaatacgcttggtagcaaataagctatttcctatggcaagcatttcaaaaaggattgaagattttgcaaatgaaaaacttaattcagttctggaagtagttccagctgatgaatcagcagcttctgaaatgtctactccagaagcacccaaggatggtggttcagaaaatttatcgtcttcagtagcagattctcaaactttgatgtcactctattttgctttgtgcaccaagaagcattcccttcttcggcatgtatttgcaatatatggaagtctaccacaagctgccaagcaggcagttcatcgacaagtacccattctgatccgcacaataggctcatctcccagtcttcttgggatcatctcagacccaccagctgatagtcgggacctactgatgcaggttttacagacactcaccgatggagcaatgccatctcaagatctgatttcctctgtaaagaacttatattctaaaacaaaggatatcgaggtcctttttgcagtcttggctcatctgccaaaagatgaggtcctccctgtttttcccagtattgttaatcttcccttggataagtttcaagttgcactttctcgaatcctgcagggatcaccgcagaatgggccttctcttgatccatcagaaattttgattgcgattcatgtaatagatcctgagaaagaaggaataccactcaaaaaggttattgatgcctgtgctgcttgttttgagcaaaggacaatattcactcaacaagttttggcgaaagcactgaaccaactggttgaacaaattccacttccgttgctgtttatgcgaactgttatgcaagcaatcggtgcatttcctgcattggtggactttgtgatggatatcatgtcacgtcttgttagcaagcagatatggaagtatcccaagttatgggtaggattcctgaagtgtgctatcttgacgaaacctcagtcatatggtgtgctgctgcagttaccagctcctcaacttgaaaatgccttgaataagaatcctgtactgaaggcacctttggttgagcacgcgaaccaacctaacgtacgatcaactcttccaaggtctaccttggtagttttgggtcttgctgaagatcaacagcaacctgcacctcaagcacaaagtagccaaaatcaggctgcagaaaccagcagttcagctgcagatactacgacagaagtgacccaggaatcttccgctgttagctaatcttcttcggcagccgtgaatgtgacgtcccaatcaactattggttacttccctttctgtattagttatatgccggaaggaggtgggcattgaagttcaagatgggtctggaatagacccttgttaggacttaggacttggataattcattgtagctgggcagttggatatgtagtatacagttttaccttgactagggaaatgggaagattcttagccgtcttttcatctttggcggtctatattttctaaaatttttcattgaacttttgtgcctg

SEQ ID NO: 14958 - DNA, 2224 bp, Oryza sativa
  ref <308>: DATABASE ACCESSION NUMBER: AK065494
  ref <309>: DATABASE ENTRY DATE: 2001-12-06
gtggcgttacttccatcgccattgctggcacaggttctttgcttgagggatgagcagatggaggtcctattgccaaaagtgggagaagagtgcatccacacttgctgaggccaactaggggatccccattgatgcagtccaactgaaatttcccaatctacacaagaattgagcacggggccactatgggttccagtgatttgagttcagagatgaggaggacggttcttggcctaacattgtgggtctggattgcaattggtgtggtcgctcttctagttgccattctgctgatggtatgcatttggatggcatcccgccgcaagacgaagagaacaatggacaatttgaggcaaacacagatccccattttctccaaggagatcccggttgacagggttggcggccgcagccttgcgcagacaatgcatgaacgtgagcagcctagcttcccaccgcaagacaagcacacaaaccgggagccggggaagacgctggggcatatggcactgagcaagtcatcggaacctgacaacatgagccaggggagctcagtttgcaatgttgaccgtgctggtagtgtgcattccggtgaagatggtagcacagggcatggtaggaaaccgtattctcctgcagcatttgtgtcagcgtcgccgctggttggcctcccggagttctctcatctcggctggggccattggtttactttgcgtgaccttgagcttgctaccaaccgtttctctagggagaatgtgcttggagagggtggatatggagttgagtatcgtggccgtctagtgaatggaactgaagttgctatcaaaaagatctttaacaatatggggcaggcagaaaaggagttcagagtggaggtcgaggctattggccatgtccggcataagaatttggttcggctgttgggttactgtgttgagggagtgaataggatgttggtgtatgaatttgtgaataacggtaacttggagcagtggcttcatggagctatgcgccagcatggtgtttttagctgggaaaatcgtatgaaggttgttatcggcactgcaaaagcactagcttaccttcatgaagctatagaaccaaaagttgtgcaccgagatataaaatcaagcaatatcttgattgatgaggaatttaatggcaaggtctctgactttggattggccaagcctttggggtctgataaaagccacattactactagagtgatgggaacatttggatatgttgcacctgagtatgctaacacgggcatgttgaatgaaaagagcgatgtttatagttttggtgttctcttgttggaaactgtgacaggaagggaacctgttgattacagccgctctggcaatgaggtcaatcttgtcgagtggctcaaaataatggtggcaaaccggagagcagaagaagtggttgatccaatcctagaggttagaccaactgttagagctattaagcgggctcttttggttgcgttacggtgtgttgatcctgactctgaaaagagacctaagatgggccaagttgttaggatgcttgagtctgaagaagttccataccgggaggatcggaggaaccgaaggagtcgcacaggaagcatggatatcgagtcgattgcagagggctcaaattcaaccgaatttgcaaacaaggtagaagaactggaagctcgacatcagacaggtctcagtcctgagttcataaacctacgatccatcctgagtactcatcatcatcatcattgatcagcctgggatatgatgttattgatcaccaatgtggttaccgttctgatagggagatgattggtaggtaaaacctagccattaggtcgagtagtagcgttattggagggaaggatttcatggttcttttgttgttcaaagttttttgtgctgtataggtatatgttggttctttggatgaccattcttgtgatccacgaagctcgttgggtgtatgcatgacacggatcattcattgggtttatgtgctgttaagctttcagttttcacttgctcctctgtttgcagacttgcagtgttgtgcatgagggaatggtgttatcatcagtttctctccccttgtattggtagaatcagctacacggttcatttgaccaggccatgtcagtttgactgagtttggtcgagagtatgatgtttctcatgatgctttaagccaaatgacaacactgaatttcacg

SEQ ID NO: 14959 - DNA, 2547 bp, Oryza sativa
  ref <308>: DATABASE ACCESSION NUMBER: AK065495
  ref <309>: DATABASE ENTRY DATE: 2001-12-06
gagccagcccaagccaagacgaacacgaagagaagagagaagcaaaccaaacggaagcaagaacccatctcccacctcccccaccagcagcagcagcagcaatccgcgcactccggcgcgcgcgggggagcagcagcagcagcagaagcggaattcctcgcggcggcggcggcgtcctccaatccgattccgccaatcccaattgctgcccccctcggcgaggtcagctccaattcttgctgtttttctcggattcgattcggtcgtggagtgggaggcggttggtcgccctcctcgccggagatccaggcggcgcgggcccggggcggagctcgccggggtcgggatcatgcccccattgcgctagggtttgggtgggtaatccaatttggctcccgcccgacgactcgccgccctggatgcttgattcgggccagccgcaccgctcccggggcgggtggttgcttccgcggcgattggtgtggttccggcggagatgagatcgcctccatggctggcgagctgggaattgggctacgggctcgcgctctgcaggaggcgacggaggccatagtggtttgatccgagctgggttggtgcggcgcgctgtcaccgattcgtggtttctgtgctctgaatccgatattggggttcgccggggtggtgattttatggacatggtgagggaggaggcgtggccgctcgctgcaccgcagcagcagcagcagccatcagctcctccaccgcagccgcaggcgcagcagcagaatggccgtatcgatctccgcgaggtgaagcttcggctggagaagaggcttggtcctgacaggtcaaggaggtacttcagctacttgaagggctacctgtcgaataggctcagcaaggcggatttcgacaaggtgtgcctccaaacattggggagagagaacctccgagtgcataatcagctgatacgctcagttctctacaacgcctaccatgcgaagtgtccacctccaacaccagcaccagatgttgggaggtctgtgggagcaacagtgaagaaggtttgtcagcccggcgaagcattgaattcttgcaatggggacatcaggttattacagatgcaggggtcaaggcatatgagcacaatgcaagatcatcagtcaaaagatcggatgaaaagcacgggcctgagttgtagggtagatgcttctgccaatcacagccagattactcacggtggtgcggcagtaccagagaatggcaccctaagttcttctgacctcaagagatcagtgcattttcaacatgaatctgcagagccattggcaaagcaccaacgtgtggagcagtcaccaactggaaacataatcaagttgagaagaagcatgagcaatgtctcggatcattctgcagaagcatcgaatagccctgtacgggcaccacttggaattcctttttgttcagcgagtgtgggcggggcaaggaaattaccaccaccactaattagtgcaggtgaggatcactgtaccagctgttgtgagcatcgtgaattgttaaatacagaggcattgcatcggcggatggagaaaacagcagagtcactgggcctagctggtgtcacattggattgtgctgaccttctgaataacggtttggacaagtacttgaagaacctgattaggtcatcagttgagttaataggagctaatgttcaaagtgatgcaagaaaaggggaattgtacaagcagcatgcatatggaaaacatatgaatggtgtttggttgccaaatcatgttcagatgcaatcaggcagtggaccatccggagcaacgaatgatatcagaaatcaccacttgatctcccttgatgatttcaaggtagctatgcagctaaatcctcaacagctcggggaggactggccagtcctccttgaaaagatatgcttatgttcaccagaagaaaatgactgacagatggaaagtgctatttcaaatagatttttttgtaccaatgtgtttttggtgcccatctgatgtacatttgagctgaagcgattatactgcagtcaagcaacagaagatgcgcatttggggataaggcagaattctgctgtcagatttgcagcgaaagaaagccaattcttttctcctgataaatgccctcataaagaagaatatcttccgttgacgttgcttagacctcattagctctcctgagatggagactgttcatccaaaagtcccaacttctatgtaacatctggcataaggggacagaagacagcaaaatgcaagagctgtcctgtaacttataggaaaatgttctgtaagtttctaggtcaggatgtacattattgattccaaaattttctaggtatcttcagtactaatttcagggatgttgaacgttaattttatttaaattcttttgtaactgtgtttttgaaagttatatgttagatctctaagacctctcctctcccttgatgtgtttgtctgcttgggagtgggtagatgtttccatcttcactccagatatgaaaacgtagatatgtttatggcc

SEQ ID NO: 14960 - DNA, 3337 bp, Oryza sativa
  ref <308>: DATABASE ACCESSION NUMBER: AK065496
  ref <309>: DATABASE ENTRY DATE: 2001-12-06
gctcgttgtccttgcagttgaggagttgatgaacaagaacgcccaggtcgaagccatcatcgggcctcaaacctcagccgaagtcgagctcttcgctggcatcgcgatccgcaaccacatcccgatcctctccttctcccctactacctcaccggcgttgagctcaccgccgacacgcttcttcgtgcgcaccgctgccagcatcgcctcccaggccgcgcccatcgccgcaatcctcgatgtgttctcgtggcgcgcggccgtgctccttcacgaggactcgctctacggcatcggcatcctcccggcgctggttcacgcgttccaggtgcaagggcagctgctggcagggtcgtacggtgcgcgtggcgtggtggacagcgtgtccgtgccggccgacgcgacggatggccgcctcgacgcggcgctccgtgccgtcaagatcatgccgtggcgggtctacgtcgtgcacatgctccccgccctggtcgcgcgcctcttccgccgggccagcgtcgccggcatgatgtcggagggctacgcgtggatcgccaccgccggcgtcggcgccgcggcggacggccttagccctgacgacatcgagcacatgcagggtgtcgtcagcctacgcccgtacgtgcagccgacgggccaagtcaggagtttcacgaggcggctcaaggcaaggtttcgccgtgataacccgggcatcgacgacgaagacgacgacgacgacgtcgcgcacacgtcggcgtcgctgctctggctgtacgacacggcatgggcagccgccgccgcagccgatcgatgtctccaccagagcagcaacgcgagggaagaacacaacacgacgacgtttctcgatgctctgctcgcgaccacgtttcaaggcctggccggaaggttcaggctggtcgacggcgagcggcaggtgtcggcgtacgaggttgtcaacatcatcggcagcggcgcgaggacggtgggtttctggacgccggagcttggggtctcccaggacatggcgcggcgccgccccaagagtggcagcaatgaggagctgaagcaaatcctatggccgggcgagacggcggccgtcccgatcgggtggagcgagtcggcgaacgggcggccgctccgcgtcgccgtcccggtgaaggtcggattcaaccaattcgtggcgatccgaaggcaacaaaaccagacgagcgccggcggggcaatgatcacaggcttctgcatagacgtgttccaagcggtcatggcgaagctggcgtatccagtcgcatatcagtatgtgccagtcactgacaacatgttatcttatgacaaaatggtgaacctggtgcatgaaaagaggagaagttggagagcaacctgtcgaagctcgtggtcatcgtatgggtgtttactgttcttatcatcacgacaagctacacggcaaacctaacatcgatgttgacagtgggacagctgcagccgacgataaacgaattaaagaagggcgactatgtgggttatcagcagggatcattcgtccaaaacatcctaaaagacatgggattcaatgaggacagactaagggcatatgccacaattgaccagtatgccgaagccctaaacatggggtcagataacggcggtgtctcggcaattattgacgaagtgccctacttgaagctctttgtgtctcagtactgccaaggctacgccatagttggtccaacgtacaagagcggtggatttggattcgtctgtccttatcatccctttcaacacatttcacacaacataatttagatagaaaatggatttatggtacttgagaaattactgaaagttatcaaaattttaaactacaaaatatggtactccttaattcctcaagaatcgtagaattttaccaagaaattaacacatatagaaagtggcagttagctcatactttgttcttatacggtaattctttttttctaaatttaggggtggccacgagtggagcagcttgagcttaagtcccacacgtgccaaaagaaacacaaaggaatttgctgatctttagttaaaatttgtttaagaagctcatactctagtgatttagccctatttatggttcctggcttcgccctttactaaccgatggggttttttttctttttttttcaggataaccgaggaatactgttgtgccttttttaacgtagctagctgggattttttttatatataaaaaaaggttaaaacctggactatgcatccctttggatgcacacatccgagctagctaggatgtatacagaccatggtctatgtttttttaactatctgaaacacatgcgagacacgagggcgcttaaatccatttttttaaaacgattcatagggcacttagtatttatgtatttttgttctttcactaagttgttaatggtgcagtaacaataaaactaacaagttatatactaccttcgtcctaaattataagaacttaaaattagattagatatttcttagcataatgtattggaataggaagtattagaaaatatcttatttatttatacgttcttatattttgagacgagagagtaaatgtttgtgcgtgtaatgtcatccaggttttcccggtggggtctccgctggtgccggacgtgtcgcgcgcgatcgtgcagctggccgaggaaaacaggctcgcgaggatcgagaacaagtggttcggcgagcccggctcctgcgcgagaaagagcaacaacaccggcgacgacaagctccggctgaagccgaggagcttcggcgggctgttcctcatcaacgccgccgtgtcctccgccgcgctcctggcccacctcgtcgccgtctcgtcgctgccgacggagctgcggcggcgcttcgccgtcgtcgtcgctttcggtgtatccggccggcgtggaggtggagcgccggtggcgatggctggtggcggcgcggaggagagaataagcgagccgcatcagttggttggggaaccaccgaaccagaaccactcagctgcagggaccagctcaacagtagtagtacagtagttgagtacacaatagtcaaatagtagtagtaatcggctgatgcaagatatcacctcggaggcatcatcctgtcccgttctgtagtagtatttttcttgttttatagatgagtattggtaattgttacacggtcctatcaatacttcaataggttgttgttttataaatactagcaataacagcgcgctacgctgcgcgtgtgtttaagatgatgaataaaaggtagttttcagctggtaatttgtaatcatacatgagataagatttatatgtaagct

SEQ ID NO: 14961 - DNA, 2266 bp, Oryza sativa
  ref <308>: DATABASE ACCESSION NUMBER: AK065497
  ref <309>: DATABASE ENTRY DATE: 2001-12-06
gccctctctctcatccatttctccggttgagcggcgccgcggcggagccgaggcgagcgagcgagcgggcgcgatgaacggcggcgggagcaggcggggaggtgcgtcgtgcgccgacgagagcggcagcgaccaggacggcggcagcggcggcggcttgcggaagccgctgctgaacacggggagctggtacaggatgggatcgcggtccagcctcgccgcctcctccatggccgccatccgggagtcccacgtctccgccttcctctgcacgctcatcgtcgcgctcggccccatccaattcggattcaccagcggcttctcctcacccacccaggacgccatcatccgcgacctcaagctctccatctccgagttctcggctttcggttcgctgtccaacgtcggcgccatggtcggagcgatcgccagtgggcagatggcggagtacattggccggaaagggtcgttgataattgcggcggttcctaacatcattggttggcttgccatctcctttgcaaaagacgcgtcatttttatacatgggacgcttgcttgaaggttttggtgttggtgttatatcatatacggtctgtatttaccaacttcatttcatgtttatttgctgcttagaatgttctgtggcttcactgcttgagtacttatctgactgagactgagatgcctgtagaatgaggcagagcatcctttgctaatgaagcttttttacatttttgttgccagaagaactttggatcagttaatagttagtgcatgtataaacccttaatgtgtgaattatatcgtaccaggtgccagtatacatagcagagatatctcatcagaacacaagaggagcacttggctccgtgaaccagttgtccgttaccattggtatcttgttggcctatttgctaggcatgtttgttccttggaggctgcttgcagtgataggaagcatcccatgtacattgttaatacctggtctattcttcattccggaatccccaagatggctggcaaaaatgaaaatgatggatgattttgaggcttctctacaagttttgagggggtttgagactgatattactgcagaagtgaatgatataaagagagcagtagcatcggcaaacaaaagaaccacagtccgttttaaagagttgaaccaaaagaaataccgcactcccttactgataggaactggccttcttgtacttcagaatctaagtggaataaatggtattctgttttatgcaagtagaatcttcagagatgcaggtaagttgtggatatctcttataggtccttagtactacagtcacgttgtagtaaattttggcttgtaatcttaacacgcaaagaacttcagggtttacaaacagtgacttggccacatgtgcactaggagcaattcaggtaagtgattaggaatatcctgatctcatctctgtaacttatatcaagttgcttacagaaatcgttggattacattaggttcttgccactggagttacaacatggttactggacagagctggtcgacggatgctccttattatctctactgctgggatgactctaagccttcttgcagtatctgttgtattttttctggagggtaatatttcacatgattctcattcgttctacatcttaagtatgatctccttggttgctcttgtggcttatatcatcaccttttccttcggcatgggtgccattccatgggtcatgatgtctgagatcctcccagttagcatcaagagtcttgggggaagctttgcgacacttgccaacatgcttacatcctgggcaataacaatgacagcaaatttgttactcagctggagtgctggaggaacatttttgtcctacatgattgtgagtgctttcactctcgtgttcgtcatattttgggtgccagagacaaagggaagaactctggaggagatacagttttcgttctgctaaattttgagtttctcgttgcatccagtggatactccagttgagtacaaggaaaggatttacttatacaattaggaaccttggcttttcttttaccaagtcgattactggttggaggccaagcatttttattcagttcattttttttgtatattcttgtgtaattttaattcagttatgcccaattggcttgtaaatgccagtgcagtggctcaaatcaaattgcttcctacttgtcttcgacgttatataataaaaagatgcataaatgagcaatttgaatccctgactgtttt

SEQ ID NO: 14962 - DNA, 1447 bp, Oryza sativa
  ref <308>: DATABASE ACCESSION NUMBER: AK065498
  ref <309>: DATABASE ENTRY DATE: 2001-12-06
ggtccccatctccggtgtccctcgccgccggcgcctcctgcccctcaccggcgccacgctaactgtctccgcgccagcgccaggcgagaggtcttcttcttcctccagtgaccggaaccctggagccggtgaatcctgcttcctcgctgatcgatctcactccacgtcgtagctgtgagctgtagggcagggctgccggaggcggcatttctgctctgccggcgataccttcctccgctcctggttcagtagtgaaagaaaaacctggcacagcccagccttaatgttgctacagccaacatagtccaacaacctacagtagccttctccaatcagatatcttattcacctatgattttaaagctcatcttagggttgctgtggtgccttgtccacttggtgatcagcttctttagttcattgtcacatctgaagaatgatctagaatgctatctcatttcattcaagttgttgcccaagtaccgaaatctacatcttgagagacttgcatacttgggtgttgtagtagatagcagagaggcaaagaatgctttgaaggtcaagcaacttttacgctggttctcaactattgggattaattatctaattctctatgacattgaaggagtactaaaggagttgattcaacctggtatagaaacctcaacagatgggaacccaataaattctttagatgtagttgcagataccaaagcttcatgctatagacatggagggatgtttatggagtgtctatctagctctgatggcaaggaagccatcgccaaagtagcaaacttactgtattccacttgctgcaactctgataacaaaagtgagattgcgtttacagaagctgacatgactcatgcactgaaagctgtaggtactggtgggccagaacctgatcttctccttgtgtatggtcctggtagatttcatttgggatttcctgcatggagattacggtacacagagattatgtacgtgggtccactggaatcaatgaaatatggtaccattgtgaaagctttatatcggttctcacgtaaatatcaaaattatggtaaatgatactgagtctgagagcgaggtagtacttgtttacagaagacccatttttatgtgaaggggacgcttctggaactgaccaaatttcacgcaagtcttggcagctatcggcattgtgcttccttcctttctgatagagaatcgaaatgggctactcgtagaatgaatgttagtttgttttcgtcagaatgtaaaactacatatgtgcagttcagtggtaaaaactctcaaaccgaacacgtgtaccgagattgtcttgtttttcaccctgtgaaattcgctctcatctctcactgttgtacttgatgcacaaaatgtacaaactgccaagatattgtgtttttcaatgaatagtagttttacactgtttacttcc

SEQ ID NO: 14963 - DNA, 2385 bp, Oryza sativa
  ref <308>: DATABASE ACCESSION NUMBER: AK065499
  ref <309>: DATABASE ENTRY DATE: 2001-12-06
tttttttattctattagtgggttcaagggaataatataaggcaaattacttccttttcaaaatctaggataccgttgacttttcgtactaacatttgacgttcgtcttattcaaaaatttaatataaatatgtaattgtataagctaagattatattgtagaaatttaatataattaaatgatataaggcaaatggtcaaacattatgctaaaaatcaatgacgtcatacattttgaaatggagggagtacttgatttttgttcttgtgagatgaggttgcaagtctcctctgtaatgatgtataaacttgcctggccaaaaataataataataataataatctggcccaactgttgttaggtttattttgtgacagaaaatttcgtggtagtaaaaattccagaaagtaatagtagtatatatagtagtaaataataacaaagaaggattttttttgtccatgtggagcatactgggcccatggatctatttagttggggatgtgggccgaataagctgtttcgtgggcctgcggatctgctaacgagctgctaggtctccattggtaccctgtgcttgcctcctccataccctcgcctcgagctcgagaagggggggcggcggctgctgctcgcgctcggctactccggccaaggacgtctccctcagccggccccgacgcctgccctcttgccccaacttccccgcgttaagatcaagaaccgagggtttctcactgcaaaggctttggttttttcctgagaggagatgtctgggaagagagctttctgcacggcagtggagtctggcagaaaaactccagagttttgctatcttcttggtttcagcggtgttgttgcgctcccaggcgataggtttcaacctttggatgattttttgtctgagaatccttttctgtcacctattccattaggaaggctctatgaaaacattgatccagcaaagccttatatgctagaggaccctattcgtcgggcagtatggtctggatcccttgcaccttatatagccaacaaagtgaaaatgtccctgagccacatcctcactaaggaaaatgtgggggtgcataaggattttggcttggtggtgttcaaagatgtgccaaaaaagagagagggcatatctgattcgagcgaaaactaccaacactacagcagtttcttgacagagaccatacaaaggcttcatgggtctgagttcctcaatgcccttccagtggaaatggatatataccttaaagatttgacagatccgaatgttaaggaggatgatattgtggaccatcccatagcactaccaggaagggtatttggggatgtttctgttgaagcctatcgactactgtgcaagcaatatcctgtagtaaagaatgggaaggaaatttcagcggatcgcattattgaggctgttggtgcaaaattcaaggatgcactgactgtgtctcttgacagtggactattgccaaaattcttacctctgaaatggcagaagttatacccagctaacaaatatccatggatacctaagccccaattgattatctcacaagaagaggctggaaaaatagttattgagattcaccggcatggatctgtccattcggtcgaagtaggtgttgatactattgtgacttccaatttccctggcttttctggtgataagttcacgcgcatggaggtactcgcgctcattcgtcacattttcccagaatatctcaacacgatatttaaggaattcaagatggacaatctatatgaagatctgcaaattagggaaagaaatcctattcccagcctgtacagtgctcagggcgatggtgtttacgctgaagtgattgtcaagttcattgggttttgaagcttcggcatgcgggagatgtaatgtttggatgtcagcaagcgctgcaagttctgatagctaaagaggtgattctgggtttttggatggcgttgttcctgtcaagtacttagagaagattgaaacgtggccagggagagaaccgataccatttcaaaactagagaccacggtgtgtaattttggttatgcatggctactttttcagatgatgggtgtaattttgcaaacaagtttctgttatgcaaaaacagaaacttgttcagtttcaacgtcagtttcttctcagtttcttctttcaggttcaacgtcaggctgttcatattttcactcttctgtgtgatttctagctccagtagctgcattttctgttcagaattcttcagttccaactgtgttttagagagctgtagctccaaatcagatatttttgccaaagattgctgttgttgcagaagtactgcatccttctcagagtttaaatctaagattgtgctttttaactct

SEQ ID NO: 14964 - DNA, 2549 bp, Oryza sativa
  ref <308>: DATABASE ACCESSION NUMBER: AK065500
  ref <309>: DATABASE ENTRY DATE: 2001-12-06
ttggctgattcagtagaaaatggtttccacaattgtggtgaagattgcatttctggcaaatgctttctcaaccaggatggttcccgatgttatgttcatccattcatagagagaaagttgcggattttgtgggacaatatttttaagcaaaacaagcatccaatacattgtcatgagcaatcaacctgtgatccacatgatcgaattgctggtagctcgtcaacaaaacttgaacagctagcagacatagctgtagcagatcaagtttctaaagcaaaatcatcaggtattctggagcattcaccccatgatgaaatagaaggagaactacttcatttacaatccaggctactagatgatgttggtggcgcaaagcagagatatgtcctacttatattttgcagaagatttagtactgaagattgtccagtctctttctcatgacttggattctttcaataagagaaaatgggaccatatcattgcaaaccagttcctccgcgacttaagggaagccaagaaacgtgggaacactgagaggagacacaaggaagctcaggctatcatggctgcagctgcacgttgtattttacctacctcacgaaatgcaccagttagaaaagtggcagaatgtgatgtactatctgccaaacaagagtctgttcctgttgcagtgcctgccaagcaagaggttcatagtcccaaacaagagagtatcccaaaattcaatactggatcttcaagagttagccagttgatttctgtgcaacaagcaaatgattcgtcaccaaacagtaaagtctctgcagatgctaatattggcagttttgatctggcaaagttttccaagaaaaatgctcttccctgtgatatctgcatgcgatctgagactgtactgaaccggatatttgtctgctccagctgcaaggctgctgtgcatttggattgctaccggagtgtgacgaatcccacaggtccctggaagtgtgaactttgccaagagatgccatcagatgttgtcgctggcagtcaatcagattgcgacggttcaaaaccatgcttgttgcagtgcgatttgtgccatggaacatctggtgcttttagaaaaacaataaaggggcgatgtattcatgccttttgtgctgagtggttgttggagagcacgttcacaaggggacaatataatgcagtagatgggatggagagccttcccaaggataaggatacatgcgctatctgccaccgcaatgttggctaatgcttgaagtgcagtactgtggactgtcaaattacttttcatcctacgtgcgctagagatgctggtttttacatggatacaaaaacaattggtagtacgttggaacataaagcatattgtggcaagcatggcattgagcaaagaaaggctgacttactacaattacatggacctgaggaggtcaagaatatgaaacagatgagggttgacttggaagtattacgccttatttgtgagagagttgtgaaaagagaaaagttgaagaaagacttggttgtatgtggacatgatacacttgctgcaagaaggaattctattgcctattcaacccggacttcatattgtggatctggacctggagcaagttcagaatctgcaacaacttctgtcaataactcatatagtgggttaatgcaaagaacagatgatgtcgcggttgacagtattatttccaggaaacctactgttaggttttctctcaataacagcgatgctgataggaacacagctgacagttcaacatcgtcaatatcgtacaagcagaagctggatgaccgggaatcacttgctgataagaatcttccgaagaaaccagctactgccatgcagatatcagaagagggtgagacaaaatcatcggataaaaagaaccaacgccctccaaagagtatcgtctatactcgacgtagcgccttgtccaaaaagaggcaattgagtcagaatgtagaaggacctggtggatagaagccaaccaaggtggctccttcgtggatagccagagtgtttgaagcattctccatgtggaaagcacatgcagccagcggagctggccagtgtaaccatgatattgccataggggcacggtcggccaaggttgtaaatttacaaacggcgcagatgggagttcttcaaagtgtgacttgagcttccgaccagaatattcgagtatttgacccctcaaggctcaagctcacatcactcagacgaggggtgacatggcagaattcatccactgatttagctactagatgctaatctgtgagatatgctttgtacaattgttagtttagttctgtaaaagaaaacaagcgattgccattagtggatgattaaagagaagcgaggaaagtcttgttaggctgacatctgtagctgacagtttcccagtagctaaccagaacatgagtgaattaagcacatgtaggttcaaatgtgctatgacgattacctgttgcgttgatgtatggctacatttgttgtgacttgtaatgaatccatgccagagtttttg

SEQ ID NO: 14965 - DNA, 3797 bp, Oryza sativa
  ref <308>: DATABASE ACCESSION NUMBER: AK065501
  ref <309>: DATABASE ENTRY DATE: 2001-12-06
gggttgatctctgaagagttcagaattcagagcagaagtagtatgaagcttcttgacacatgcatgccaaaacatggctccgtttggagaaggcttagcaattagcatgtttgaggatgtgcaagaggaggtttatccaggacaatctataaaggtaagagtgtttgaattctgtttgctatctatgatgtcgtgggacagtttgcagtaaattattcttgtagatccttttctcttgaagttcccacatattaacattagagaagattacacctcctggtttggttctccttttcagacttgctcatctagtttggttaaataatccttagatctatccttatgttggctaaagattatgatttcaacttttttttttgttccaagatttcaactccatttaggaatgatctgtcacacacaaatgtttactgtaaatacttgtgatgagtcgcatttggagttatttaggaattgatctctctcgcatacaaatatattcctaaaaccagatgcatctaagaaccttagctcttgaaaggaacccattaaacatgtcggtgggagccttgctaggtaaaaatctgtccaaattcgtaatgctaggtagtagtagcaagcatgacggccgttgttacattattgcaatttcaagttgctacagttcaatctctcataaaaagttgccacagttcaaaaagaggagcgctgtacttcaattttctactactacaacatgtttttgcatgctatgttttctgatccttggattacatgctctcagtaatccaacacagcttttttttttaaacaattgaacataagcatcagttaattcgattacttagctcaatacacctgatgaaacaagaaacaaaactaaatgatctcaatcaacagcatcctttctgttcacaaaatcatacagaacattattacggagtctatacatgtactacaagaagggaagtcatataattcaattgaatttctggttgctataacatacaaaaggtgcaactgtaattatctagtttgcagtaactaagttcaccaaaatgctgtggccagtatatataccaaaaaagaaatacattttggccttcttttaacatacaacacacacacacatatcagctttcctcagcgtgacatcttctcttctatgcaaccgtggaactgaatgaacaaatgatctgttgcagtgcacaccatggaacctgacaacttgaagctcaccgaatttcttggtttcactcatcatgcataagccagcaaagtagccaacacaatcgaaaataccaaaaccgagagtgtcaatggttgttttgtcagaggacttgcattaggcaaccatggatatgcatccggaggtggcatgacacaattatcaccattgaagtacacgcggtgtgggaaggcccatcccttgtcaaaggtgaagtccttggaatccttacgcagaagaagttctgactgtgcatttccaagtggaccagcttgcatgagcaaatcgttatagaacttaactccccagaacatcgcagtatcatctaaaatagaaggaataaacttcatcagagaaagagagagagagagggagataaaggaacgtattacaagtgcactccaattttcttaaataaaggagaacagtttgtaaattgacttacttatcttgcttccatatggagtaagtggcttgtagttgaagctaaacagctgggtgatattattgaagttaggatgttgagcgaccaaattccactgtgtgtaattcatgcggtagttgaagttcgtaatcgtgatcttcactctccaatattccttatagttgagtttcacatgccagtggattctgatcgggcacatgtgagaagtacattggacaagaggctgaccggtccatttgccagggccatcaatggcagattgtaaataaggtgaattctcactgtggaaatgcatggaacttgttagcaattttgcagaaaagttgggcctcaacaagaagcgaagtaagagttttggttttattaactcactttacacagcttccaggacttgtcccattgttttggcagccacaagagcatgttgggtagttcacaattgtgtcattataaaatgatgagagagatacacagcaggaaggagtcttctgagcaagaaattgggagtatgtgcaggtcacattccatgtcactgcaaacagattttatttttgttaagaaacaaaaaacaaaaatgaactttatggtataagattttgacaaatttaacttctatatggagccactatgatgcatgtctgcatttgacgaatattatttgctagagaataatattaactgaattagctgtattctattaggccaacatgccaagtaatataacctattatcaactattattcacagttggactcatctcactttgagaacaatctctttcccttcaacagattacatcttcttactaaccctacacataaggtaacctagttcaaccatgcaattgttgtttaggctgcaaatgcatttcctcaaagaatgaaagcaattggtattaaacattaaagaacaacagatgagctacttacttagagcttgggttgctctgcgcccatccccggtgaaaaacttagtaggcctgacaatcatagcacgcccgcacgtgtacccaggacctggggccttaagagtgaagttcttaggcaacttaactgtcttgttggtagtcccagcaagacctacactgatctggaaggaagaagcagcatttgatgggtcctggttaaatgtatttataactccagctttgcagcaattagcgatttgcatgttgtatggggtgcccggaagcagatcaacaactgtgggatccttcttgcagcagtggggcgtgccacccttgaactttgagcaatcgccctgctcagtggtctgtgctccaaccatcgaccaaatgacctccttctttgcccatgtccaccccagctgccacccaggtgcctggatgtgccggaattgttgatagttgaacatcgtgaccacagcctgcacaagaaacattttggggggaaatcatgacacacatatacaagataatcagagtatccataatatgctgacataaaactcgtgtttattattgttaattgctgcatatgtttctgaccagctgctggttatgctatcaactttgtacttcaaagacaacttgtagtagtatcaaataaaataaaattatggcctaataatagttggggaaacaagatgcagatggatttttttgaacgaacaatacaagatgcattttttagtgtggggttgctacttacaacatagccatcaggagtccacgacataacgtcccattttatcgtgatgtttccatttggatccagcgcatcataagcctctgcaagaggaaaacaaaaaagagttgcatatcaagatcctgaacaagggaaacgaaatgggggtaaattagcagttcggcagatgaataagccccatgagttagttatatcgtgatcccgatttcgatctggaagggaattttttttcgaattcgcctctcctgatcagatctatcaccttgggcactgattagtgtgggaaggaagctccatgcgtgctcctctcaatggatctaagctacctaacctgatccaagaatccggtcaagcgggagcgaaacgaactgaattactgctacctaatctgctccaagaattctggcaaaagcaggagcgaaacgaactgaattactgatgaaacgaatcggaattc

SEQ ID NO: 14966 - DNA, 3937 bp, Oryza sativa
  ref <308>: DATABASE ACCESSION NUMBER: AK065502
  ref <309>: DATABASE ENTRY DATE: 2001-12-06
ggtcgtgcgtaccatgaaccccccacctcgtcagttggcctccgccgatccccatctatcccgcgggcgagcagggcggccgtcgttcgtcctgctgcttccgccgcatccatcaccctggtgagcacgtcctcccgccacccgcagcctacgccgatccccccatccattccgcagcgagcgagcagggtcgccgccgccgccgtttgtcctgctgctcccgccgcatctcgtcctcttccccatctctctctctctctctctctctctctctctctctctctctctctctacccacgcacttcttctcagaattcgccttcacccttagcttctgctctaggaatttgtctttaacgttaatactagtagcagtttgatggttcccaaaaaggtttggggggttcaacagctgaaccccatgccccatgctagatccgccactggggagcacacattttcttctctcctgaagcaaaaatcacccaagaccagccctacaaaacctaggggttctatggctgtttcaatgagggaagtggatgcggtctttcaaggggctggtcaaaaagatggattggaaatatggcggattgaaaaactgcaagctgttccagttcccaaggaatcacatgggagatttttcacaggagattcctatgtgatattgaagacaaccgctcttaaaaatggttcttttcggcatgatatccattattggcttggtaaagataccagtcaggatgaagctggtacagctgcaatcaagactgtggaattggatgctgctcttggtggacgtgctgttcaataccgtgaagtacaggggaatgagacagagagatttctttcatattttaaaccttgtattataccagaggaaggtggaattgcatctggtttcaggcatactgaaatcaatgaacgggagcatgtgacaaggttatttgtctgcagaggaaagcatacagtccatgtcaaagaggttccgtttgcaagatcatcgctgaaccatgatgatatatttattttagatacaaagtccaaaatattccagttcaatggatcgaattcaagtattcaggagagggctaaagcccttgaggttgtgcaatatttgaaagacagcaaccatgagggcaaatgtgacgtaggttcagttgaggacggcaagctgatggcagatgctgacgccggtgaattctggggtctctttggtggatttgcacctcttccaagaaaaaccttttctgatcttaatggaaaagattctgctttctcttcgaagttgatctgtctaaataagggtcagacagtaccagttgattttgatgttctaacaagagagttgctagattcaacaaagtgctatctgctagactgtggatctgaaatttatgtctgggtgggtagagagacaccactcgaagagaggaaacgggcaggatctgctgcagaggaattacttcgtgaagtaaacaggccaaaatctcatattgttcgtctcatggaaggatttgagactgtcatattccgatcaaaattcagtaaatggcctaagaaagctgatgctgttgtgtctgatgagagcagaggaaaagttgcagctcttcttaagcggcaaggatttaatgttaagggtcttgcaaaagctgctcctgtgaaggaagagcctcaacctcaaattgattgcacaggcaacctgcaggtttggcgtgtaaatggcactgaaaagacattcctttcattctctgagcaatgcaaattctacagtggggactgttatatctttcaatatagctatcctggtgaggaaggcgaggagtgtctcattggtacttggttcgaaaaaaagagtgttcaggacgagaagactacagccatttcagttgctagcaagatggttgagtctctgaaatttcaggcagtcatggttcgcctttatgaaggaaaggaaccagctgagtttttctcaatatttcagaacctggttatcttcaagggtggtgttagtactgggtataagaaatttgtctcagaaaacggtattgaggatgacacatattcagaaaatggggttgcccttttccgggttcaaggctctggaccagaaaatatgcaagccattcaagttgatacggctgctacctcgctgaactcttcttattgctatgtactacatgatggagatacactatttacatggattgggaatttaagctcgtcaatggatcaagagcttgctgagaggcagctggatgtgatcaagccaaatcttcagtccagaatgctcaaggaagggtcagaatatgatcagttttggaagctacttggagtcaagtcagagtaccccagccagaagattgcaaaagatcaagaaagtgatcctcatttgttctcttgtactttttcaaagggagtgcttaaggttagagaaatattcaactttactcaagatgatttgatgacagaggacgtttttattttggactgtcattcatgtgtcttcgtatgggttggacaacgtgtgggcacaaaaatgcgagcacaagctttgagcgttggagagaaatttttagaacttgacattttgatggagaactcatcacaagaaacaccagtttatgtcatcactgaagggagtgagccccaatttttcaccaggttcttcacttgggactctgcaaaatcagccatgcatggaaactcatttgaaaggtggttatctatagtgaaggatggagtaaaaccaaaattagataaacctaaaagaaggccaacgacatcatcatcacacactggacgatccagtgtacctgaaaaatctcagcgctccagaagtatgtcgttcagtcctgaccgtgtaagagtcagaggaagatccccagcattcaatgcattagctgctaactttgagaacccaaatgctcggaatctatcaacacctccaccagctatcagaaaaccatctccgaagtccccctcttcagatcctacaaagccacctcaacgagctgcttcaattgctgcaatttctgcttctttcgagcgacctaggccaactctgataccaaagtcaatcaaagcgagtcctgatgtaaacaagccccaagttgaagcaagcaagcctaaaccagaggcaaatggcaaggatagtaccccttcaaaggatagcccaacggtaactccaacgatacaggaagatctgaaggagggacagccagaaaacgaggatgggctcccagtgtatccatacgaacgcttgaggacatcttccatcaatcctgtgacagacattgatgtgactaagcgtgagacatatctatctgcggcggagttcagggaaaggtttgggatgacaaaggaagcttttgcgaagctaccaaagtggaagcagaataggttaaagattgcccttcagctgttttaaaatctcttactgtgaaacgagacagtgtttccaacagttagcgcaagaacagtatgacgagactgattccgaaggtagaaattatgtttaccagtcacttttgtggtctcttgcggggttgcagtggtatgcaacattggttgtaagtgtatcctggctttgggtcaagggacccccttgtcaggtatgggcggacgcaggatcagtgaatttttagctgctcctgcttccaaatatgtgttgttgttcattgacaatttttcatgttgtgttggattgctgcattagcggtccagttactccatttttttttcaccattcctaggtcaagggtttggttgtgagcttgattcttccccccaccttaaagcctcatatttgtttgattttttgaactagagggttccctgagacaataagggagacatatatggtgtaacttcggcaacagaaaatggtgtacaaaagagtttgttgaagaattttcctgagctgttgtcttgtgct

SEQ ID NO: 14967 - DNA, 2503 bp, Oryza sativa
  ref <308>: DATABASE ACCESSION NUMBER: AK065503
  ref <309>: DATABASE ENTRY DATE: 2001-12-06
gattggaccatttccctcttcttccgccgcggtgagccggagcggcgcggaagggtggggcacgcacgccacgcggcggaagcggtgcgcccgatctcctttgcccgcgtcgatccacgtcgacccggtcaagccattatccccaacctcaccaatcctctaccattattattatatcacacacgtcatcgcgcccccttctccttcctctcctcttctctcctctcctttccccaattgcttcctcctcctcctcctccttctgcacctgtccgattcggttcgattcggtttgattgggttccaatctgcggaggagcggcaacgagctaggcggaacagagggttggtcgtcggatccgtggcatggagatctcgttcgaggcgtgggagggcgtgcagcggcacggccaggacatcgcggaccgcctcgcgcaggggttcaccggcctgctccaggcgcagccgccgcagttcccgtggccggcggcgtcgcacaagcggattcccttcgagatcgacctccccgtggtccccttcggcgcctcccgcggtgcccgggccgggaaggagttcttccccgccgcggccgtcgcctccgtcatcgacatcggcgggaggctcggccaggctggcgtggagattggggcgtccgtcggtggcgccgtgcagcacgccgtgcgccagctgcccctgccgttccggaacggccagatccggcgccgcaagctgccgccgcagcctcaggcgccctcgcccgcggctgcggtgggtgaggcggcggtggggctctcggtagagagggctgtcgacaggtgccctctagaggcagctgcggcggccgccgctgccgcaaccggtagcgctgcagcgtccacggtcagtggtgctgtgggcggagatgacgtagatgaggaagatgagggattcggctgcgagattggtacttttggaaactttaagaagtctaagggtacagtaaatgtctcggcttcatacaataccaggaaccacgacattgagagttctgttgttgcacgtggagacctttggaggctggaggcatcacgcagcagttcaacttccggaaacgatagctcacctctataccttgttcagttgggaccgttactttttgtccgagactctacactccttttgcctgttcatctatcgaagcaacatctgctttggtatggttatgatcgcaagaatggagtccattctctctgccctgctttttggtcaaaacatcggaaatggttgatgatgtcaatggtttgcctcaatccagtagcttgttccttcatggacctgcagttccccaatggacaactaacatatgttgctggcgaggggattacagcaagtggttttcttccattatttggtgggttgcttcaagctcatgggaaataccctggagaaactagagtcagcttctcttgcaagaataagcaaggcaccaggttcactcctatgtttcaatggcctgacaagtctctgtcatttggagttactcaagccttagcatggaaaagatctggtctcatggtgaggcccagtgtgcaagtcagtttatgccctacatttggaggaaatgatcctggggtacgtgcagaggttatccattcattgaaagaggaattgaatgtaatgtgcggtttgtcttgctcaagacatccatcagcctttactgctctgtctattgggagatccaagtggaatggtcaaatgggcagttccggagtggtcgttaccttggaaacaccccttaataacattggaaggccatctttatccgttcaattgaatggaggttttgaaatttagcattctgcgcagtaagttgtatataccactgtacatagccctactaatgtccatgtcctatctctgtggagatggctgtgcaacgcctatgaatggtatctggaagtggtttctgctcgtttttgttgtcagactcataggtgataagtctcagctcaacaaatcaactggtttattccccatgccaacaaaggcatccatatatataccttaaagagatggtgatcaagtgtgtaggcagttcaaggtttcttttgaagaaattggagagaaaagctgcaagatcagcacttaatactttttggaagttgggagaaggaaaaggctatgaggtgttttgcggctgtgcaagaagccaagacgaatgtggctttgcaagaagccgaagatgttcacccagaagctatgttcctttggagcaggactgaccatactggatgtttgctgatagtgaattgcttactggcttttgctaattgtgatggataattattatccatcacaattgatcgttagacgatctcattgctgagacaagctttgatggatgaattggtgtgcttttttcccctgcactcttgtattcctcatgtaagactcatgatcagtgaagctaagaaatgtctactgggatgggatggaggacctgtctggtggcattgtcaaaccc

SEQ ID NO: 14968 - DNA, 1823 bp, Oryza sativa
  ref <308>: DATABASE ACCESSION NUMBER: AK065504
  ref <309>: DATABASE ENTRY DATE: 2001-12-06
gtgcagcagagaggtctccacttccctttcctcccaccccgagaaagccaaaaaaaagaaaaattatttttcaaaaaaaaagctcgcctcgccctcgcgtcgtcgtccccatcaccccccctcctccgctccgagtacgcgtgcgtataccaccacctccatctccaccaccgtatgtatctacggtgaggcggcggcggcggaggaggaggaggagggggagtggtgagggtttcatctgcggaggaggagggaggaggagggaggagggtagatctgggagggggatggggaacaggataggggggaggaggaaggcgggggtggaggagaggtacacgaggccgcaggggctgtacgagcacagggacatcgaccagaagaagctccggaagctgatcctcgaggccaagctcgcgccgtgctacatgggcgccgacgacgccgccgccgccgccgacctcgaggagtgccccatctgcttcctgtactacccaagtcttaaccgatcaaagtgttgctcaaaagggatatgcaccgagtgctttctccaaatgaaaccaactcacactgctcagcctacacaatgtccattctgcaaaactcccagttatgctgtggagtatcgtggtgtaaagacaaaggaggaaaggagcatagaacaatttgaagagcagaaagtcatagaagcacaaatgaggatgcgccagcaagcacttcaagatgaagaagataagatgaaaagaaaacagaacaggtgctcttctagcagaacaatcacaccgaccaaagaagtggagtatagagatatttgcagcacatccttttcagtgccgtcataccgatgtgctgagcaaggaactgaatgctgttcatcggaaccttcatgctctgcccagactagcatgcgccctttccattctaggcataaccgtgatgataacattgacatgaatatagaggatatgatggttatggaagcgatttggcgttccattcagggaagtatagggaatcctgtctgtggcaactttatgcctgtaactgagccatctccgcgtgaacgccagccattcgttccagctgcttctctagaaatacctcatggtggtggattttcctgtgcggttgcggcaatggctgagcaccagccacccagtatggacttctcttacatggctggcagcagcgcattcccagttttcgacatgttccggcgaccatgcaacattgctggtggaagcatgtgtaatctggagagctcaccggagagctggagcgggatagcaccaagctgcagcagggaagtggtaagagaagaaggagagtgctcggctgaccactggtcggagggtgcagaggccggaacaagctacgcgggctcagacatcgtggcagatgccgggaccatgccgcagctgcctttcgccgagaacttcgccatggcgccaagccacttccgcccggagagcatcgaagaacagatgatgttttccatggctctttctttagcagatggtcatggaagaacacactcgcaagggttggcatggttgtaggtagagcactctaattttgacgcctcgctgccctctcccttgcgctgctgttgctgcccttctctcccctgcctcctgcttctgcctcctttttgccaccagctcttggcctttttgttcaccccttttttgcatgtgttttgtcgtcatggtttgatatagatccagctatagctctccattgttattgcttatatgtatgtaaaatggaatatgaggaaatagaaaaaaggaaaatgggtcaacagttcttttggcagtagg

SEQ ID NO: 14969 - DNA, 1739 bp, Oryza sativa
  ref <308>: DATABASE ACCESSION NUMBER: AK065505
  ref <309>: DATABASE ENTRY DATE: 2001-12-06
gaccgcacactgtggcacacagagctcggaggcgccggccatggaggcctcgcaggcggcgtcggcgtggagcagcgtcaactccggcatcgtgctgagcctcgccgccgtgctgtggaccgtggtgtggaacagcctccagtcgctgcagctgcaccacctggtcggccgccacctcgcccgccacgcccgccgcctcgccgccgtcgtcgacccctacctcaccgtcaccgtcgccgagcacgacggcggccggatgaagcggagcgacgcctacagggaggtccaggcctacctccaccgcgccacctgcgacgcctccgccggcgtccgccacctccgggccgagccggccaagaaccccgacgcgttcgtcctctccatggccgaccgcgaggaggtcgccgacgtgttccgcggcggcgtcaccgtctggtggctagcctactcgacgccgccgcgggaggacgacgccggcggcgggttctactggggcggccgcgccgcccgcgccgaccggcggttctaccgcctctctttcctggagcgcgaccgcgacgtcgtcctcggcgagtacctcccccacgtccgccgcgagggccgcgccgccatggtcaggaaccggcagcgcaagctcttcaccaacctcgccggcgacacctggggggacgacggcgggtggtgcgagagcgtgtggagccacgtggtgttcgagcaccccaagacgttcgacacgctcgccatggacccggcgaggaagaaggacatcatggacgacctcgacgcgttccggaacgggaaggagtactacgcgcgcgtagggagggcgtggaagcgggggtacctcctgcacggcccgcccggcaccggcaagtccaccatgatcgccgccatggccaactacctcgactacgacatctacgacatcgagctcacctccgtccgcaccaacaccgacctccgcaagctcttcatcgagaccaccagcaagtccatcatcgtcatcgaggacatcgactgctccctcgacctcaccggcaagcgcaagaacaagaagaagaaggacgccgccgccgccaagaacgacaccgacggcgacaagaaggagtcgccgccatcggaggaggaggagaaggacaaggagggaagcaaggtgacgctctccggcgtgctcaacttcatcgacgggctctggtcggcgtgcggcggcgagcgcatcatcgtgttcaccaccaaccacgtcgagaagctcgacccggcgctcatccggcgaggccgcatggacaagcacatcgagatgtcctactgcggcttcgaggccttcaagttcctcgccaaggtctacctcggcatcgacgcccaccacctgttcgacgccgtgcgggcgctcctgcgcgacgtcgacatgacccccgccgacgtcgccgagaacctcacgcccaaggccgccggcgacaacgccgacacctgcctcgccgagttggtcaaggagctcgagaaggccaaggccgacaaggctcaggcgaaagggaaggcggcggcgacggcggcggcggaagaggaggtcgacggcgatgacgacgaggagtagactaatgttgacttatttgatgtttacttggattacttgctcacttcgcttgtgctagattgtcacagatatttgactattcttacatgattaactagtgtattagttttagttttaattaagaaaaaacataaaaaaaattggctcg

SEQ ID NO: 14970 - DNA, 2793 bp, Oryza sativa
  ref <308>: DATABASE ACCESSION NUMBER: AK065506
  ref <309>: DATABASE ENTRY DATE: 2001-12-06
gattctctccaccgcgtcgtcgcctccgacggcgccgccgttcccctttcatctcgacctcgggcaagtagctggcatcgctcgccgtcgtcgcttccaggcgaggccatcggcggccgccgtcgcttcttcctagagaccgccgccgtctccccacacccgcgcggcaccccgtcttgccctctccctctagggttttcttgggcgtcgaatcgctgtaagcccctcgataacttctctggttgttttgcttggagctccagctcagggagcacggctttgatttggggatcgtgcctctcctgcctctctggtgtggagctatcggtgtcgcgttgttttctcttaagctagggttagtgcttggtactgtaggtgggaaagcaatttcttttttggagggatgaactcctggcttcttctctagatggtagctttgattggctgtgccatggaattgcctgcaatgcttgatagttttggtatcccctgtgtacaaaaattatgcgtaataaaatagtttggaaatttattcactgaaccgttcgctgagttatttttggcctgctgccgtatttgataggtagatgcaatatttagcatgatctactggctttgtcctggttgtaatcactcacttaattgctttgcaagttctgttataggatggaatctgttgctttttgtgctttagttgattggtcttagtaaagcttatttccattcttaatagttgaagctatatattccattgtatgcatgggatggtgcagcttgcagttaataatgcccgatgcggtgttgtgtgattccagaaataccaaatgtctaagctttatctacacatgtagtgatattttttgtgttttatatacagaaaagcttcaattaaagatggcttatatgtaacaacatgagcagtttgccagcatcagatcggctttgcatcctttcttcttgagttccggcgtcacatcgtgtttgcattcttaaacatttcatctcgattatttgtttttcttcacccattatatttgctcatagtttatcgctttcctttcatttctttttcaccgaccagaacagatcgggcctcttttcactaaattggggaaaaatcaacagagtgttgttcttggcttcttgaaaatgctatcggctccacctagagtgcacacccgcttcttgaaaaatcaacagagtgttgcttacttactccatatatatagaccattgcgcatatttgcctttcctggcaatcttttcctgctctttctctctctctctactttggtcacggcaagctattgttaagaatgccttcagatactattaggttcaaccaggggagatactattgtctaatttatatataggccagtcatggtctataatttttatgtcaacctcctgtgttgttttgtatcaaatttgcttatcgatgatttatcgttaccatatatcattgcctattgttgcgttgattaatatgtacctcttgatggtagatcgtgcttgctcctattattaccatgggtgattcttttctcagcttatatgtatatgtttttgtattctcgtgtaatattctagctcttaaagtagctttgtatagagggttacatatgttgagttatcttctcattatttatatttccttttatcagttcgttggttctcattactacccagtttgttaccttacacagtgttataccccatgccaacatgcaatagattctttgttagttcccacttaatttcagctctaaaactttcagattatgtctatgcctgatggaaaatctctggtttgtgcacgccttaagcgtaagcgaccaatattagagattaatgatggtgagctacatgaatcgctatcaaacgatgccgatgacttccccacagccttcaatttcagatctaaccggcctgttcgacgccgtttgtgtactcaacttgctgagactaatgatggtgagttacatggatcaccatcaagccacgcgaatgacttccccacagccttcaatttcagatctaaccggcctgttcgacgccgttcgtatactcaacttacagattttcctcgcccagattccgccatggctgctcaatcacgtaaaaaacgtaaagcatatatgtcagagcgttctagggtattgcgacaacggttggcacattcatcatcttccatatatgataaagatgcatcgtcttctcataccactatccctacaaatggtcattcccacgattcgtatgtgatgctcaatcatgatgttatctcgactgttcgatcatgactgctcatcaaactgctcgattgtaaatgttcaatctcgatgctggtctcgatgctctgttttctcaccattaaaccttggtccaccaagtcacacatgttgttattgtggcgcattattttggtatgaggagcgcatcgaccggcggcgtcacacaacaagaccgttatacaacaagtgctgcaaaggaggaagtgttatcttgccttcctacaagccacctccagagcctttgcatagtctgctaactgcggtggatagagctaaatcagcacatttctgtgagaatataaggtactacaactctatgtttgcttttacatcaatgggggtgaatgtgattgattctatcaatgatggtcgtggtccatatacattcaagagaagtggccagctctgccatcgtattgggtcgctcctaccaaaaagggataaacgaccagaatatgctcagctgtacatatttgacactcaaaatgagcttatg

SEQ ID NO: 14971 - DNA, 3470 bp, Oryza sativa
  ref <308>: DATABASE ACCESSION NUMBER: AK065507
  ref <309>: DATABASE ENTRY DATE: 2001-12-06
aagactcctcctgctctgctttgcttcccttccctgtgcgccccgcccccacgaaaatccacttcttttcctcaccttgccactgtcggttcttgcctctttctttgaggactcgcccgcccaacagaaggaggcaaaggatgatccagtcttgaatgaccagttccggaggatctgcgcaagaaagattgctgcgcctagcatgtaagaaacacgaccatggagttcctttaatccaatcattggagcaagctgccaggaaatggatcagtaactcatgaatgacacgggtgccattttacccaagtgcatctagtttctatattgaccagctgctcaagaaacaccatttccatggaagctcctaagcttcgcttcgctcagatgcccaggatgcctccagcttcttgtggagtatccaaccattgctgtctaccaatgtggtggctgtggtactattcttagagccaaaaatcaagttgcgccagcagtgaatgctaatgcagaatctggtgaacacaatgaattttcaaataattcaactgggggttctcgaaacaacaaattgatctgtacagatgggcagaaaattccaccatcctccgatgcacaacctggtgtgctgcaggagaagattacctttgctagcgaggaaaaaactatgtcttctagcaatagcatcgactccagtgagcatgttaacatcgagtgttccttacttgatggggatgccagcaatcatgatgtgaggagctgaaggcataaatgatgaagataaagtgactgtgtgtaattcaagtcttgattcagtgaggaaagtagagaatggtgaaaccgatggaaatgaaaaaggttcctttacggatgatgggagcatcagcaatgaagttgctaccacccaaagcatggtccacatggatggagctggttctgataataattttacagaagtacagagtgcagctgaggggaagtgtgcacttagcgatgctaatctggactcacaagagatagttgcgatttgccaacctgataacatttctgttggcacaaaagaaagggttcagctatatgaaggttttaatgttgaatcacatgaagatctgattggagaattggtgaggtctctttcactcagtgatgacgaagaagagtttgtcgatatagcagaaaacagtgaacttaatgatgctttatgttctcaaatgggcagctgcagattttcattggggagcaaaatgaatgaaggccctcgaactgatcctcatggccggttgattgaagaattagagatgtctttcagtgatgctgaagaaccactagaccaaaatattatggtctccctcaatgacatagaaaagcctactttggatgaggtcagtaaagaaaatcacattttggaggaggatggtaaagaaagtcacattttggacgtggatggtaaagaaagtcacattttggacgtggatggtaaacaaaaccacattttggacgagcatggtaaagaaaaccacattttgaatgaggatgataaggaaaacctcattttggataagggtggtgaggacactttggatgcaggtggtgctaattcatatgaagaaagagtattgccatcggatgacgggcttctcaaatctggacaaagtttccaacaatgtgagctggttgctgttaacatggcagaaaaggatgaggggcatctagaaggaaccaacatggctaaccatgctgaagcaaacagtggaattgctgctgttctttcaaatttgtcaaacgataaattttgtgccatattaccacctagctgtgatgggagaaaagaagaaaaatctaacatacatagaggtagagaactctgtcaaggattgtcacttgattctgtagacttccgatcaatccaaaattttatcgagtctcaaatggatgggacctcaagttctctttcaagtggctctccaagtcatggtgacctggaacataatagatcaaacagattcaagaaaattgatcgacttgagcgcctgaggaagatggatgatctaagagatcagttaaataggctttctagccagaaaggtttggaaaataggtacaagaacaaaggccctggagtccttcaggaacagattagctacagacaccttgaacaacatccttgtggttttgatggtgattctatcctggattctgatattatcgattcctattatgatcaaggaaatccaccaaggtacccaccaccagatccgttctccccaactcattcgcactatcattgtggacatgggcaaccccatatcccatataactgcagtgcatgggagtttaattcatattatcagtcctcatatgcgggaagtacggttcttgaacacgtatcacttcgctcaagctacaaggagcagaaacgtgcagtgaagaaaagcattctgcggtctctgtctggtgcttccccatttaccatctgcaatggctgtttcaatttggttcaagtgccatcagacatctatgtatcgaaaaagaagatcgctaagttccagtgcggtcggtgctccaaggcccttatgttatcatttcctgctacaaatagtgatgatgcaaagctcagtaataaggaagtaaatcgaaaaccaaacaagcctgtccacaatagtgttgttggtatggagggtggctattctttttctgctgaatgctcacgaggggatcctgtgagcataagtgaagaatgtggagcttcaatctcaagaagcttctctggtagaactagagcagctgttgctgcatcaggaagtggaaaaaaggtgtcagactcggcacttcatcggctcatggggtatgattcagcaagccagttgttacggcgcagcagagcgtttgaggatggatatgacagttttgaatccatggtgccagtatcaaacagagtatccagaagaaagaatttgtaagatacttctgtagccttgattcctaccaagcaggataggaatgatcagcaattttgtgattatgtacaagaaatggacaccttgcctgcaactgcaagttattatatattttttgtctttcagaagattttgggattttaattctgaagtttttggttagccattcttcaatcaaggtacagtaattctttattcttgttgtaaagttgtgtatatatttggtgggataaaattgtataacagttattcatgccagatgtttgttaatacgtggtgtttctttactttgtaattttgtatacattggaggcatttgcacacaccaaatagagcggcacaatgagtgcttatgatgttttgtgtgagtaagttggacagcacaagaagacaacaactctgaatgtaaccattatttgttaggtgtaacggaccatgtggtttgtctttgcatgacagcatgagactatgagatgcatcttttgctgtcgctcatcattgtaaatggagatggatgct

SEQ ID NO: 14972 - DNA, 3792 bp, Oryza sativa
  ref <308>: DATABASE ACCESSION NUMBER: AK065508
  ref <309>: DATABASE ENTRY DATE: 2001-12-06
ggcgctctagactgtgcaggagagaccaccccctccctccttctagaagactagaaccctcgccatcctccccttcccccaccctagcgtcggcggcggcggcggtggcggcggagatgagcgtgtggaactacgtcgtgacggcgcacaagcccaccagcgtcacccactcctgcgtcggcaacttcaccggccccaaccagctcaacctcatcgtcgcgaaatgcacccgtatcgagatccacttgcttactcctcaaggcctccagcctatgattgatgtacctatctatggaagaatcgccacactagagctcttccgccctcataatgagactcaggacttccttttcattgcgactgaaagatacaaattctgtgttctgcagtgggatggagaaaaatcggagcttctcactagagcgatgggagatgtttctgatcgcattggtcgccctacggacaatggacagattgggatcatcgaccctgactgtagacttattggtcttcacctctacgatggattatttaaggttataccgtttgataacaaagggcagctgaaggaagctttcaatatcaggcttgaagaacttcaagtattggacatcaagttcctgtatggctgtgttaaacctactatagttgtcctctaccaggataacaaagatgcaagacatgttaagacatatgaagttgcattgaaggacaaagactttgttgagggtccttggtcgcagaacaatttagacaatggtgctggtctgttaatacctgtaccagctcctcttggtggtgtcataattattggtgaggagacaatagtttactgcaatgccaactctacatttagagctataccaatcaaacagtcaatcataagagcttacggacgggttgacccagacggttcgcgctatttacttggtgataatgcaggcatattgcatttacttgtccttacccatgaacgagagagggtaaccggtctgaaaatcgagtacttgggagagacttcaattgcatcatcaatatcatatctcgataatggtgttgtctacgttggttctcgatttggtgattcacagcttgtaaaactaaatctccaagctgacccaaatggttcatatgttgaagttcttgagcgatatgtgaaccttggacccatcgtggacttctgtgtggttgaccttgacaggcagggtcagggtcaggttgtcacttgttcaggagcatttaaagatggttcccttcgggtggttcggaatgggataggtatcaatgagcaggcttcagtagaactacaagggatcaagggtttatggtcgttgaaatcttccttcaatgatccgtatgacatgtacctagttgtgagctttataagcgagacaagattcttggctatgaacatggaagatgagttagaagaaactgagatagaaggctttgatgcgcagactcagactttgttttgtcaaaatgccatcaatgatctgcttatacaggttactgctaattctgttcgtctggttagttgtacctctcgggagctagtggatcaatggaatgcaccagaaggattttcagtcaatgttgcatcagctaatgccagtcaggttctgctggcaacaggtggtggccatcttgtttacctcgaaattaaggattctaagctggttgaagtgaaacatatacagttagaacatgagatctcctgtgttgatttgaatccaattggggagaatccacagtatagctctctggctgctgttgggatgtggactgatataagtgttagaatactttcacttccagaccttgaattaatcaggaaggagaacttaggtggagaaattgttcctcggtctgttctgctttgtaccttggaaggggtttcatatttgctctgtgctcttggagatggtcatctgttcagttttctgttgaatgcaagtacgggtgaattaactgatagaaagaaggtttctcttggtacccaaccgataagccttcgtacattctcatcaaagggtacaacccacgtgtttgcttcatcggatagaccgactgttatttatagcagcaacaagaagttgctgtatagcaatgtcaatttgaaggaagtcaaccatatgtgtccttttaatacagctgctattcctgacagccttgcaattgctaaagaaggtgaactctcaattggaaccatcgatgacatccagaagcttcatatccgtacaatccccttgaatgaacaagcacgtcgcatttgccatcaggaacagtccaggacactagcgttctgcagcttcaagcacaaccagactagtatagaggaaagcgagacacattttgttcgtcttttggatcatcaaacttttgagttcctgtcaatttatcagcttgatcaatatgagcatggctgctccatcattagctgctcattctcagatgataataatgtttattattgtgtgggaacagcatatgttttaccagaggaaaatgaaccatcaaagggccggatccttgtatttgcagttgaagatggcagactgcaattaattgtagagaaagaaactaaaggagctgtctattcgctgaatgcattcaacggaaaattgttggcagctatcaaccagaagattcaactatataagtggatgctacgggaggacggttcacatgagctgcagtctgagtgtgggcatcatgggcacatattggctttgtacactcagactcgtggcgatttcattgtagttggagacttgatgaaatcaatatccttgctcgtgtacaagcacgaggaaagtgcgattgaagagcttgctagggattacaatgcaaactggatgagtgcagttgagatgcttgatgacgagatctatattggagcagagaataactacaacattttcactgtgcggaagaacagtgatgcagcgacagatgaagagaggggcaggctggaggttgttggagagtaccatcttggagagtttgtgaatagactccggcatggttcgctggtaatgcggcttccggactcagagatgggccagatcccgacggttatctttggcaccatcaacggggttattgggattattgcttcgcttccacatgagcagtatgtatttcttgagaagctccagtcgactctggtgaagttcataaagggcgtggggaacctgagccatgagcaatggcggtcgttccacaacgacaagaagacgtcggaggcccgcaatttcctggatggtgacctgatcgagtcattccttgatctaagcagaaacaagatggaggaggtggccaagggtatgggggtccccgttgaggagctatccaagagggtggaggagctgactagattgcactaggtctcgataatgatgatataattaatacgtagaagatgtttgctggaacttatttctgaaatgtatattttttttttctactccagtttattaagcatgtgttggtgggttgaatgttgatgccgctggtggcacaggaagaagcattcctgttaagaagagttactaagttacccatgtggttcggttgtagattttactctgttttgttggttggatggtccagtaattaacgtttgagctgccagttttaagatgtactcctagtagtattagaaattgttttcctctgttggttgtgattgttgtggtgggcacgctgtttgaacactttgtacaaggagttgtaaagcaggtccctcggcttgattcttgatgagtatagtagtattttgattggttg

SEQ ID NO: 14973 - DNA, 3044 bp, Oryza sativa
  ref <308>: DATABASE ACCESSION NUMBER: AK065509
  ref <309>: DATABASE ENTRY DATE: 2001-12-06
gagctaatccatatctgtccatctctcctctctcgccttgcacacgagcctcagcctgtgcgctccgagtcctccgacgccgccgcctcttcacgcccctcgccaccgctgctatcgctcctctccatccacgccaccttggcccacctccctccatgtgcccagtgagtgccctgcgggtccctctccttccacgcgccgacgagccgctatcccctcctcgtcgtcgctggatggggacgaggagctcggtgacggcgcgcgggattggggagcagctctccggcagcgatgagctccaacgatgccgccacctctcccttcaatcttgacggcggcatggcgacggggctcctcgagcggctgcggcgcagatccagcccacaccgctgcccaggggagggggtgcaccagcagcaccactagtactccctccgttctaaaatataacaatttttagcgtttagaatttgtcccaaaatatataacaatttatccaccaatattctcttctcaaccaatcacttttcccacctacattcactactcatccaaactttcttaataatcgtgtccaactctaaaactttttatatttttaaacggagggagtaatttatatattttttaaaacaatattatagtaaattataatttttttgcgtgttgttatcatcagcaataacagtggaatgcactaacaaagaagcagagataaaaaactgcactaaccataaccattcgatctggaaaaaaagatagctattatcgcgtaattgaaaagtgaaggagctattcaaatgaatccattgactggtaaagaattagcaaatagaacagaagatagaggaggcaaggaattgcctgtgcccagcctcggtgacatcccatcatcttgctgaggcgtcgattaattagtcatccaggattaattatggcattggcggtaagaggcgaggattaattgtggcattagcggcaagaggcgtcggcactggtagggacaaagaggaagagcgagtcgccagaaagaaaaaaaaagagaagaggcgtgcgcgtgcgtacgtcctcacgctgatgaggcaagcaggactgaactgggctcctatcgtggttatggttgtaggctgttcgtgcttcaatggcctgatttctagcgtgggggtacaccaagcttagctgagggggtgcacatatggttactaaggggtattaagcactaatttttcttttgcaaccgggtgcctaggaaccccataacactacttagcttcgtccctgccgctggcccctcctcctcgtcgttggatgggagcgaggaggtcggtggtggcgttcaggagaagggcattacagcgagctaaaaaggagatgatgatatagacgcaatatattttggtctatccgtgttcttcaaaccaggtatatgcatgtcacattttaatgcatgtgtagtggtttatttttaatgctaagagagtaacagatcaacacataatgtgtatatgccttctttgctgtataatctgtggatagtagttaaatgccaacagaatcgagaccatatcctaattatattctgttgtttatccatcttccttgacagttcttgcattgtatgtgtcagctcatgtgtgaagtgttgtggttacaaattagtttttgacttttatctctacttaaatttgccgttttacaatatcaggtttttactgagaggtgctgcacaagtgttatgttgttatgtactagaatctgttggaaatagtcccacattgctaatctaggggaagttgaaccaaacttaaaagtggagggagccctcacctcttgaggtagcttttgaggtgtagcaaggctttctcctggttgggccaacgtctcccggttttgggccaacaagtggtatcagaggcaaacccacaatttctagtgcttgtgcacactcagggtggtgtaagcccaaagcccagtggactgcgggtgtgagacctgtatgtgcccgtgtgtggggccggtcagtggaccgcgggtgtgagtcccatatgtgcgcgtgtgtggggccggtcagggctaaggggcgccaatgtgtgacgggggagataatgtgggacttattcccaacagaatctaatgtgtgttcagctggaatggtactttacattttgcttagtggagtgccgccatttctggaatatcaggtgttaaatttgaaatccaatatatttctggaattgctaaaggaatatttgatgcagttctgaagggtcacattgattttcaatcagttctaaagatatctgacagtgcaaaggatcttatagaaaaaaaaaagctctctcattgttcttcagagcgtttgaaggaccatgaagtgctaagtatatttgacatatttcttcacctaaatttgttggccctttgtttcattgcctgtctatatagctgagtagctctgcatttttgtcataacatatattgatgcataatttttattttcactaattatttaatatgcacaaaccttttgattttttgactgatatatatgttaatatcaggacatccttggatctgtgaaaaatggagttgccacttatcaagctctagataacagtgttatctcttggcccaaacaattctctgcaatgaacaagttaaaaaagttggctttgagagattttatggtcagaaagatcaactggagctggcactttatattctccgaaactctgtcaggctaaagtcaatgaagataaatccaaagcctataattgctgaatatcttggagaggtgagagaaagtgaaggatttttctttctgggatggctaccaggttgctcttaagtttctctgcaaagaggatcgctataatgttgttgatgttaaggaagttgggcttagtgttattgagagcacaccagatctctagctaaactggtccaatatgtatcaagttcctagcagaaaactcttgccagcaaagaaggcaagaaagaaaatgcatagacccttgaattttattgaatagttagtttatatg

SEQ ID NO: 14974 - DNA, 3656 bp, Oryza sativa
  ref <308>: DATABASE ACCESSION NUMBER: AK065510
  ref <309>: DATABASE ENTRY DATE: 2001-12-06
gattccactgtaatgggattgtttgtgtgcttcctgccttctcatagccatgaaacctcctttgctcactgctttggaaccatactacggcttctcccacttcactggagtatccatgccagctaagcgagttgtacaaggcaagcagtggatcatagagatgcaccagtaggtatatttttgcgatttttctactgttctagttttttgcgaattttttttttttaaacaccaccaacaaacccggtgtattttgatttttttttaagttggatcggaatgttgcatcgggtgtgttgatgatgtttcacttttttttcttcaagttcttgtggatctatttaatgtttcaaattatgaaatcttaatgttccctgtgtgagagtgaaatgtttaactatgattaaactgttttctataatatggtgaaacatcgctcatatttttactggtatcctcgattttattagagaacacagccggatgcttgcttgcagaacgtgtgccccgggtaagaggttatctgtatagaaaaatcagtcaattgactcctgctagtggacatactttgagatggacgaccatgattgtgatattggtgaccggggtgaaaagtttttacatgtcatattagatatacggacacacatttgaagtattaaacgtagtctaataacaaaacaaattacatattccgcctgtaaactgtgagacgaatttattaagcctacttaatccttcattagcaaatatttactgtagcaacacattgttaaatcatggcctaattagacttaaaagattcatctcgcgatttacacgcaatctgtataaatttttttatctatatgtaatactccatgcatgtgtcaagcattcgatatgacagcgtgaatagtttttacgtgggaattaaaccgggccaaattgaaaccatctcgttatgtcgacacgagcacggtcgccgtggtggagccgccggcgaacggcgccgacactttccaccactctgtcgtcgttgcttctcctactggcgacgacgacgaccaaattgtgccggagctgcagcgacggcgagcgtcacgccctcctacgccgcatccagccgctcatcggccctgagttctcctccagcggacggttggattgggacgaggccgtggactgctgccgctgggagggcgtcacatgcagcgtcgccggccgacgacgagaagcagcagctggtggccgccgtgtcgtgtcgctgtcgctccctggagtcggcatcgccggcgccgtggatgccgccgtgcttgcgccgttcacggcgcttgagaagctcgacctgtccggcaatcaaatcactagcttttcagctgctaatcgctcagacatggttgtcggtgctgttctcaacaacttaaccgcacttacggagctgcacctagccgggaatgagatcaccaccacaggctggatttccaatttgacgtccctgcaggttattgacatgtccagcaataaagtacatgagctcaacggtatttgtggcctccatcaactaaaatatctaagccttggttttaacatgatacaaggagtaattaatccatgcttggggaaattgcagtacctggtatacttggacatgggatcaaattttctcacaggtgagattggacaatatttactaagcaacttaacccaagtagaagaagtacatcttggggacaacaatcttactggcacatttgacttctcgtctttggctaacaactctgagctccacagcatcgtcctctcgaacaactgcaaactagaaatcgaaacggagcttgtaaggtggacaccgttgttccagctcgaatacttgaatctaagcaatagtattgtcaacaagagaagcaacgggatcatcccaacttttctgtcagccaagtgagcctctctgggattgatctctccatatgttcactccaggggaggatcccatcttggatgttgttgtataacgtttctttaggtttcctcttgctgcgcggtaatagcatggatttcctcgacactggcaatctcggagccaacgttacgtcatcaatggaggtgcttgatctgtctgacaacaggatatcaatgaaaatgccatacaactttggaagtctatttccatatctaaagtaccttgacatgtcttccaacatgctgaatggcggagttccatcactagcagaagccgcgtcatcgttgcagtttcttgacttgtcatttaacatgctcaatggggagatatcgccggaattaatagggaatgcatccattttgacatcccttctgctctcacacaatgacctaactgggcctatgccacccttccattggagcctagggcagttgactcacctgagcgttgaaaacaaccaactatctggtcgtttgccgcctctacttacgaactgcaccaaccttgagaatctcaatgtgaggaataaccgtttatctggtgtaatcccagtaggcctcctcagctttgagaagcttggtgctctcctccttggaggaaaccagtttcatggtgtcattccttgggatatttgcctcaacaaccatatccacttcatagatctttccaataattggttctctggtgagatacaggttgcttatacagtgttttctggtcagagctgccaatgaactctgaggatgacccatttggcaacatcacacagagaagacagacatatgtcgaattcacgacgaaaggggagagcttgacatacatgggaatgcctttagagctcatgataggcatagatttgtcgatgaatcggctatctggacccatccctagctctgttgggttcttgctgcagctcaaatcgctcaacctatcacacaacaagcttgttggttcgatacctgacacgttcatgtacctgcatgaaatggagagcatggatctctcacacaaccatctcaatgggagtgtcccagtggagctagccaacctctccttcctgagcttcttcagtgttgcatacaacaatctctccggtgagattccctttgaatcacagttttgtacgttgaacggaacggcattcgaagggaatgagaacctctgtggagaaattgttgacaagatttgtccaatgaactcgaactgctcacatgatagcgatgatgagatgcatcagttgttgtcaacggataccatggacacgccgctgatctactggtccttcgttgctgggtccttcgccattggcttttggggcatcattgcattacttatatggaatacagccttcaggagcaggctctgcagcttcatggatggatgcatgtctaagatgggctggtttcttgtgccttgatttaaagccacttgtgccctcaactacaatatcaatcaatttttgctctgtttctattccaatacagtattccgcattaaacagatttttgtaagaggagttgaatttacagaattccttttgatggaaaagctagtaactccttattcactcaacattggaaactggttgttttgaagtccaaaaactgctgacaaaattttacggtactggagaggtaccaaaggtaccaaaatttaaaagttttggtatctcctgctacctgtcaaattagcatataaattgaataacagactg

SEQ ID NO: 14975 - DNA, 3393 bp, Oryza sativa
  ref <308>: DATABASE ACCESSION NUMBER: AK065511
  ref <309>: DATABASE ENTRY DATE: 2001-12-06
tgacagatacggcgcagatacgtacagggagggagctcccacacgaatcgcccctctccttccaccgccgccgcctcctcctcctcctcctccaagcaaactcccaaacccaactccgcctgccccccccctccctccaaacccatgggagcgcggcctctctagggtcctcctcctccgccgccgccgccgccgccatgttcgaggatttggtgagcaaggtgctcccggccctcctcggccgctacgtcagcttccagaaggaccagctcaccattaacatctggaatcaggaaataatattggtagatgtagagctgattctggaagccttcgactacctgcagttgccattcgcattgaagaaaggacggattggcaaactaagcgtcaggattccatggaaaacacttgggtggggtgccataattattgccatagaagacgtgtttatctgtgcatgtccacgggaggactctgagtggagttcagattctctggataagagagagttagatggaaaattggctaaacttaaagctattgagcttgctaagatttccagaggaattacagataaccaaacggggcaatcacttttatcctacatattagcaaagatactggacaacatccaagtttctatacgaaatgttcatatcacctatgctgataactacaaagatcagggaaatttcatgtttggtttggaattctccagtctctcgatacaaacggatccgaagaaacaaagttttgccatgtctttgatggtcatgtcaagacaagatgaagtaaacaagacagtagagatatccaatgttggcatttactgtcatcacttggatgaacagcagggttcatgtgatactggtggtcttactgaaactaatttcagtttcagtcatgaattggcccatccaagagatgcttatcttctaaatccatttaacgtgactatatttgtgcttgctaacaaagctggaaagcttgatggtgcacctcggtataacataactgtagagctaactgctctgatcctatcgattgatgaaatccagattcaacaaatcttgaatctttgtgattacttctccatctgtgctttgcgaacaaagtatggccgttatcgtccctctcaaagttctttatctaagagacataaaggttggcagaggatgtggtggcactatgctcagagatccgttttagcagatgttcgcagagaactgaggaaaacttcatggaattacttggggcaacgactggactgccgtcggaaatatgtcaatttttacagaatgaaattggagcttttgcagaaaggacagcttgttagtgaagacattctacaagagctggaaaatatggacagagaaggcgatatagatgatatacttaactacagaactattgcagagcagaaattacaggaagcattggtgaaatctaccaaagataatttttctagtccaggaagtcctcgaattgatgatcagtcagctggggcaggccaaggatggttaaagtggctttctcgtggaatgcttggtgctggtggaacagctgataccagctcatttgctgatgtttcagatgacattattaaggatatatacgagggaacggaattccatcctatttcttctgctgaaaatcatttgacaaaagaaaaccactattctttatttgttaggttatctttttctgagatccttgtaagcatcacctccaggcaagtgttgcatacctatatcaccggtacttccacgttatactgttgcagacattccattaccaattataataaattttaggtcagcgctgctaatttgctaaatattgcagaagcaacaagctaagtagttagtttttgggccacatttagtaaagtaatttctattatgaatttgaaatgcagttgcttacctagctgagtaaaacaagagtagcccaaaagggccctgtgtgatgagcgctccctgagctcattttgttgtaaacaatcacaataacagcttcaaccttcatgaaacaattaaatgttagtatttattagattctgtttggatggtggtaactcctgataaactgctgtccatcctaacgacttaaccccccatgtaccatactcacaagcaccaagaacaccatttttccttgaacttaactaaaacttttagagtctacagaagttcttatctctgtagtttcttgaaagtctttccttgttatacttgctgttttgtcagatgggtgtctattggtgtggtgggcttgtggcagttaaaaaacctgtagctcctacttcctatagtttggttatttgctactgatgatcaagagttttatttcctatttgttatgcaatgaaccttatatgacaatgggccgatggtccaaagtatttataacagagctacagacaaaaatacgcataaataccctatgctagaagataaatgcagagctatatgcatatgtgtgacactgtttacttggtttcatttatctggggaaacatttattgttggttaacttcgcaaaatgttttatggtttaggaaaattggcatgaaacttgtagatgcaatgttcactgggcttggtgttgaatgtaaaatatgggatgattcaacaactatccttgcctgtcttgattcacttgagatcatcaacccattaaatgaaaataaagtcttgctggctgaaaagcactggtgatggtctggggacacctgttatcagtgttcaagttgactgtcctaagtcaaaccatagcccagaagctttgacacgggttgttgtccaggaattcagtgccatatatgaaccagtgttcatctataatctcatgcacatctatgatttgttttcctccttccagtttcagcatgatagggtgagtgttctattgtacacccatgttctattgcttgggaggataaacataaacatattgatgcattatgcatattatgtgcttccccctgcactaacgttatctcattttgtaatgagtaaattgcattcacagtgcatcaacttgtcaggtgggtgcaatttggtgcaataacttgaaaaatgagcgttctagtgcaacaacttggcatgtatgtgcaatttaatatgagaactttatcagtgatcgtataaattcaacaacttgcaaggtaggtacggttttgatacaataaattaaaaggttatgcaacaacttaattatttggagcattttttttatataaattcaatttttaagtactacttttgacaatatactagcacggatgtgtataagtatgtttatatttttatgctaataactgataactgaaagccaattaaattggatgtagaaattattatatttcgattgatatttgagaagatg

SEQ ID NO: 14976 - DNA, 2505 bp, Oryza sativa
  ref <308>: DATABASE ACCESSION NUMBER: AK065512
  ref <309>: DATABASE ENTRY DATE: 2001-12-06
gctcgttatttacgactcttgccactctccgccgccccaccaaaccccaccggcgacctcaccggagatgacctcctcctccaccgccgccgccgccattcaatccgcctcgtcctccaccctctccccgcacgcggctcccttcgccctccccgtccgcccggcccgcgcccctctccaagatggtgatgtttctaggtcgatggatggtagcattgtggtgcatggattagataataaaattttaggagatgctcatccatcatcgtcgtcagcaacatcttgctttcgaacacaatcatttgacacagttttaccagcctccacatgtggagcgaacgcaagtcagccgagggaatggccagaaattggcagcgatgcagcttatccatcctcgatttgttctacttctgtggtattttcatatccttcagtcatgatggcctccaatcataaccagaaaaatcccttgtaccctgggatgggaagtaatggaagcagatgttcaacagtcaagatagaaagcccaccaaataaaatatctgaagccaataaaatcagttgtggtttaacgagcaagtcatctatgacaaaagatgttagtaaatccaacgaagatgctgtgaaaaatgccccctttccacaaattttggaagttggtatggagatctgctccaaagaggcaagccctgtctcccatacgaggcctcttcatatttcaactgctggctctgatccatgcgattctatggctgatggtgtgaaaacagaaccatcagaatgctatgtggattcaccatgttggagaggaagaggaacttcactttctcatcaaacgtcagtgacacagttaataaatcaagaatcagaggcttttgatgctggccaaaagaagagcactagcactgttcagcattgtgaggttctgaccgcatctcaaaatttggacactatcgagaataagcaaaaccaatcccaatctcatgttgaattgtctgtgtctatgaaatctggagacaatggtaaaaaagaggaagaagtttcccacaataaggagcttgagagtgcaaaacaatgtgcagcaaaatgcaccgcagagcagaaacacagtttggagctgagagataatagcgtgaagcgatctggtctaaactttgctgctcctgattttatcccttcatcagttgggaaatcaaaaattgtcaaagggtcctgttccacgacaggaaggaacacttctggaattctcaaggcaatggggaatttgtcagaaatgcttcgcgatagctgtttgttggatgaaaatgagctcgatgagcatgagcacactctcctccaatcagtaattgagaatcttcagacatgtattgataggaaaaaaaagggtcccattaatgatgatggctctaacaaggcaggactaagggctcctcattctcagtccgccgttttaaaatcttatgcaggggactacagaggtagttgtacaaccaatggtggaaatggcataactgtaaataaatctgtgggtcctactcgtgtgctcagtgattttgggaagaacagcttgacatggtcccagccttcattcaacaatattccaaggatgatatcctgtgaagaagaccactcacagattctcatttataagaatctgtggattgatgctgagcgtacaaattgtgagttgaagtatctactgaaacagaaccgtatcaaaattggccaagaatccagtatggctcatattggtggtccaagaaatccttctttccaggcatgtgatttaggtgcaggtccaagtaattcttatggagctgccatatcttacccaccaactctgagttttcctaagggtgattctactgaagagacatcaagagcaaggaacactgacctcctttacactggtgattgcatccggttaggagataacagtgtgcctagctgctctgcaagcaccatcagccatcctactcgaccgaataattttcagggtgaccttttaacaggcttggaggaaactggcttgcatcatcatgctcagccagtaccgcaactcgcaccgagcagagttcacagggaaccgagaataagcactatggatgaagcgtcaggccactcatgcttcaccggagcagacggcattttgagtggcaattctgaatatggcttgtcatcagattgggagcatgttctgaaggaagaaatcggctggagctgaagggatctgccagccagattgctacttaatttgtacatatatatatgcttgagtaattagagatgcaggaattctgctcatgggtttattttgagtttttttgtctgataaggctgaggatagcaggcactgcttggcaaaatggtgctttccagcctctgaaaaaacagcaccacttttatgtatgcatgtctaattagcttcttatgaacaattgtataagaactcctaagtcctaacctagctgcacattttggccatggcagtgccaaattgtcacc

SEQ ID NO: 14977 - DNA, 2130 bp, Oryza sativa
  ref <308>: DATABASE ACCESSION NUMBER: AK065513
  ref <309>: DATABASE ENTRY DATE: 2001-12-06
gagagaatttatttttttttttcagttttttcccccacccacaccacaagcagacgaagaagaagaacaaggttcgtccgtcgagatgttggaggagctgctcatcttcacgcgcggcggcctcatcctctggtcgtcatgccgggcgctcggcggcgccgccctcaagggctcgcccatcgacgccagcttctcccaggacacctatgcgcttaagtggacctttaacaatgacctcggcctcgtgttcgtcgccgtttaccagcgcatgctccacctcctttacgtcgacgacctcctcgccgccgtccgtaaggagttctcacagatttatgatcccaagcgcacctcctatgatgacgccttcaatgaggtttttcgccagctccacctcgaggctgaggctcgcagtgaggagatgaagaagaataaacaggtcactggttcccggcccaccaaggttaccactaagaccaatcgtggcgacactcagggctctggtggtggtaggaagaaaggtgactcggggaaggacgactctgatggtgactccgggaaggagcacactttgccaaatggtaattccaagatgcaagagaatagcctcaaggacaattctcatgcccgcagtgttgttggttaaaggaaaggagaacggagaccccaacgatggggcctttgatgtaaataagttacagaagatgagaaacaagggtaacaagaagaatgaggttgctagtaatgtggccaagaacacctctaaggctaacacaaagaagaatttgaagaaaatagggtttgggatgacacacctgatgacaagaagaagctggatttcacagacccagctgatgagagaggggatgaggtgatagaccaggtggttgtcaagcagggggaaagcatgatggataaggatgatgtcgtgagcagtgatagtgatgaagaagaggaagatggagaggaaaattctggagcttcccaaaagaagaaaggatggttctcctcgatgttcaagagcattgcaggtaacaatgtgcttgagaagtctgacatccaacctgcactcaaagcgcttaaagataggctgatgactaagaatgtggctgaagaaattgcagagaaactttgtgaatcagtggcagctagccttgagggcaaaaagctgggatccttcacaaggatatcctctactgttcagacagctatggaggaggctcttcttcgcatcttaaccccaaggcgatctattgacatattaagggatgtacatgctgccaaagagcgtgggaagccatatgttattgtttttgttggagtgaatggagttggcaaatctaccaatcttgcaaaggttgcttattggcttcttcagcataacctcagtgtaagcctggcagcatgtgacacctttagatctggtgctgttgagcaactgcgtactcatgctcgcaggcttcagatacctatatttgagaagggatatgaaaaagatccagcggttgtcgcaaaggaggctattcaggaagctactcgtaataagtcagatgttgttcttgtcgacactgctggacgtatgcaggataatgagccactcatgagagcactctccaagctcatcaatctcaatagcccagatctagttttatttgttggggaagcattggttggtaatgatgctgttgatcaactcactaaatttaaccagaaattagcagacctttccgctgtccctactaccagattgatagatggcatcctgctcaccaagtttgacaccatcgacgacaaggttggagctgcactttcaatggtttatatatctggagctccagtcatgttcgttggctgtggtcagtcttacactgacctcaagaagctcaatgtcaaatccatcgttaaaaccctgctgaagtgaatgtggtgcgccgttgtgcggcacctcgaattcgtactgccagtattgctatcgtcgaaacccccatgacctcgtcgtcatcgtgttggatgtgttctgtcctggtttactgttgtagtagcacaaactatcgtgcgctttttcagttatgtgactgctttgtatcacaggttttacctgttttaccctggaatatatacttactagtggtt

SEQ ID NO: 14978 - DNA, 2088 bp, Oryza sativa
  ref <308>: DATABASE ACCESSION NUMBER: AK065514
  ref <309>: DATABASE ENTRY DATE: 2001-12-06
gggaggcctccagtttgcttcatcgccattggagaggagagctcatcgggtgcggagaaggggagatcgatggcgacgtgctcccgcccactcttcgtccccgcttccgccgccgccgcctcgccgtcgccggccgcaagccgtcggggcgctcctctcgtacgcctgcacgcggtggcaattgtctcgatatgggaacctcgtcgtcatctgcgtgctcacatgagcctctgctgtaaggcaacgaggaggtccagtggtggtttaactactggacatcctatctccgcattgccgcgggcaataaagagaatactgtcaagctatccttccctgctcaccagcctgggtggtaatcttgctcgaggctacaaggcagccaagcccttcctgtcaattggctttggccgtgtggttttggggatggtgctcgtcatgtctgtatctgcagccacctatacagcaccttcatcattggcactcacggaggaaaatttgctttttctggaggcttggcgtgcagttgatcgtgcatattacgacaaatctttcaatgggcagagttggtttagataccgtgaaaatgctctccgcaatgaaccaatgaatacacgggaagaaacatatgctgcaataaagaaaatgctttcaacattggatgacccattcactcgtttcttggaacccgagaaattcaagagtttgcgggaagcctggctcgcaaggaacactcacaggtgtaggtttatcaattagctacccaatggcgctaaatggatctccttcagggctttctgttatgtcagcaaccccaggaggtcctgcagaaaattctggtattcttcctggagatgtaatattggcaattgacaacagaagcacggaagatatggatatatatgatgcagcacaacgcttacagggtcctgaaggaagctcagtggatttggatattcgtagtgggtccaataccaggcatgttgttctgaagtaagttccttcccatgatccccttgtagatcttgaaagcaaacagttacttttacttcattggtcattgcattgtttgatttatcataggcgacaaactgtcactttaaatccggtaaggtcgaggatgtgtgagattccaggtgcaaaagacaattcaaaggttggttacattaaattgacaactttcaaccaaaacgccgcaggttagtgactttgagtggttctaatgcctttataaaacaccatatatttccagatgttatgtcctgctgatcatattaattgattgtcttctcccaggatctgttaaggaagcacttcagaaattaagggagaacaatgtgaagtcttttgtgttggatctgcggaataacagcggtggcctttttcctgaaggaatcgaaattgcaaagatttggatggacaagggtgttattgtatacatatgtgatagccagggtgttcgtgacatttacgaggcagatggaattagtacggttgctgcatcggaacctttggtcgtgctggtaaataaagggaccgcaagcgcaagtgagatccttgctggagcactgaaagacaataaaagggcagtgatatatggggaaccaacatacggcaaagggaagatccaatcggtgtttgcgttatctgatggctctggcttagctgtgaccgttgcgcgctatgaaactcccgcgcatactgacatagacaaggtcggcgtgatcccggaccgcccgctgccggcgtcattccccacggatgaagacggcttctgcagctgcctcagggactccaactctgcctgcaatcttaacgctgctcagctgttcacaagatgacgacgccagggctagagaaaggctcaatttggccaaaaaaaattttcgcagtttggactgaccgagttccatcaaaccatgttaattgtttatttgttttgtttaacgtttatctagaatcccaattgtagcttcctggtggaatcatgcagttaaatgtcactgtaaatcatgtttaactgtaaatcattttttcccccgcttaacacttgggaacacagatacactgggaattttacagtattgatcg

SEQ ID NO: 14979 - DNA, 1466 bp, Oryza sativa
  ref <308>: DATABASE ACCESSION NUMBER: AK065515
  ref <309>: DATABASE ENTRY DATE: 2001-12-06
ggtaacacttctccctgtgtactgcactgcacactctaggcggctgaagcgaacgacaccggcgtcaagagtatcaagcacggccatggcggcggcgaacggcgatgccagccatggcgccaacggcggcattcagattcagtccaaggagatgaagacggccatccacagcaacgatagccccaagaccctcctcaagagtgaatccctccacgagtacatgctgaacacgatggtgtacccgcgggagaacgagttcatgcgcgagctccgcctcatcaccagcgagcacacctagtactatttgtctcctaatttatactctctctccattccaaaaaaaaaaaactaattctaagtttaaatctggacacactcctaggttttgaacctagacacatatatgttcagattcaaatctaagattaggttttttttatggaggtagtacatgctaaattcagcgtgattaattagaagctgatgatatgatgctgtgttgtgtaacatttttgttggattcgatcagtgggttcatgtcgtcgccgccggaggaagggcagctgctgtcgctgctgctgaacctgacaggcgccaagaacaccatcgaggtgggcgtgttcaccggctgctccgtgctcgccaccgcgctcgccatcccggacgacggcaaggtcgtcgccatcgacgtcagccgggagtacttcgacctcggcctccccgtcatcaagaaggccggcgtcgcccacaaggtcgacttccgcgagggcgccgccatgcccatcctcgacaacctcctcgccaacgaggagaacgaggggaagttcgacttcgcgttcgtggacgccgacaaggggaactacggcgagtaccacgagcggctgctgcggctggtgcgcgccggcggcgtgctggcctacgacaacacgctctggggcgggtccgtggcgctggaggacgactccgtgctggaggagttcgaccaggacatccgccgctccatcgtggccttcaacgccaagatcgccggcgacccgcgcgtggaggccgtgcagctcccggtctccgacggcatcaccctctgccgccgcctcgtttgagatcggcgcaagccgtgtgcgaagcactgatctcggggagactgaagtggggctggatttgggctttgaatggaccccccaaatgggcctgaactgtagtataaataagcagctgcactgcaattatatcgtagcctttgtatgtttttcatgcaggtttgtgtctgagaacaaaaattaaattctagagtgatgttttatcttgggttatctgcattggcaaaaacggcattagcaactgttcaagtactttgtgcatgacggaaagacggtacgtacaatttcatctactctctccatccaaaaaaacaaactatgtaaaaatgtgataccaccaaaaataataaatctggacaatcttatatt

SEQ ID NO: 14980 - DNA, 1668 bp, Oryza sativa
  ref <308>: DATABASE ACCESSION NUMBER: AK065516
  ref <309>: DATABASE ENTRY DATE: 2001-12-06
ggagttatccgttagttcgcccgccgccgccgccgccgatccccatccatcccgcgaggcgcgagcgagcagggcgccgtcggcgccgtcgttcgtcatgctgcttccgccgcatccaggcagaacattaccagcctatcatggagacaacagatttcttcttggagcttgtttcctgagtaaactgcctatgctgcgcccaatgaagttgtctttggtatgcagtgctaatcccaacaaccataggtcaagaagttcggatatcacacgccatcagaagggtggatcagctcggaggaaaagtaagccttaccaggagaaagatgactctgagaatattgatgaattcgatactgatattatgtcctccaaaaatggaccacccatctctttgacaagcaattcccgtcctcaagcaacatcagtcccaggggaaagagagaaggagatagtagagttgtttaaaagggttcaagcacaattgcgagcaaggggaaaagggaaggaggagaagaagcctgaacaagcaaaagcacagggtgagaggggcagtgttgactcccttctaaatctgcttaggaagcactcagtggaccaacgaaggaagagcggtgatgagaaagaacagagtgttgaccaaacaaagagaagcaatgaatctggaaataaacaaaattcaagcatcttcataaagaatgacactcaggaagaacagaaaaagccacatcctgcagccttcaaaaggccagcttcaaattttaggcgaagatcccctgttcctaatgtaaagttccagcctgttaccaatgttgatgccgaacgagtcatcaataacatcaatgatgccgtacaagaggctaagccaactttggaaaataaggctgctacagatgaaccagactcggtttctacattcgaacctaattctgtaatagaaccagaaaacctatctttggatgaccttgatcatatttcagatgatgaacctgatgcttctgatactgatgaacccagtggagaatatgatgagccatctttgcaaatcccaagtgttccaattattgatgaatctcatgatacgactctgaaatcttccttaggaggtcctgatttaagcactttgaaggtcacagaactaagagaacttgcgaaatctcgaggaatcaaaggatattccaagatgaagaagaatgacctggttgaactgctgagcaacatggcttgatccatcagcagccctgtcaacttggctctgttttgtcccttgttagtcacattgtcttgggcatatgcactatcttgccattcctatcttatctagatgaagttcttttaggtagaaaactgtaaatgagcaaggtaaacaatgttctgttctggttttatcgttgccctttctgttacctagcctctagttaccattgtttttgcgtaaatccttcatcagaattgaaccctggattggccataagactggcaacgattcgacgtcatgctgattatgttctgatgtgtagtgttctattcttatctctgttgtttctcctttctcatggcagctcttgtctgctgttgcatggtttctctcgtttacatccatggttgttactgaacgtttgatgcacaagtcttttgtgtgttcatgaaaagaataagcagaagcaacct

SEQ ID NO: 14981 - DNA, 2340 bp, Oryza sativa
  misc_feature (1281)..(1281): "n"=any one base of a, t, c, or g
  ref <308>: DATABASE ACCESSION NUMBER: AK065517
  ref <309>: DATABASE ENTRY DATE: 2001-12-06
gactagcactatgctcctcctcctcaattcttcccttccctttgctaccctatcctacccttcgatctgattcattcgccgccgccgaatcccggccgccggcggtagctgctccgacttttcttccttctctcgactccactgggtctggatatagataagagtcttccttgtttctttgctgtgaccagttaaatccaagtcttcatcttccccctcgattcccttttctgcttctcggggtttggtggtgttctagcaggcagttcgttccccacaaaattctaagctcacccttgctttcttctcccccttgttcttgactaggattttcttttcatttccgtaaggaaaaggagatcacgagttagcaatcttgtgctcgcgttaatttcattcgatttgtggattccgaagatgatatctctgtgaattcgaaagggtcaagaagattgtttatcagtatcgatggcatcttttcctcttttccctgctctcctcctccttctgtgctcttcctccctggctttggactccgtctccgagccaaccctctcatggacctgcggagacgaccaagttgccatcttggacacatccgatggcggccgcaacctgtccgtcaatggggaattggttcaggatcgtgttcttggctgccagaagctccggtcgtactacgtgagccgctgcctccgctgcggccagcagtcagaggcatggaggggcgcctggaagcactactgccgtgaagggagtgaatcaagcaacgcacaaaatataccaaggaagcttttaaggcagccctcaatgaatgatgcaaaaattgaagatgacccatgtaaaaacatgggaattcatggacataatcaggatgataatgattctttggaagggcaggatcatctactagctgtgccaggtgtgattctcctatgctgtggtctgatgataccgtgctttcatgctgagaaaaaggaagtcagcaggcataacactacatccattcagcgcaatgcagtcgaatcgattgcatccttggatgtaagcacgtcatctgagaaggttccaccaactccacaccgaatacccccaagtccatctagattcgcacaatctccacaaattgctcgagttggatctgtgaacttaactgtgcagcagattctgagggctactcagaatttctcaccttcatttaagttaggtgaaaggaggatttgggacagtctacagagctgtattgccagatggccaggtggttgcagtaaagagagccanaaaggatcaattcgcaggtcccagagatgagtttagcaatgaagtagaattgcttgctaagattgaccaccggaatttggtgaggttgctgggatttactgataagggacatgaacgtatcattatcactgagtatgttccaaatggcactctgagggagcatcttgatggccaatatggaagaaccctggattttaatcagcgtctcgaaatcgcaattgatgttgcacatgcactgacttatcttcatctatatgctgagaagacaataattcatcgggatgtgaagtcatcaaacatcctgctgacagagggctaccgggccaaggtgtctgactttggatttgcaagaagtggccccagtgacacagaaaagacacacatctcaacaaaagtaaaaggaaccgctggctaccttgatcctgagtatctgagaacataccagttgactcctaagagcgacgtcttctcctttggcatactgcttgtggaaattctctctgctcgccgaccggtagaactgaagcgggctgctgaagagagaataactatcagatggacattcaagaaattcaatgaagggaacaggagggagatattggatccgttgttggaggatcctgtggacgatgaggtgctcgaaaggctgctgaacttggcattccagtgtgccgctccgacgcgggaggaccgtccgaccatgaaagaagttggagagcagctgtgggagatcaggaaggagtatggaaagagtgtcaggagggtgtgaacattaaagttagctctttaggcttttgatcttcagacatgcatattctttgtgccattgtatacgcatgtggtgatatgatgtttctgctgagttgcttccaaatgtgctacttattgaacaatgtacagagaggggtaacaccagccgcactttgtatgtatctttctacttttggaattacatgactggtgttgcgggtttatttctccatggagctactgttcttttagtgagactagcaatactgcatgtacaattcacgttttattctatatatgttgtttcat

SEQ ID NO: 14982 - DNA, 1238 bp, Oryza sativa
  ref <308>: DATABASE ACCESSION NUMBER: AK098932
  ref <309>: DATABASE ENTRY DATE: 2002-08-28
gggttgccgtgccgtctcgtactctctcgtgcaggctaacgttggaatcttgggaggggagatggcggtcgtggcatcgaggtgtacggggctgctcctccccgacctcggcgcgagcctcgccggcttccgccgccgccgctcgacgccggcttcttctctcagcttccgcccgcggcgggcccgtcgacggctcgggtccctctcctgcatcgcgccgcccgattcggcggagccgcagacggatgagccggccgccaaagatgactcgactgaagataaggctgaggcaagtagtgcatcccaggatgctggaaatccaacttttcccaataaagatctcagcagaaggatagcactggcctccactattggagctgtgggcctctttgcatatcaaagactcgactttggaggcgtttctctcaaagatcttgcagcaaatgctacaccgtatgaagaggctctctcaaatggcaagcccactgtagttgaattttatgcagactggtgtgaagtttgtcgagaattagcaccagatgtctacaaagttgagcaacagtacaaggaccgtgtcaactttgtcatgctaaatgttgacaacacaaagtgggaacaagagcttgacgagtttggagtagaaggcattcctcattttgcctttctggacaaggagggaaatgaggaaggcaatgttgttgggagacttccaaaacaatattttcttgataatgtggttgctcttgcttccggtgagcccactgtacctcatgcacgggttgttggccaattctcgagtgcagaatcccgaaaagttcatcaagttgctgatccaagaagccatggctaacaatagcttgtggtgatcaattttagtggtaatgctaagacctattgacaagaggcgatatggtctgcatgctcagtcctggaaccaagcattagcgcgtggacattggtactgagctgttccaactcccttaacgtatatgattttgctggtagaaccaggcattcggctacagcattgatatgttggtgatatttgaatcggtgcatgtctgcatacatatttgcataatgaaaatgcagacatgtgttgcagccgcaagcatgcccatgttagtaaactgtttaccaatcaccactagtttctacttagaattgcaatagaatgtttatatacaggagcttactaaaatttgtgtgatatatatatgcttctgctactcttgggg

SEQ ID NO: 14983 - DNA, 2353 bp, Oryza sativa
  ref <308>: DATABASE ACCESSION NUMBER: AK065518
  ref <309>: DATABASE ENTRY DATE: 2001-12-06
gtccttcgcttcaccacctcgccaaaaccgccttcccttcccttctcttcccttccaacctctcgttgcggtttgcgctagaaaaaaaagagaggagagatttcaagaaaccgtgggggagaaagaagcaggcaagaagtagcagcagcagcgagtgaggctaatctgtttgagcttgggattgtcaccttttcatggacgggaccaacaaccatggagcactgatggacgattggatgcttccctcacccagtccaagaacactcatgtcgagtttcttgaacgaagaattcagctccggtcccttttcagacattttctgtgataatggcagtaacaaacatcaggatggacttgggaagagcaaagctttcatcgattcaagccgggaagaaactgctcagctagcaaaaaagtttgaatcaaacctttttggtgccaaccagaaatcaagctcaaatggctgtctgtcagagaggatggctgcaaggacaggttttggtgtcctgaaaattgatacatctcgtgtcggttattctacaccgattcggtctccggtgacgatcccgcccggtgtgagtccaagggaacttcttgagtcgccggtttttcttccgaacgccattgcacaaccttctcctaccactggcaaactgccatttttgatgcatagtaatgttaaaccatcgatccctaaaaaaactgaagatgaaacacgccatgatcgtgtattcttctttcaacccattttgggatctaagccaccaacttgtccagttgcagagaagggtttcagtgttaatcatcaaaaccagccttcagtgacggataatcaccaggagctcagtcttcagtctagctcaactgcagccaaggatttcacttcagcaactattgttaaacctaagacatctgattccatgttagacaatgatgatcacccttcccctgcaaatgatcaagaagagaatgcaacaaacaaaaatgaagagtattcttcagacctgatcattacccctgctgaggatggatataactggaggaaatatggacagaagcaagttaagaacagtgagcatcccagaagctactacaaatgcactttcacgaattgcgctgtcaagaaggtggagcgttctcaagatggccaaataacagagatagtctacaaaggttctcacaatcaccctttgccgccttccaaccgccgaccaaatgttcctttctcacacttcaatgatctgagagatgatcactctgagaaatttggttccaagtctggtcaggccacagcaacttcatgggagaatgccgcaaatggacacctccaagatgtcggtagtgaagttctgacaaaactgtctgcttctcttacgacaacagaacatgctgaaaaatctgttatggacaaacaagaagctgtggatatctcatcgacgctctccaatgaagaggatgatagggtaacgcatcgtgccccgctttctctgggctttgatgcgaacgatgactatgttgaacacaagagaagaaagatggatgtttatgccgctactagcactagcaccaacgccatcgacataggagctgtggcgtcaagagctatccgggagcctcgcgttgttgttcagaccacaagtgaggttgacatccttgatgatggttaccgttggcgcaagtatgggcagaaagttgtcaaaggaaacccaaatccaaggagctactacaagtgcactcatccgggttgctcggtgcgcaagcatgtggagcgatcatcgcatgatctgaaatccgtcatcacgacgtatgaaggaaagcacaaccatgaagttccagctgccaggaacagtggccacccaagctcaggctcagccgctgcaccacaggctaccaatggtcttcttcaccggagacctgaaccggcacaaggtggtggtggtggtagccttgctcagtttggctatggctcagctggtcacagaccagcagagcagtttggtgcagcagcagctggtttctcctttggaatgctgcctcgtagcattgcaactccggcgccgtctccggcgatcgccgtgccggcgatgcaggggtacccagggcttgtgctgccgagaggtgagatgaaggtgaacttgctgccacagtctgggaatgctggtgcagcagctagccagcagctgatgggcaggttgccaaagcagcatcctcagatgtaaaaatggcaggaacatgagacaaatggtgtttgctgcttatgtatatgaaacatttttggtgcttttgttaggagaatggagtgttattgtagctcaatttactttcgggggaaaaaaaagcagatagttcaggc

SEQ ID NO: 14984 - DNA, 3146 bp, Oryza sativa
  ref <308>: DATABASE ACCESSION NUMBER: AK065519
  ref <309>: DATABASE ENTRY DATE: 2001-12-06
ggcggaaaggtccctaccgtttttgcaaatcatcccgccgccgccgcctccggtcggtcgccgggatgcagcgcgggcggcggcggcggcggaggcggaggcggaggtgaggttttcgccattggccgccccagaatttcaatagagcgctggaacaagaggaaatcggcgtaaaaaaatatcagaggaaaacatagagaggaaggtggtttgacggaggtgtgcgtggcctgggattctcgtcggaggccaccggattcgaggtttgctccggtcactcgcagccgcgcgccccggtgagtcgacacctttagagctttggatctggctgtgtgcatgcatcgggattttgcaactaatctggtgatagtatcgatagatagcttgtgtacagtttcgtgcgagatctacaactaatctgattggcaatgttcatcttctttggctacgatcatgctggtcattatggtttaatctgcttgaactaatccctctagaaagtatacaattgagtcaggatttgtcagtttttttttctattggcaatgttcatcttcttcggctggatagtagtatggtatagtagccacttttgcttaattaaatgatttaaacccatcattccattagtccttcgctcttgataaggcggcgagaacaacttagtgagttgccacttactatgttacaaggaatttacctggggggtaaacactgtcaacctcactacaaatggtactgtttgtaagcacattgaaaatatcttcctcttggaaggctgagcacaaactattttacacctgaatgcatgtaaattcatgtctatttcaaaggaaagaaaggaacatagctgttaaatcatatctaattacctcttcgtaaaggaaggaattacagctttgacaattgacctcatacatcaaaaggctgtgatctattcaccaattgtccaattctcacaactactgcaagctactagctccatttcatattataagtcattttgactttttttcatgttatattcatgtcaaactggtatatgtctctacaccatctctatatagaataagtgtttcttttgaaaacatattcttttgtatctgctcttgttaatttgaatatttgaaagcagtcagttagacggttactattgctgctctgtctagtaccatattcatgaaaggaaccttttgaaaagaaactaaatactttatagttccgagttctttctttgtcttacttttggaagagaaaattctggctcaggaagagccatctcgtgttaaatgcttccagtacctgttactattttcttgtagacttgtcttggtctctttgcctacttctttgtaaccttctagattctagaagcctgggtcactttgcaaactcccattttgaccatttgcttccaagcagagctctggtgagcatggagattctgatttctgctgtggcaactgatcttatcagccggttcatctcttcggtaacacaaaattacagaaaccatatacataaggaggatgatcgtaggaggctggaacgcatcttgctgaggatgcactctgttgttgaggaagcagggggacgccatatcacaaatcaaggaatgatcctgcagctaaagggacttgttgagggattctacctcggatactacatgctcgacaaaatcaagttccaaccccccgaatatgaggtgagtcatgagattcagtcatttgccttgtctgcctgtaactctgccaagcgctttcgttttgctgatgccataagcaaacgcacaccagtagcctttggtagcaggagcagaacaaacctgaaagatgttgttgatggtttagaaactaagattgcagatatgagggaatttgtcattctccttggtagccaccctcgtctaccacgccagccttacagtacatatctatacatagataactgtatgttcggtcgccgtattgagaaggagcaagtcatcaatttcttgctttgcaatgatcctcatgatccatatgttagcattcttcctattattggccctcaaaggattgggaaaaaaactcttgtgcaacatgcttgcctggatgagagggtgcgcgattgcttctcccatatatttttctttaaagaagacgatctgaagaccggagagctctcgcttaactccaaggcttctcaagggaaatatttatttgttattgagttcatttgggatgtggatgaggcagcttggacaaaattccaatcatatttgcagaatatgcccgctactggaattaaggttgtagtgataggtagaacagaggacattgctaagtttggtactagccaacccatcagggtgaagaggctatctgaagaagagtactggtactacttcaaggcacttgcttttggaagtatggatcctgatgagcatccaaaactagcatctctggccatgcagctatctactgagatgaatggatcatttcttggtgcaactatgtttggtgaactattaagagctaatcctaacactcaattctggaagagaatcttattattcttaagagagctggcacgaaagcacttgacttcctctggtctacaccctgaggatcttttcgaaagaaatatccctgttgatttgagcaggatagccgttgtggatggtcaagttcaagatttcatggtttatgatgttagggtggctggccctgcagaaggtgagctaccaaagctgacgtcacgagacatactactgggtggtgatattcctgttgaagataagtttgatgtgctggtctggagatctcgcattccaccctactgtaactacatagttacgtatgagaaacaaaaaccgcgacgcatggttggtaagaggaacacgatctacctctgagaatagacagacacaaatcttaatctgggggaaaaatttctagaaagaaattacattgtctacgcttcgacaatatagtttagaaggctgggtatgcctttcacagattctagctactactgattatttagtcagtttaggtgaaaggagtatatgtgatgctattgtaggttcggatgccttctttcttagagaactgctattgtatctgtttttactagtttgggtatgtaaaattctgttagttact

SEQ ID NO: 14985 - DNA, 2401 bp, Oryza sativa
  ref <308>: DATABASE ACCESSION NUMBER: AK065520
  ref <309>: DATABASE ENTRY DATE: 2001-12-06
ggtttgctcaaccccgccgtcactatcttcatccgccgtcccgacgccgcgagcccaaacccctaaccccggagagcctcctcgccgcagatggcagtccccggccgccgcgacgacctcgtcggcgacgacctcgtcgacgacgacgggatcggcgaggagtacatggccccctccgacgacgaggaggcgcaactgcctgacgaactcttccgcctcgccgacgccgcccagtccggcaacgtcgctgccctccgcgccgcgctcggtaccgaggcttaaatcctgtgcactctctcccaatcctcgagtttttctagggttattatgtaggatcgttcgattggattgggggtacgcatgttgggtaggttggtgttggtccttacctatgcagcgcaattctagatttgcccttccgtgtttgtggatcagctcctgtagtagttcaacctgaactgtggtagtctgaagtttgtactggatgtttctggcctatgggtttgagtcgtttctgcagaggccctatgtgatgcaaaaacagtatcggcttgaaaaattgattgccactattacatagaagcagcttgaattttagtacaactctgtgtgcaggcacttggtattttaatacgagtctgcatatggactagactagatggagacatgcttttgaaatataaaaaacaaggctaattatatctttttttagttgaaatctatagtacccctttgttggaaaacgtggtaaactggtgattgaatctaaaagtagcacctgaccatgcactttttgtgatatttgtaactgttgtgtgtctagttatctgcatttgatgtaaagttagcttggcgtgttgtgccgaggaagtgatgggataacgttagtcacataaatcttttcttattatagtaaaaaaacaggtttgaaaatagcagaacataatcccttttgaaaatccacaacaatgccaatttcttctttgcccaacccatgaaattttgtcctgggcaattcatgtaatttgaagggacaacactagtttgtgaatctgttatcttgttccttttttacctgcatgctatgttcctattaaccttcattggatggttttaaatctttgtttcactttcaacaccaatttgtggttaccttgattttttctgatgatgtattctctattcttcagttgtatattcggaacagtgaacttccgtgcatacataggctgtcctggttgattcatctgtttgtgtttgaaacttatcaagttgaagagtagtagttttcccccattaattttcacagaagctgcactgaaacgaagcactttgctattgattgggtagaattgagttcaaaaactgttgccaatgctttgtattttccattcttttctagtgagggctttaataagtcatgtccttatggcattcttaacacattgctgcaatcctgtaatgattacatatgtgtgatgctttcaccatgctaaccatctcagtgtgttgtggcaaatctatttcgtttttctaaatttcatagcaaaaatgattccattcttaaggtacctcacttttttttttctgttggctcattggacaattacttgcaagtggaagctgctatcagcaaaagcatttgtacacagatgattgttgtagatgcagatctttcgttaaaatcctattgatatgtgtatgcagataattattctggcaacattgatgatccaatagaagatggtgatactctgcttcacatagcatgcttatatggccatctaccttgtgttcagctactgttggaacgtcaagctagcttggaatgcaaagatgaagaaggagcaattcctcttcatgatgcttgtgctggaggctttagtgatatagtccagtacattttgaattttgctgcgaacattgatggctgcgtaacaagaatgctcaacactgttgattctgaaggcgacactccactccatcatgctgccagaggggaacatctgggtattgtggatctcttgcttaaagctggggcatgtgccaagaaggagaatacttatggccaggtccctgctgagatggctgatgaaggcactgaagtccggaaactgttaattcaagagcaagttgaggccagcacacatactagcaattaattgacgtatggcaatccttagttgaaattggtaaaatgagttactgtcaggctgaatatctgtagtcattggaactgtgtagtggtatgcgggaaacatcggcaaaccatccatcaccacccttttgttttgtattggcttgttgccatctgcctctatctttctatttcgtatgtttgggcttgcttgatgtctagcaagatttgtgaagaatcatttcatcaatagttgatagatcc

SEQ ID NO: 14986 - DNA, 2675 bp, Oryza sativa
  misc_feature (841)..(841): "n"=any one base of a, t, c, or g
  misc_feature (844)..(844): "n"=any one base of a, t, c, or g
  misc_feature (847)..(847): "n"=any one base of a, t, c, or g
  ref <308>: DATABASE ACCESSION NUMBER: AK065521
  ref <309>: DATABASE ENTRY DATE: 2001-12-06
gagggagcgagcagcataatctccttctgctagctcactgctccctctcctatcctccatagcctcatcactctccacagcagcagcagcagcagcagagagtgagcagacagcaatatcatatccgcagccttgttcttgctgttctcactaatcaatcaataatacctctcttttcttgaaattttgatttcttctttttatttcctcgagaggaagaacatcttttcttctacttgtttgatggcagagacttgatctttgtcaatcttgtttggttgctcaaatcttttggtggttcagtttggttttttttttctgcacatttgtttgatctgatctttttttttcctttttctaatcgtttctgaatctcttttgctcattggcaccatcccaagaacaacagattaatccgcagtagatttggattaataatttaagatcgcagtaaggttagattaaaacttgctggattaattatctcgagctcaaatgctgaagaagaggtgtgatctgcaagctccctcacctctgagcagcgagctcgccaatggcggcggggggctcctctcgccgaggtcgtcgtcgtcgtcgtcgtcgtcgctgcagggcttctctccgaggagcatcttctccgtcgacgaccaggccaagaaccatccctgcgcgagcccaaggaacccgctgagcggcggcggtcaggtgaccgggctcgccggagttctcgtcgacggcgagggcgagcggcggtgctacgggaggaccggcagggtgctgctcgggatgatgcggctccgggtgcagctgcctcaggagagggtgctcgcgggcggcggcngcngcnagatgccgccgccgccgagctcgccgatcgagttcggcgtgaagaaccgggacgcgcagctggcgctgctctcgccggtgcagcggtcgccgctgtcgtcggcggcggcgaggacggcgcagggcgaggcggagctcgccgaggactacacctgcgtcatcgcccggggacccaaccccaagatgacccacatattcgatgacctcgtcgtcgagagctccgccgccggcggcgacgcttgccgcctcttcatgcagcacaggtaaaatccaaaaagaaaaaaaaaagaaactctgaattttgatgctctgaacatcgaaatttcatcgttgtaagtaactgagtatgattgattcacttgatatttttgctgatatttgatatttgaaaagatttggagaagtagtttgatgaaattctgtcggtttggtcagcattgagtgcattgtttgttgcggtttttatgaagtttatttttgggtgccttttaaaaattacttccatatgtaactcctgttaagagataatggaaatgctttttaagtatactagataagatcatggtcatactttattgtcaacctacttagtgcaaagcgacgtctttggctgcaattgtggtggtgctcatatggtctattgtcatccactccaataagatttctttttttttcttttcatttggatgaaagctaatgtaaatatagtttagccacagcttggtaaacaatttgatgcagcattgctgtcattgtgagccaatgagtgacatcaattgatctcaggttgcagaaatttgattgaattctggctcatttttttgtggtccctaactcaaacattgataggactgtagatctggggtctccaatctttgtcagtcattagttgccggccctgaaattttttttctatgaatgtgacgtttccttctccttaagttcaggatgagagttcaggatgagaatgagatggatcattagatgttgcctccaatattctctgctaattattgagtcattggatgcattaggccaccaatcagttgttttcttctgaattttcgtaaaacaatacccgattttcgaccaactgatcaacatatagtacatatttgattgaatgataatattgtcatgtactccattacgacaaaggcatactgttactatcaaactgcacacagcttttgcactgtgtgtttatcgcgtcgtgataaatagtatagtttactgattcaccattatttgcctttcagagatgagaaagccttctgcagcagccaatgccgctaccacgaagtgcatttcgataaaaggatcgatgaagcatcggatgtgtcatttaaactgaagaattgattggatcttttcttttttttttcagcctaaattttggccactacctgcttatgagttatgagtgagattatcattcttctacctaaattcttttggtttgaatggatgcatgtgttgtatgggtgagaaaaaaaaactagcagggtttggagagccctatttttgctgtataatcagaagttcagaactggtgatcatgagcaatatttgagcagtctttcctgctgcaaaaatgttcatgtttcatcaccacacatatgcagcattaccccacggtctgcaggttgtctccatgcatctcaccaaaaattcagaacagtgagaaatggagtacttagcctacatccttgtacccatttcccaatcttgccagctaaaatggtgagcacaaatgcaatatttatatgttgtaatcttcaactagttggaaattggagcaaagctgcagcgcagggatctgcacaact

SEQ ID NO: 14987 - DNA, 1634 bp, Oryza sativa
  ref <308>: DATABASE ACCESSION NUMBER: AK065522
  ref <309>: DATABASE ENTRY DATE: 2001-12-06
gattcctaaacctccaccactaacctaacccccttctctttccgccgccggacgccggcgagtaccggccggattcttggctcggccatcttgcctgcctcgctgctacctgctcgttgtgtggaagaacctctcttccaagggaagagtagagggaggcagggaggggatgggggaggaggtgcatctgggcttgccggggccctgggcggaggactaccgggagaaggccgatcactacaccaccaagatcggtggagtccccgactggccaaccgaggatatgggcattaaacctcacttgctccaatgcggtttatgtggaaccaagttgtgccttgttgctcaggttcatgctcctgtggcaaagttcaacattgagaacaggactatctatgtgcttgtttgtccgaagccaaaatgtgggacgaacccgcaaagttggaaggtcctaagagtccaaaagtgccacaccagtgcacaaacagatggcaaggttgacgaaacagatcaaataaacggaaatgtttgctcaagtgagccttcttcttcaagtttactgaacaagagccatgaggtcagtgatgatgatttcgatctagatgccttagccaatgcacttgaggaagcagcgactttagcatctaactcaaagaagcaaaacaaaccaaagcgtagtaatgcccctataaaatgccctgtaggaaagcagaaagtggatgatccaagcttaccagttcttccttgcttctacatctattatggtaaggagcaatttagagacaaaggcagtgtaggttcaaatagcagcaagtcagttttagcgaaagaaattgcagatgtagcaaatgacgaagaagagaaatgggaaggagaaaactatgaatatgacagagctattggtgctgacagaacgttcttaaaattcaagaaacggttggatgcatatccgcagcaatgctttaggtattcttatggtggtaagccactgttggctgcaacaaaccttcaagattctggcacatgccagctttgtggttcaccacgccaatatgagctacaattgatgtctccattgtcatatttcctccatgaagctggtgatggttcctcagattatgcacctgatggctggacctggctgactcttatcatatacacctgctcaaagagctgctgcccatcctcctgtgttggaaagccaggcagctgctgctggggagtagcagaggaggagataatgattcaggaggattaaagtcctccagtgcctacaatgttgagaaaccaaaccattcctggtttgagtgcgtgatgtgcgttttcgaatgctcttttccagtcgttgaggtcgtaaagctatctgtagttcataggaggcgatctactatacgtgttcttgttgacattccctgtttcagattcttttaaatcatgtattcctgttgtttgtctgggttgtcaactcaatgagggagaacatgtcaagcacttggtcgtttctgtagtgtgatcctttgtactttgtagcatagtgttgccttgtcaatcccagccatatatttcctgtcttggtctggaaccttctcagatttgtttggtagagcttaatatataatcatagtactactggg

SEQ ID NO: 14988 - DNA, 4086 bp, Oryza sativa
  ref <308>: DATABASE ACCESSION NUMBER: AK065523
  ref <309>: DATABASE ENTRY DATE: 2001-12-06
ggtgtggcgtcgcttcccctatccccgctctctactttatccagggcctttcccctgcttacctccaccccaccatcccccgccgccgccgccgccgccccagattcctctcggcggagacctcagcctcagccctcaggggcgcggccggtttagggtttccccccgccgcagaactgggtgccgaggctcccgcgccgccgccgctgccgccgccaccgacgacgagggaggaggaggggcttagccctctcccgcagcgaccgcgaggtgcagcctgtttttcattgacatgggacatacattagtgtagaggcaatattagagtcatatattggtaaaaagatttacaacctccattttatgatcagatgacctgcagaatggcagcaggcaagcaaaagaaacgtataataaggtctactaactcagatcaaaacaggacatggaagaagtcaaaagttgagtcttctaattgccatataagtttgaagtctcaaattgctcttaaatgggatgactatcaaaagagagtggttccccaaaaggaacaagttgggattttgtggtcagacttggcaccattcatagattccagacagaagcatgattcagggctggctgatgttacatatattcctccagagacattttccttggagaacttgagaagtgtgctgtcctataaggtttgggatacatgtctgacagaagctgacagaaagtttctcatacagtttcttccaactgagattgatgcagaagaaaatgttcatttattgcttaaaggccaaaattatcactttggaaatccttccctcagctggtcctcctctctttgctatggtgatactcacccagatgccttacttaataaggagaagcaaattagagctgacgagaaggcatatcgtgttaacctgaataactaccattccaacatggttgagtccttgaagaaatggaagaagagatggctaagttctgatgatccagaaataatgttcagggataataaccttgctaaacacaagcaaggagatacgcgaccaaaagttaccagtagtgaaatgcccttgaaggttgcacagagtagtgatgtttcgaagtttatgtcatatattgagatcagcagaacacagcacaaccttgttaagagcatgaagcagtctggtgatggcattaaaaccaagcatcttactcgtgtaattggtaaccttgataaattccatgtaaaaccatatggaacattaatagatgatgaacagaggagactgcgtgaacattggttgaacatatcctgcaatgatatacctgctgctttcgaggtccttaagaacaatagggtgacaacagagaaactgagaaatttacttggtcttgagctaggcgaaaagaatgtatctatcatgagaaaggttcgctgtgactaatcctttcaattcttgtttgaaagtcttttgattttccagatcaaggtattttacttgaatgtatgaaaaatatagtggatgatatcactttgttcctactactatgtgtcttgtatttttcatgtatcatatcatacacagcagcaaagttactattcgacatgatgttcattctaaaactctgttaccatgtgtataaaatactgatttgtaatggatctactgtggaagatctaaaaaattgtcattactgaagggaaattgctgtgcagtgttttcttactgatatgttgtagtaccttgtcattttctagagaaagttaacacaataacactcgattagttgtaggggttctacttatttatacggacataatttcctttgaaaagaaataattatttgagtactcaatagatgattatggtttatttatttttgtttatgatgagaaggcagaccagttagcaggcataacaaaagagcttggtcaacatggtgcctgcgaaaatgacggcagcactgatttgcaggatgctctggtagaacagttgtctaaagatatgttgcaaggtggtaatgatcattgcccatctcgtcaagattgtgatgatgatgaaaccaagcatattgaaacatctgctgaccatcatgatagtcagggtagggagaactctgatttgcaagcccaagattacaagggcaccagctgtgcagatagaagcatttcattctgtgccagcaacgtagaggagcagaatgaagatttcgtgaatacaaaattcagtaatgatggtccagatgttcaagctgaagatttcaaagaaataagctatacagatacaactattattgatcatagcccagagagacggcagatcaagactacctgttatacaaccgctcccattgacactcgtgagagccaaaatacacaagctcaaagtcttgagggcattacttacacagggccatcaatgcatgctcatgagcaaaatcagggcctgaaaggcaccagatacaaaattatgatagacaaaggccatagtgcaaatgatatttctttagtaaacagttatccagagatgaatgatgtaactatggattcgaaagaggttgagaatactacagtgataccatcaaacagttccacattgctttccaacacctcagggggacaaattcctgtggaagaacatctaaatggtcaagcagcaaaaggtgttaaagatttatgggagttgcctgaacctgatgattcctattaccttccactggagaatagtagcgtgtataatggttcaggtggcttacagattgggcatagacatctccctgctggacaacagggttctgtagtttgcatggagaatggtattttaagtcagcagcagtcacaagtcaccattgcggctgccttcccaatggacaatccagcgtcatttatgcaaccttgttcaaaccggcaaagcaatggtcaggtccagacagtagcaaatgacattggaatgcttccttactcccttgaacatacagattgcattgggcagtcaactgatttgcattctttggacaacaaccgattctctcagcccactcactttcccagtcccttgcaggagcaacagttggttgatcagagcaacagtgtcctttatgatgaacttcacaagaatttgtattctgatgtgagttttcaaactaaaggaaacaattctatccttgaacagcattctttcgcttcttctggttctatggatcatagatataaccgcttccctcaggagcaccagccacatgataattggcctgcaatggagtcaaataactgcttgccccaggcctttccagttggaagcagcaacacagatggaagcctcttcagtgctttggcccagtacagactaccgtcatcgtcgctacacatgcaatctggtaggtccagccctagccagctccttgaaataaggaaccaagttcctatgtctggaagttttgttcctagaactcaaggcacaaatcttcaagctcctagtatatatggttacacccagaatctgcccagtagttcaagcagtcatgtagcatctgtaggttctctgaataacatgcagtggacaaacctgatacaacagaatcctggaatgcccaacttaacgaacaggcaatttcgaggtccctggaccagataaatcctgagactttagaaataggttgatttaggtacaatcgaggtgcacaatgagaagtctaggtagggctggaacagaatgattctgggcaccaactaacatagtgtggttttgagctgttctaacgttgtggcttcagaatatctgtacatacatttctgctatgcctgtatgtatatatctgggcgtgctgggagtctgaaaagagttggaaactaaggattcccattttttgcagttgatccgtttattttgcctcaataatttcagtcccagattccatttagaggctgtctcaataatttgtttcaggtcttggcctctcagcaaaataaggtttctcaggggaatgtagtagttttctttagttgtgaacttgtgcttgataggtatcttgttgattcctaagatgtaatgacatgaggattcgatttttattcactctatttgaaatgagttctct

SEQ ID NO: 14989 - DNA, 1333 bp, Oryza sativa
  ref <308>: DATABASE ACCESSION NUMBER: AK065524
  ref <309>: DATABASE ENTRY DATE: 2001-12-06
gagaagcggcacggtgtttgagcattttgacttcacactctccctgacacaggacaagaacacacacagcgaaggatcacaacgacaataattgcgtgctcgcaatcgccatgtgattggtgactctctctaagaccgaagactttctgaggtatcaatccatggtggtggagacggagacggggagagatgagagcgaagcggcggcggcgacggcgagcgccatggacgacgggccatgcggcgaaagcgaaggaggaggagacgcggcggcgaaggccgtaggagcgaaggacgcgggcgaaggagacgagccgaaggaggaggaggaggacgggagagatcgagaggaggaagaggaggaggcggcgaagcgcgggtggtcggagatacggctggcgatcgaggagctctccgccgtcgacgtcgagcgccgcggcgggaagccgccgccgccgttgccgcctcctcccacgctgaccttcctcgcgctctctcacctcctcctccaggtgctcgataagatcggtccgaccatggctgtgctgaggctcgacgtccaacgaaacatcgagaggctgcaggagttgtacttgttggacccatccaaatactataatctagaggagatactggagaaggaggtagatgagggcactgcaaggaaggttgatagctgcgcgagagctattctttggcttactagagattggaggaggattctgatcagaagtgttttgcacagcttgtagaatctgcatacatggtcactctaaagccatggcatgggtggatctcttcagcagcctacaagatcgcaatgaaactcattcctgacaggaagatgttcatcaacctgctcgttggcaaatgccaagattgtgctgctctgaaggaggagattcgaaagctcgcaaagttgcttaagcccttccttgacgatatccatgccatgatggcgaagttcagattggaccggctgaaatcaacttgatggcaagcctataaattgtcgttgtaatatgtgaatgtggatacggggcatacggccttggtcagctggtttggctgtgtacagatccccctcccccttctttttttttgtggtagtaccgtagtagtagtgtaactctgtaaataggtcttcagttagagtagaactgcaggtttatagtgtgcagtgtgtaccaatttgccagatgaagactaggcagtgtactttggtcatccttataggagtatcgcattttcagtcctttcctgtcattggtcatctccaaactgctgcagtttttcaagatcccctactcaatattcaacaaactaatttggc

SEQ ID NO: 14990 - DNA, 1759 bp, Oryza sativa
  ref <308>: DATABASE ACCESSION NUMBER: AK065525
  ref <309>: DATABASE ENTRY DATE: 2001-12-06
gaacttcccacacccttccgatccaccctcgcatcactcttccagcctcccctccccccaactccggcgatggccggccgcctccccggcgccgcctccgccgccgcggcgcccctcccccgagcgctcctgctactcgccgccctcgccctattctccctcaccttcctctccctccgctcgctccgccccgccgcggccccaccctccctcgccatcggcggctcccgcccttcctccttcgcgcggccgtcggtgtaccactccgccgaggccttcgcggcggggtacgcggagatggagcggagcttcaaggtgtacatgtacccggacggcgaccccaagacgttctaccagacgccgcggaagctcacggggaagtacgccagcgagggctacttcttccagaacatccgcgagagccgcttccgcaccggcgaccccgacaaggcgcacctcttcttcgtccccatctccccccacaagatgcgcggcaagggtacttcatatgagaacatgacaataatagttaaggattatgtggaaggcttgataaacaagtatccttactggaacaggacacttggagcggaccatttctttgtcacctgccatgatgtaggtgttagggcttttgaaggacttccattcatggtgaagaattctattagagttgtctgttctccaagctataatgttgactttataccgcataaggatatcgctcttcctcaagtattgcagccatttgctctgcctgaaggaggaaatgatgttgagaacaggacaatccttggattttgggctggccatcgcaattctaaaataagagtcattttggcacaagtctgggagaatgatacagagcttgctatcagtaacaatcggatcagtagagctattggagagctggtttaccagaagcagttctaccacacaaagttctgtatttgtcctggtggctctcaagttaatagtgcccgtatatctgattcaatacactacggttgtgttcctgttattttgtcagactactacgatttgcctttcaatgatatcctagactggagaaaatttgctgttgtacttaaggagcgtgatgtatatcaactaaaaagtatacttaaatctatatcacaggaagagtttgttgaattgcacaaatctcttgttcaggtacagaaacactttgtgtggcattcacctcctcttccttacgacgcgttccacatggttatgtatgaactatggttgcgacatcatgtgatcaagtactaaattcaaccatccaagtctgggcagatacaaacatgaaagccttatccgtatgaatatgatgcggagtctgacaactatccggtgctctactgaacatgcattcattcttatgctcatatatcagcaactggatggatcattgtgcgtaggtgtcatcttgagcatctgcatcagagaagttggcgaccatcgaccataaatcatcaaaatggagttgctaggtaatagactgattagttcattctttcaagaatagttttgtttttccgccatattgcactctttgtaagctgcgttttctagtttgcctgtgatacggtatcctttacggatctgcccatttcttactcatgtaaagtaatgtacgatgttactaacaagacagagaactgaaccaagtaggagtagaatattgttgtgatcagcaaactttcaggggttaatttcaccatgcaccatgcgatctatggacttctatttt

SEQ ID NO: 14991 - DNA, 1982 bp, Oryza sativa
  ref <308>: DATABASE ACCESSION NUMBER: AK065526
  ref <309>: DATABASE ENTRY DATE: 2001-12-06
ggttctcttctctcttctctctgctgctgctgcggcgctgcagcttctcctcctcttcttccgccgcggattttggccggaatttcgccggaaaaatctggttttttcaagtctcttctttgcctgcggcggaggcgcgtggatttttttcttctctgctgcttcgtcttctcccatccctctccctctcttgccgcgaggaggggagagggggacttgatgaagagaagactggtggtcgtagcattggtgttgctggccgttgttgagttggttcatggcgatgggtggcgatgggcgccggggtcgcggcctcacagcgtgaccatcaccgagttcggcgccgtcggcgatggcaagacgctcaacaccctgcccttccagaacgccgtcttctacgctcggtccttcgccgacaagggcggcgcgcagctgtacgtgcccaagggacggtggctcactggcagcttcaacctcaccagccacctcaccctcttcctcgaggaagaggccgtcatcatcggcacaaaggatccatcacagtggccgattgtggaacctttgccatcttatgggcaaggattagatcttccaggtcctagacaccgcagtttaataaatggatataatttaagtgatgttgtcattactgggaataatggagctattgatggtcagggctcggtatggtgggattggcttcactcccatgagcttaaccatagccgacctcatattgtggagtttctgcattccgaagaagttgtaatctcaaacttaacatttttaaattctccagcctggagcatacatccagtgtattgcagcaatgtaaaggtccacaatgtcacaatcaagacctcattggatgctccactcactgatggcatagttccagattcatgttccaacgtgtgcattgaggatagcagcattagtgttggtcatgatgccatatcactcaaaagcgggtgggacaattacggaatttcttttggaaggccaacctcagacattcatatcagtagggttgatctgcaagcatcgtctggagctgctcttgcaattggtagtgaaatgtctggtggaatttcagatattcatgttgatcacattcgaatcggcagttccagtaaaggcatctccttcaggactactccgggacgtggaggttacatagcggaagttgtcgtcgcagatgtagtaatggatagtgtccatctcgccattgagtttaccggtaactggtcaagccacccagatgaccattttgatccatcttttcttccggtgatagatcaaatcacccttaagaatatggaggggacaaacatctctgttgctggagttctatcaggaatcgagggtgatccatttagtgctatatgcctttctaatctcaatttctctatagccgatttggctccttccagtgcctggacttgttcaaatgtgcatggatattctgaattagtattccccaagccttgctcagaactccatgacacatctacaaactcctccatctgtttctccctctctagttacagtgccctcgcagtactataaatatacagagtaatcttgtgtccatccttcccctgtcttgttccagtccttgtacaattcagaaattgagcatccatcaccatctttccaattctttaccaccaataaattcatcacaagaatgaaacagtacccctcttatggtcctaaggctcagattataagctgcataatgatcttgaggaggaagaatctaagtggggttgtggatagctaggtgcatgcctgtacagctacatttcttcattcaatctgtaagaaaaaaaatttcttttttggtagggttgagtgcaggatattttcttcatacaattgtcatttggttataaattatcacatcatgattaaattatctctgtatattctatctctgtgagcaacattctaatagagcagatcacatgttatcctgg

SEQ ID NO: 14992 - DNA, 2760 bp, Oryza sativa
  ref <308>: DATABASE ACCESSION NUMBER: AK065527
  ref <309>: DATABASE ENTRY DATE: 2001-12-06
gtgagtagaatcattccaggtacatgctgaattaagcatattaacagctgttccttaatacctaacattacttgaatcctcacttgtttacagtatggaacaaacacacagtttactgattaaaattgaaaaaatgatcaatttaattgaatttattgctggtccccctcaagtatatatttaatctacactcaggttgagcaaattgtccctttaatttgtacttatagcccgtcatcctaatcagtgttgcgatgcagaacgtatccactatcttggttgaccaaattgggaggcactatgcacatacattttaataagtcaaaatctgactagatggaaagttgttcatggtctactttccacttggcagccttatctcacatccacccttactttatctgcatgctaaaagataatatcgaattaatcaacagaccggaacatcggtttgtttctctctgatcacatttatagttctacaaagaggctgaatatgaaaaccaccccctgatttcctacttgtacttatgcggttttctagattgaaaagaattagttttggaaatatatgaatattttagtcatgcaaacatgtgttaaagagaagaatgtataacactactagctagaaaaaaaaagttatggtgtggcaagcatttgaccatgccacctgtgtatatttttttttagaaaagggatttaaaattgatttggaacattaactatgggatctatctaaaataatcttccatagcaagagcatttgaaatataaccttgaaatctcacttccctgtttggcttactccatcctgatattgtgctgactttggactgcatatgcatggcactttgctactccctccattttcaaattatttgccattttagctttgtactaagtcaaacatttctaactttcaccatcaatttctacaactttatacagtttaacattataagatttatgttttatattcaccatgacaaatactttcatcatttatatatagttcacatgttaaactatacaagcatctagaaattgatggtcaaagttaggaaatatttgaattaggataaaactaaaacgacaagtaatttgaaacggagggagtactaaatagtgatgccttgttcgtaataaggcccttatgccaatcttaagtctgatgaggatgggtggagtggctgcgcgagccagctaccacactttttggatgaagaggtcctagcaatgtgccattgcctcccatccattcaccagttaatccttgctttgatctccatcaaggccttgagatggaataattgatggagggagtagctagtagattcaacaagtacaagtgatagacgacgcttgaagaagggtggggggggtggcatcatcatctggttgtagatgggtcaaaaccactagttagggaagtgaatctatgatggctaaactatatggtagcaaatcccaccagcacatcattccctatcatggctcatgatcatgaggccacacatctaagagcatattgtgggactgagagagatgatgatgagggcttagattgagggatgtctgatgttgttggcgatggggatggagttagtggcaagtcaagcctggggcaagcttgagagaccttgagttagtaccttcagcatttcgttttctttcactaatgtggactacaatactcccatgtggcaatagaaaaaaaaatgctatattgaatctagttgctcagggactagttttaatggctgggttgtttttttttcttagaccatcttagagctgtatgttgagacatagaagctagtcttagtgttcttttttctcattgtttttgggttataaagtgattttcccattctttatcaagcctaggtataagtggcacaagcatcactcttatggcatcaatattaattgcatgattgtacaagggaaaacaaacatttatttattgaaaatcagacacatgccaagatcacagtaaatccaagatctgccattataaagtctaggcttggagatatgcaattgtgaagcaaattgagccattggcccttttcttccctccccttccccacatctccaaacccttgccacagagtatgagcgaccggtgagagacattgcagaggtgagaccattgttgttgtgatcaatatgcaagatgttgcaatggagacatgaattgtagctaaacagtgtttgaatctagcatgcaatgcaatgatgaagaattaagccaatgccattggaaggagaatgggaggcatggaagtatggaactgacagtagaaaggagggggcaaccaataagactatgaagagtgggggtgaagacttttagtgtggcatatttctgaagtgcaaacttacagtgacatatatctaatctttcctttattaatagatggaattatatattacatgggttgtccttaaactcaaacttatggcttaatcgtcttagctaaaaaatcatgcttgaccagggagtgaaaacaccatatatatgctcccaattagatgatccatggaccatggtgcatagggttgttgtagtggatgagtttggtggtcttttctactctcttttgggtgtccccaccatgtccccagttttcaccttcctacactgtcgacgagttgaattctatccatctatggtggaaaaatcagtcataaaagttttactgccactcgacacgcaaagcagtcaaaacaacgatggtggtaaacaaaggc

SEQ ID NO: 14993 - DNA, 3207 bp, Oryza sativa
  ref <308>: DATABASE ACCESSION NUMBER: AK065528
  ref <309>: DATABASE ENTRY DATE: 2001-12-06
gagcctaccactacgagcaggttgcggcggcggaggcgagcggagccgcggtggtgcggattgagcggcggagccggagccggagccgcggtggtgcggatcgagcggcggcggtggccggcggggaggcgcaactggtcgccgaggggagcatggcgcttgacggtggaggtgcggccgacggcagcgcggccagcagccgggccaccagcccaccaggccacggccacttttatccaacaatatggttcaatctttggaggaaccatatcaatatttcaggcagcaatcccaataatttacggtgccttgaagggtagatacttgctggcactagagctttggaatgctagcattacgatcattaacttggtgggaaacacgacgtggatgatctattctgccgtcaataagggagttgagctgtcaatgttaatgactaattcagtcgcttgtggactgaacatctaccacttgctgtctatttatagacacaacaaggaaaggaaaaaaacaatttgtcttgtaagttttatatgcatcagttttctggtaatcctggttttgctggaaacaaatgtgggagacgacatattgagactgctggagcatttatttggatcactgggaaatgttatgattgttttgtgccatctagttcagatcaataacttgtggtactcaactctgtcactagaaattcacgttttcatactgttctatgtaccaaatatactatttgctgccagtgaattggttttgattgtctacaagcagtacagcatgaaaatttatgtccagctctcatacattttgaacacaatcttctatgtgattgagctccctgtcatgattcgcgcaatgattacaaataatccagattctgacaatgaagcaatcgatatcgagaatcaagcaattgtaaagattgatgggcaaaagaaacatcacaatgagcgtcaagaggacagggcagagaagaaaacgaccttcacggaagtttatttgcttcctgcgccgcctgggctctttggccaaggaaaaagaaaacacagcgacaacgatactgcttcaaccaaaagaagaagaataacaatcttacaaagaaagcgacgatggatagagctgagggacaaggaaattcatttttcaaagaggatgagaagtcatatttattcaagatctatcaaaagaggatctccccccactaggaccttgcaactccaaatggattcactatctgaagacagttatgagcctgaatatgttgaggagcatcgcctcaaggatctggtgaagaactctgagttcatcagctaccctatctccctgaatgagaaaaagattgagaaggaaatctgtgatgatgaggaagtcgatgctgaagagggaaaggttgaggatgttgatgaggagaaggaaaagaaaggggagaagatcaatgaagtctctcatgagtggcattcctcgaacaagcagaaacctctctcagattcaaaggagattactagtgagaacgaggaagctaaagagggaaaggttgaggatgttgatgaggagaaggaagagaagaaaaaacaagggaagaagatcaaggaagtctgtcatgagtgcaacttgatcaacaagcaggaagccatctggatgaggaaatcagaggtgatcaccaaggaagcagccttctaaaagagcttgacaaacgactgggaggaacatctggctgtcaagcacttctctgtggagggtcagcttgagttcaaggccatcctgtttgtacccaagggagcaccatttgacatctttgacaccagaaagaagcttaacaacatcaggctgtacgtacgccgggtgtttatcatggacaactgtgaggagttgatccctgagtggctcagctttgtcgagggcgttgttgattatgaagaccttcccctaaatatctcatttgagctgctgcagcagaacaagatcctgaaggtgatccgcaagaaccttgtgaagaaatgcgtcgagctgttctttgagattgctgagaacaaggaagactacaacaaattctacaaggccttctccaaaaatctcaagcttggcatccatgaggactctaccaacaggacgaagattgctgagctcctgaggtaccactccaccaagagtggtgatgagttgaccagcctcaaggactatgtagcccggatgaaagagggccagcgtgatatctattaaatcactggtgagagcaagaaggctgttgagaactcccccttccttgagaagctgaaggactatgaggtcctgtacatggttgatgccattgatgagtacgctgtcggtcagttcatggagtttgagggcaagaagctcatctctgccaccaaaggactgaagcttgatgagaagtttgacaatttgagcatagtgatgaaggaggtgctcgttgacacagtggagagggatgttttttctgaccgtgtggtggactcttcctgctgtccagtcactggcgagtacagctgggttgctaacatggagaggatcatgaaggagaatgccatcatggacgagctacctaacaaatcccaagtgaacaaatgtgccccaaagcaaaaggttgatatccttcctgtgaaggagaatgctatcaggctccaaagcagtgaagagagagaagttaatactaaattttctgttaccggaatctgtggagatggaagatgcctattccgatctatagtacatggtgcttatattaaactaatgatgattccacctgatgataatcttgagaaagatatggctgatgacttaagaaaaaaggtttgtgatgcgttggagaaggaatgtgctgacaaaccctggcttgttgaggtgactgccattcctatatcaaagagatgaggaaacctcatgtgtggggaggtgagatagaaatctctatggcgtcacatgttttaaagatgcccatcaccgtgttcgtggtggaaaaaactggaggtttgagggtattcaccaaatacggaaaggagtatggacggaatgcaatacaggttctttttgatggtaatggacattatgatgttctgagtttgcggtagtccaggactgcaggacagacatttgttcccccttttttttttcttccccaaatacacttgctgtaaaaatgtaaccggagtttaccaacaattaaaaatgttgttctttcct

SEQ ID NO: 14994 - DNA, 2204 bp, Oryza sativa
  ref <308>: DATABASE ACCESSION NUMBER: AK065529
  ref <309>: DATABASE ENTRY DATE: 2001-12-06
agaattgcttttccacacttgtacaataacaggccaaggaaagtgaggcttggggtatatcatactccaatgataatgtatatcaaaacagaggatccagacttgcctgcattttactatgatcctttgataaatcctataacttcgactaacaaggttgatcgtcgggagaggagaacaactgaagaggatgaagatgaggacttccgtctcccggatggtgtggagcccctcttgaaaggaacagaactttacactgatacaacagcagctggcatttcattactctttgctccaaagccttttcatatgagatctggtagaacacgtcgtgctgaagatatccctcttgtatctgaatggtacaaggagcactgcccaccagcttatccagtgaaggtgcgtgtcagctatcagaagctactgaagtgttatgtgctcaatgaactacatcataggcctcccaaggcacagaagaagaagcacctgttccgttcactccaagctacaaagttttttcaaacaacagagcttgactgggcagaagcaggtttgcaagtttgcaaacagggttacaatatgttgaacttgttgatccacagaaagaaccttaactaccttcacttggactacaacttcaatttgaaacctgtgaagacactcacaacgaaggaaaggaaaaaatctcggtttggaaatgcatttcatttatgccgtgagatattacgacttactaagttagttgttgatgcaaacatccagttccgcttgggaaatgttgacgctttccagttagcagatggcttgcaatacatattctctcatgttggccagctgactggtatgtaccgctacaagtatcgtctgatgcggcaaatcaggatgtgcaaagaaaaacaatgttaatacgtctgcgctgacacaatctgaaattcgtgacattatacttggtgctgaaatagctccaccatcacagcagaggcaacagattgctgaaattgagaaacagtctagagagacgactcagctgaccgcagttactacaaggacgaccaatgtgcatggagatgagctcatcatcacaacgaccagtccatacgagcaacaagcatttgcatcaaagactgattggcgtgttagggctatctctgccacaaacttgtatcttcgtgtcaatcacatttatgttaactcagatggtataaaggagactggctacacttacattatgccaaagaatatattaaagaagttcatatgcatagcagatttaaggacacagattgcagggtttctgtatgggctgagcccacaggataatccccaagttaaagagatcagatgcatagctattcctccgcagcacggaactcatcagatggtgacactgcctgcaaaccttcccgagcacgagttccttaatgatttggagccactgggatggatgcatacccaaccaaatgaagctcctcagctatcaccacaggatttgacatcacatgccaagatcttggagaacaacaagcaatgggacggtgagaagtgcatcattttgacatgcagctttaccccaggatcttgttcattgaccgcgtacaagctgacgccaagcggttacgagtggggccgtagcaacaaggacaccggaagcaacccacatggatatctcccgactcactacgagaaggtccagatgcttctcagcgacagattcctgggattctacatggtgccggataacaccccttggaacttcaacttcatgggagtcaagcacgacccgctgatgaagtacaacatgaagcttggcacgccccgggacttctatcacgaggaccatcggccgacgcatttcctcgagttcagcaacatcgacgagggcgaggtcgcagaaggtgatagggaggacaccttcacgtaagcaggcgccacgaacgcctatgctaccatagcctttctgctacgaacttcgcgctgtttcgagtagagatccgtaacctgtaacttgacgcaaccggtagtagcatatgatgcttgttttgaggagattgtataccctgatgtagtctgcccttgaaagaacagggtgtttgtagtttgtacaagtgcacgccatgataacagtgaagattttgcttactctcgatattgtattatgtagatctcggctaagatatattattgcatcctactaatcataaagc

SEQ ID NO: 14995 - DNA, 1925 bp, Oryza sativa
  ref <308>: DATABASE ACCESSION NUMBER: AK065530
  ref <309>: DATABASE ENTRY DATE: 2001-12-06
gccagtaacagcgtaaatcccgttcccttggcccttgggcctcgccgcctcgactcccgtctcctcgcccggccggcggccgcccgtcgcctgcgccgatctacaacccgcgagcagcggtcccactgcttccgccgccggtggcggtgaggtgcatcattgcttccagcttatatcatctagttctcccgtttgtaccttgaggggacaacaatgtcagtctcaactgctgcggttccaaccgcaaatacaaatgggaaccacgcgttgagtatggactcacattccagccaagatgttaggcggcggacggtagttgttgcaaggaagaaagcttcacctgagctccttgctgatggtggattcaatggtacctcatcagttgataagatcactgacaagaaggatcttagtcatactatccgtggagagtcagttcttggcaaatcaaagtatccattggaggcaagaaaagatgcaattgcctctgcagctgctgctgaccgtcaaaagaagagtggtgctaagcaagaaaaggccaagtgggaaatcgctctaagtgtgttgatgaaactttgccttctcatttcggctgtcgcttggatggggcagctgttctggagatggcaaaatggtgatttatcatttacaacactggatatggagagcaggctgtccaaagtggaagggttcaagaagacaaccaagatgcttcaggtacagctggatattttagacaagaggctaggaaatgagattgacaaaacaaggagggacatcacgaagcaattcgaagacaagggtaataagctggagattaagatgaaggcactagaaggcaagactgacaaattagataaatcacttgctgagcttagggacatgggttttgtttctaaaaaagaatttgatgagattgtggaacagttgaagaaaaagaagggtttggatggtactgttggcgacataagcttggatgatattaggttatttgccaaggagatagttgagatggagatagagaggcatgcagcagatggccttggaatggtggattatgcattagcatctggtgggggtaaagtggttaagcattcggaagctttcaggaaagctaagagctttatgcctagtcgtaatagtttgcttgaacaagctaagaaaatgctggagccaagttttggccagcctggagagtgctttgcactacaaggaagtagtggttatgtggagatcaagctgaggacaggaataattcctgaagcagtaagtctagagcatgtggacaagagtgtagcttatgatcgatctagtgctccgaaggatttccaggtcagtggatggtatgaaggaccagaggatgattcagacaaggaatcacgtgtggtgacaaatctaggagagttttcttatgaccttgagaagaacaatgcacagaccttccaactggagagaaccgcagattcacgagtcatcaacatggttcggcttgacttctgctcaaaccatggaaattcagaactgacatgcatctatcgcttcagggtgcatggtagagaacctggctctccttaagctgctgcagtgaaagcctgatctgagagctgcatgcctgagtttgacaacatcctcaggcttcaatatacccagtaagacaatgattctagtccactggattgactgttagaagatagaagtgtggtgcggctccatctgactcaggttgattttactctgtatcataatgccatgaaaatatgctgactcgcagttctgctagctagatgtcacacttgtttgtatctgctcactctgatagtctgattgctctttggtatggttgtattgtaattggtagctatcctgttatttacaactttagtttattggggtgtattcattcggtgactcgtgggcatggaggt

SEQ ID NO: 14996 - DNA, 1250 bp, Oryza sativa
  ref <308>: DATABASE ACCESSION NUMBER: AK065531
  ref <309>: DATABASE ENTRY DATE: 2001-12-06
ccgcatccccccaccgatttcgtcccctccggcggcggcggcggcggcggcgcacggcttctccgggagctctacgcgacaaaacaatgaggaggtacagcccaccatatcgcagtccccctaggaggggctatggtggcagaggaagaagtccccctaggaggggatatggaggacggagggagcagggttctggaagtctcttggtccgcaacatcccattaagctgcagaggggaggatcttcgagttccttttgaaaggtttggtcctgttcgggatgtttacctgccaaaggattattacagcggggaaccacggggatttgcatttgtggagttcgttgacccttatgatgcctctgaggctcaatatcacatgaatcgccaggtgtttttcggccgggagataactgttgttcttgctgctgagtcgcggaaaaggccagaggaaatgcgcagtagagctagagtcaggggttactctggaaacgaagggcgccgctcttcatattatgggaggtctcgttcccgttctcgctctccccactatcgaggtcgtccacggtcaaggtcatactctcctgctccaagacggcgagatgactactcagcttccccaccgagaaaggatacgcaccccacaaaatctcctaggcgtcagccaaaagaacatgatgaagagaagaagcggagatcctactctcctgcaagtagagatggcgaccctcgcgatgctgataacggttatgagaagaggtcgcccccacctgacagcgatggatcccctccacaccggaggtctcctaggcactcctcagggtcgcctccaggatcccgctctaggtccgccgatgtttcccctgcccgcagcgactgacagaactttgaaccaacgaaatgggatagctgcatgatctccacagcacctccaattctagtcagtctccatcttccttcctggtccaaccaagctgtttcaattaaaccgaagccctaagcggcgtgttgtattattgctaagtgtgcttgccatgagtttggtatggcacatcgcctgtttgtgtgctcatatgttgggagtccaggatgttgtagtcttttgagagctgctttgtttggtggtcatttgctttttgctgaacattaacttgaaacaatgtgacattggtgttgtgtactaccactagtgagccttgaactgggtaaccgcctatttccacatctatctatgcttgtgagtgcttagccc

SEQ ID NO: 14997 - DNA, 2686 bp, Oryza sativa
  ref <308>: DATABASE ACCESSION NUMBER: AK065532
  ref <309>: DATABASE ENTRY DATE: 2001-12-06
agtcgaagcgacgaaacgtcagtcctgatgagtctctctctactctctctcctgccgcctcgccaaaacggaaacgagagggctgagggctccatggagatcgcggtttcgatgtcggcgaggcgccgtgaactcgcagccggcggtggcaggccagccgttgggcgtgaaggaacagtagcgggctaatatccggccacaagacggcgaccgccgccgggggagtgccgcttggtggcggtgcgcgccacccgttcggcggaatgcccagcgggacttcgccacggacgggcggctcgccgcacgccgcttcagtcgatcgcgagcacgatccacacctcgaggatttgtaagtgacccaatctgtacgggattccaactaattcagaattcaagtccgacgggggcggagtgcacggggacctcaccatcactgcagcgaggatccctcttgttgcgtctgctatcgattcttcgatttatgaggtgttatgtgcgcaagtacatgcaactatggacaaaattggaacagagctacgattacacatgagacggacgacaaccactcttgcactgcataaggagcatgccagttgcttacatttggtggaatgatcttctcgagtggcttcttctgtggcaatgaagggtcagtgagcgatggcagccggaactcgtgcatcatccagtcagttttgacgcctttagctgctctgcccttgtagaagacaagggacttcttcaagcctatgcactttgatccatcggaggagtagattggcctatcggttccagtggccttccagaaacctgctccagtcaccctgtttggccttgtgctgttccgagaacggaaaaaagaatgaaaatggaagtaacaaatcttacttgggagatcccatggatcatacttgtagatgtccagctgcctgatgagctcaatgggaagagacttctgctggattttccttctaaggtagaatctgacgagctcttcatccgttggatgaaacctgaagccagggtctctttggtctttactccatgacgaggatctcgatgagctgtacaacttcagcagtaattttgggattagcaatctctcttattacactaagttaactgaactgtacttatgcatcattgcttatatagcttagcatctaatctaatagagttctcacatatgcctcatttcttataattagacctttgagagaataatctgactccttagatatttggataattatttttttgtagttgtttccttgggttgtccatagtgaactatgtggaacaattcccaagacatcagagacttccaaattccaaggacaatgttttgtgcccatctgttcgtcgctattctgagggtccttattttgtcagcccacctggtgtgttcttaggcgcatccctttcttggctattaaccatttaacctgctcagtcagttctagcttcaaggaacggcctgcccattcgtgcatatggtgttgcattgggcccatcaacagaacttctacagacattgatgcgaaaatcctgcatggatccaagtgcagccctctcattcgtcccttgcatcaggaaattaaattaggaaaattatgcaacccaaaatcccatgggcccaagttttccttccctgtcgtccaagcacccaacagtttgtctgccctttgcagcatggtgtcctggaatggtcgttcgagctggtgactgacctggtgagccaggcgtatctgcctctctcctcgacaggcttaatgggctgtcaccacccatctgggccgcaaagagaatcaagtcttcaccgcatatcgttctgattgttgcattcaccgcttcacgggagttcaatcaagtctttcgtgaataataatctaagaatatgcttctttctgtccagcagcggcctgaaattcggtgacgacggcgaccgacggacatatgttcaagccgaccgtgcatggccggcgggtcccggcgccggacgcacgcaaagtcgagcaattaacggccacagcttcatcttacactgatggccgggaggccatccacgacgacatgcggcagcaacagcagacctgacgatcaagcagccattgggcgactgttttgatatgctccggggaccactgcacccatggcgatgcatcggtcgaataacagcgactcctccgggtgattttcagctcccaatgcaagctcgatcgtcctgcgctgtgaggccatgcatgatagcgaaaatggctgtggagcaataggcggcatgctaggctttactggcatgattgtagtactgtattctcatctatcccaagttggttccgcgcgaagaatgtcgtcgccgcccttaattgtgtggaagtgtggtcatcgttgtctcttattccatatatgttcatgggtggcactagctagtagtgataacagtagccagtgttgaacgatcactgtatggtacattggtacagatagcttggtctgtcagctaggtgttttaattggtgcttggcggtggtggagaggaaaaaaaaatcttatgagaccaggtcctatttagactctcaggatatgtttgttcgaaaaaaatatgtagtataaatcacatatgtaatccagtgatcgatctacctccaatatgtttattcgtgaaataaagttttctatttctttc

SEQ ID NO: 14998 - DNA, 2818 bp, Oryza sativa
  ref <308>: DATABASE ACCESSION NUMBER: AK065533
  ref <309>: DATABASE ENTRY DATE: 2001-12-06
gattagcattgatccattcacaacttggagtacctcctttctgcttctatctctcctgcaaatggagaatagcgagcaagagaggacggactcaccattggagtgtgatttgaggaagtacctccttctgttggccacccttgtggccacggtgacatatggtgcaggattcagcccgccggggggtgtctggcaggacaccgaggccgggcacctcgctggtgactccatcatccgggatagccagtatcgccgataccttatgttcttctactgcaacgcgactgcattcgcgctgtccatcgtggtcatcatcctcatcttcatccttgctatcctgcatgagaaggggaagttacagatccccatgcttccactgcgagcagccatggtggtggacctgctaagcctcattggggcctatgctgcagggaccagtcggggtgttctcacagccggcaacgtctctgcacttgtggctactttcatctatatggtggcacagatggtggtaactttatggcttgacaagaaacagactcaggatataagctcaggtgatgagaagaaaaaacggcaccgcaaggtactgatgcttctcgcaacatttgtggcaagcatcacatacatggctgggctgagcgcaccgggtggctactgggataacaaccaggagggccaccatccaggcgatcccgtcctgtgggaacaccactctcgccgtctgagggcgttctttgtctgcaacacaattgcatttgtcgcatccctgctcatcatcatgctgcttctggacaagaagcagcggatcttcttacccctcgacaagataaagatcaccatcaccgtacggacttatgtgctctacgcgtacatcaccattgctcttttaggccttgtgggggcctatgtggctggcagctgcagaaagcctgacactaccatctatgtactcagtctggttggtgctgttcttttatgcataggcgccctccaggcagtcctattttttctgccacaactttcaaacatatcctgcttgccaataattgcaaagttatcatgttcaccgggagggccatcagatagcagttccagaaagaatacaagcagtaagacagatattctggagaaggcccaatctcttgttgtactgcttgccactcttgtggcaactgttacttaccaagcagggctagtcccaccaggtggtgtctggcagaaaaaccaagatgggcacatggctggcgaaccaatactcttatccacacaagccaaacgttacaaggtgttcttttactgtaactcgacagcctttgcagcatcattggttgtcatagttttggtccggtataaacctttgctcaggcgccgcattctagagataactatgattttggatctgtttggtctcatgggtgcatatgctgctggaagctgccgggacataaccacatcagtttacatcattgccttggcaggcggtgttctagtctatgtggtgattcatgttgtgttcttcacgcttgaagacaatgacaaggagaaggaagttgggaacacgaattctgtacgaaatggttcagttgtgcgcacccaaaataattcagctgagggcaatcttgctgagaaagattcatgtattgacaaaaggcgcaagaggctgctccttttcgctgttttgggcgcgaccctcacttatcaagctgggttgaccccaccgggtgggttcagagttgtggatgatggttttgggcgccatgctggtgatccaatactcttttacaactttccacgccgttacaaggcatttctctattgtaactcggtaagcttcatgtcatctctttccctcatcatactcctcgtgaacccaaatctgtataggccagctatacaaagctatgctctttcggtttgcactgtagcaggcttgtttgctcttctgggagcctatgctgccggaagcactcaacatctgaaaacatccatttatgtctttgtgttggtagctgtggtgcttttcattatgatcatactcctggtgtgtttctatcaaagtgagagcaaagagaagcgagatgacatatccaaggagcccgttgagaaagacaaggacagagccaaataccatgccaagcgcaagtacttgatgttgctaggggtcctggctgcaagtgttacttactcccaggctggtctgaacccacctggcggtgtgtggcagggtaatagtgacgggcatggtgtgggtcactcggttatgcatgacaataagaggtatcgctacctcaccttctcctacagcaactcaacttcttttgtggcatctattgttgttatcatcctattgctaccgacggaactgctaaagaagaacaggtggctaagggtgatgaatattacaattgtgctggacttgctcggcctactgctagcctacgtggctgggtcgagcatgagatgggaaccttctggatatgtcattgcatttgttattggtgcactaggctgtgctgcaatccacaagtttttgtcatttgtcagaaggtctcagcaacaggggcaaggaaatgatcagccttctcggttaccagaaggcggcagtcaagcttagatgttgttggcatggtaacgagcggattagagggctcaagtgtagcaaacactcaaaaagtactgccatttttttcttatctccttttcgaggaaataatgttgctatttttggaatttttttaaaaaataatacgattttaatagaaaatcgcaaaaatataggtcggttcgacgaaatcgtaaatttagcaccctgtcg

SEQ ID NO: 14999 - DNA, 1544 bp, Oryza sativa
  ref <308>: DATABASE ACCESSION NUMBER: AK065534
  ref <309>: DATABASE ENTRY DATE: 2001-12-06
gacgattcaaacatgggattccaaaattaattagggagaattaatcccctttccttcctcttcaattgcgcctaaggcctcgttcggatagagcccggccttttccctccaatccctagggatattggtccacctcccctgccgcatcgcatccctcgcgcgcgccgccttcctcctcccttcctccccgctgtacatgctggacagagtgaagcagtcttctccaagcccagatccacgacatcagccatcagttgaagcagttcgggggactcaaaggccggagggcttgttcgccaacctagctcactgagctgccaagctcgcttgtattgttaaaaaaaaagggttcaagggctattcgaatgaggaagcgggaggaagaggatgacgatatgattcttttccttttccctgctctgcatcttttctactaaacacaagtactgctcaggttatgaactttgcaatgagctaattgtcaaggagcaatcattttaagcatgcaaaaagtaccttttagaagtgtataaatggacagataatgttgcatgatgagtccccctaataatatttttgacgtttgattcagtttcctttacagtccctgtacctgctactttgtgttgcccagacttttttcagtgaagaagttaatggttgcgccaatgtatctcaactatgtgaaataaagataattgcatctttagcatatgaaattgtcctgtttcttcatgatattgttggtttgaaaaagaaaataaagtggggtaagattgtcatgttttttcatgatattgttggctcccagttagtacttggtactcctagtatcctaaatccagaaatagatcaggtgcatgtttctctgaaggatctgttgaattgtcttgtggcatgtagttagttaatttgattaaggtgaatatgctactatggtactaataagaattaattatgtctgattcatgtggatagtctctaagttattaaataaaattgtagaggaattacttacaatcaaaagttagattagatggggctggtcatgggctgaagatttgatgaaatgttccttctgtgattatgaacatgtatgcagttagctaattattaatgaacagttagctgaatttttagaagtgtatttacaggtgcctgtcaggcttttgacacaaataattatactgactttgacatattgttttggtgtgcagttttctgatatgtgatgtccacgggccttttgtttgctgcaccaatgatgcaaggaaatgtattatgatgtatgtcggaaagtgttgttactagatagaactattaaggcaatgaagctcaagttatgtcttgttttcccctcaaaaaaaaagttatgtcttgttcgatttaatacttgtaacactgagagatatttgtgtcctaaatctcaacgtgtattggttcttcatgttggttgccttttttttttttgcaatattgtaacaattacgacatggattttgcagcaggtcttcagtatttctttaattttctacaattttcgt

SEQ ID NO: 15000 - DNA, 2742 bp, Oryza sativa
  ref <308>: DATABASE ACCESSION NUMBER: AK065535
  ref <309>: DATABASE ENTRY DATE: 2001-12-06
ggctcgctgccaccgcctccttcgctgccaccatctccttcgccgccgggcaccatcgccggcggtggccgggttcatgctgtcctgaaggagtggaatgctcgtcggtgattagtaggtcaccagaatatcttctctcctagcctcctgggcttgtttacccaatttatcatcaggtatttctagctccatgtaatcagccaaaaacaagttgttcttcatttggtggtcccttccctatgttggcattggtgcagtaaggagatctatgcttttgttgcatcttgtaagcattttcctccaaggttatgcttattttcggttgataatccagtttcttttttttaccataagttcatcctggtttcatatgcatggatgctttttttttctcctgctatttttttcgtaaaaaaagaatgcatctttttcctgtttcactggttaaaagttccattcaagttctgagcataatacactgaagatcttcagaagggagaaaaataaattagttcttcagaaatagatagccagattgttattataacgcaagaagcatcacatggatgtgcaaccaacatctatctaaagactgcaatctaggatacagaatgaatttatcttcatattccggaaagcaggtttgttaattaatctctttggaatttctgtggcttgtagcttcctgaaatctgaagaaaataaattcggttttactaccaccatgggtgcctgcgtgtcttcaagcaaaaaacggagatcacagaaattgtgctgtatataccggcgttaccgcggaaaagttttgagcaatgcacctatagtacgcgccagtgatgcagggagccgtgctgctcctggagaagttgttcatgtggaggctaaatctgatggctcgaatgtaacatttcatctcacacagttgcagtggcatcatagtgagctagactcagaaaatggaaatgttgtgtgtcaagaagaagcatggttcgactctctcagtattttaggatctgattctgatgaagatttcagcagtgttaatggagacctccctgcaatgtcaaattcagcgggtacacaattaatgcactgtgaagatgcttcaagcattgctgatgcaatccagaagtttgagaggatttttgatggttcatgtgttgctcaagccattggacaatacctgaaaagagacgcgaacaaaatggatagaccaaaccaagcagatattcaagaatcggagaagcctaaaattccaagcccagaatcatgtgatgtatctgatgtgaaggttgatgaaacaaagactagaaatgagggtataaaaattctgacaaaactcagaagaggcgaggatgcatgtaatacgttgaaatcttcgaaagaaggagacaaggctcatgaaagtatcttcaaaagtttgacaccagtgtgcacgcctcgccatgctaataaggttcagcctttggccgtagcaagtcctcggggccaaaagaagaaatcaggagttgtcaggctctctttcaagaggaaatcttttgatggagaacaaactactgaaatatgctcttctaggaggtacttgattcatccaagagctggattgttggttcctcaaggcagtgagaaaatatcagaaagttgttggtccgttcttgagccatcgaccttcaaactacgtggagaaaccttttttaaagacaaagagaagttgcctgccccaggaagttcaccgtatactccgattggtgtggacatgttcatgtccccaaggaaaattcatcacattgcgcagcatattgagcttccatctgctgggccaagcgagaaaattccttccttacttatcgttaatattcagatgcctacatatcctactgctatgttccttggtgatagtgatggggaaggcattagtctagtgttgtatttcaaactgaatgagaactatgagaaggaaatttctcctctgtttcttgatagtataaagagacttgtaaatgatgagatagaaaaggttaaggggttcccattagattcaacggttccgtaccgagaaagattgaaaatattggcagggttagtaaaccctgatgatatgaatctgagttctgcagagaggaagcttgtgcaggcttataatgaaaagccagtcctttcgcgacctcaacacaatttttatgtgggaccaaattactttgagatagaccttgacgtgcaccggtttagcttcatctcaaggaaagggcttgaagcgtttcgagaaaggttgaaacatggtgtcattgatctaggtttaaccatacaggcacagaagcaggaagaactccctgagaatgtcctatgctgtgtaaggctgaacagagtcgatttcgtcgatcatgggcagataccgacgctcttgccttgcgacgacgactgacattttaaccggcatgctaatttaactggatctgatgcttcagtcaagagcagtaggccagtagcaggcgaccacaagttctgtcctgtgaaacttgatgaactcaccttggttttgggagggtgaacatggcatggttgcttcttcgctctggtccatgagatcaacggctctacttcagagttctgtaaaaaccagcgtacatagtcatgcatgttgtttggaaatctggtttgtggatgaattctatgggaaatttgttctgcaaatcaggaattggctggtaccaatcaatctattcattcaattcatctgttctc

SEQ ID NO: 15001 - DNA, 1946 bp, Oryza sativa
  ref <308>: DATABASE ACCESSION NUMBER: AK065536
  ref <309>: DATABASE ENTRY DATE: 2001-12-06
gactccaccccgttcgctcctcttcgccggcgtctgcgcctctccgccggcgcttgctctccacccacccgcgcttcttcgccaccgcctgacctccaccctgcctgtgcttccccctccgccggtgcctaacctctaccatgcccgccgccgcccgctccctctccctctgcccgctccctctcccgcgctgccacctcgcgccaccgtctcggctcccccccgcgccaccgtctcggctccccctcgtgccaccgcctcgacccccgccgccgctgccgagcgctgtcgccgccgacccatcgcgctgccacctccgcttccagccgtccccgtcgccggccacctccgcctctccccctcgcgccgcctccacctcctccgccgccgccatcacgtcgccgtctttgggcgcctccgcctcccccctcgcgctgttaccgtcaccgagtgcagccgtctctgcctccgccaccgctgtcgccgtcgccgagcgccgtcgctgccgcctccgcctcgctccgctgctgctgctgttgccgagcactgccgtagcaccgtcctccactactgccgccatcaccgagcgccgccgctgcgtccttcgctgccttcgccaacggccgctgctctgccctccgttgccagaaccgacgtcaaggaaggcgggtgctgtagcgagaagaggagagccgctccaaacctagaaggcggtacaaatccagtggagcttttggccgcttgctggtcgtcacctcagggaagaagaacatgcgatgagagtgagggccggttccaaatggagggtgtccctagcctgtacccacagatccgccatccccacacgtcgactcatccacggagaagacagtgttggcatctccgtgacaacaaaaaagtgaaaaactaaagagattgaaaagataaaacggttttattttcaaaggttcaccgaggataccaacatggagggaagaagagaggaaggaatgatggagctgtagcaccttcatgtccattatctcggctagcaaaattggcggagagaatgtgatggtggctgacagatcgggaaaagaagttcaatactctaaatctctaatgaaaggaaaagatatagtgggagtcagagcaaagtatttcatagccacctccaaagaacattggtatgcacatatatgaaaatgttggggggtttccccccaacatttttctggaaacaaactgccattactacagaagtattcaatccaacaccattctgcacgctctctctctctctttgccctgcagctccatgtttactttcttcccagttgcttgagcttacagcctgagagaagatgttttgcacttctggatctaagtgcagctgcaacacaaactacaccaaaagaagtaccctgacccctggaagaggagagtaacagcaccaaggttactatcgtcctcgacttggcgctggagaagaaggcgcgacagtttgaggtggccaccaatttcggcaagactgcccatggctgctgctcggctccaactgcaattgcaacccttgcaacgggtgtggttgattcggcaaagaaaaaaataatttgtttattacaaggaatcagggatgcaagcagtttgaagaaatttttggactaatctgaaaagaaggacgcagctctggatgaggtaccactacttcggagcatggagtgtctggcatgttattgcataatgagcaattacaagactatggctacagcacaagagtgaagcattttacagacttggctcgtgcagtatccttactgccttacataaatattggtgctgccaatatatagtgcaatacttattatatcctcagcttatctactcttggtggtatgttatgtcatgtattctttggatatagtgagatgctccaatcaaggtaacgtcggttgaaatttatgctt

SEQ ID NO: 15002 - DNA, 1942 bp, Oryza sativa
  ref <308>: DATABASE ACCESSION NUMBER: AK065537
  ref <309>: DATABASE ENTRY DATE: 2001-12-06
ggcgctggccgtcgcaaggccgccgcatactcttctcccctctttgactcgttttgcgcccaagtcgatccccaacgtctcctcctcgctggttcgcccgccgcgccgcgccgatctccatccgttccacgagcagcggtgaccgggtgctgtcgtcctgctccccgcttcccttccggctccgatttgaggcgctaaagtttccattccgtgttacgaaaagctgcattaggacatggacatggcattgccaatagtgaatgccaccgcagcggtgcttgctcgtgtctcagctgcattcaatgccccttttgcccgcgcagttgtctttggggttcatatcgatgggcacctggttgttgaagggctccttatagcggtcatagtgtttcagctttctaggaagagctacaaaccgcccaagaagccactcagtgaaaaggagattgacgagctatgtgatgaatgggagccagaacctctgtgtcctccgatcaaggatggggcccgaattgacacaccaatgttggaaagtgctgctgctccacatacaaccattgatgggaaagaagttataaactttgcatcagcaaattatcttggtttgattggcaatgagaagattattgattcttgtgttggttcactggagaaatatggtgttggttcttgtggtccacgtggcttttatggaacaattgatgtccaccttgactgtgaggcaaaaatagcgaagtttcttggaactccagactcaattctgtattcatatgggatttctacaatatttagtgtgatacctgccttttgtaagaaaggagacatcatagttgctgatgaaggtgtgcactgggcagtgcaaaatggtcttcatctgtcaagaagcactgttgtttattttaaacacaatgatatggcttcacttgcaaacactctggaaaaacttacacgtggaaataaacgagcagaaaagatcagacgatacattgttgtagaatctatctaccagaattctggtcaaattgctcccttggatgagattgtcagattgaaggagaaatatcgattccgtgttattctggaggaaagccattcttttggtgtgcttggccagtctggacgaggccttgctgaacattatggagttccaattgacaaaattgatattatcactgctggaatggggaatgcattagctactgatggtggcttttgtacaggaagtgttagagttgttgatcatcagcgtctaagcagttctggctatgttttctcggcttctctgccaccttatcttgccagcgctgcggtttctgctgtcagctacctggaggggaacccgtcagttcttgcagacctgaggagcaacatttctttcctgcataaagaactgtcaggtactccaggacttgaaatttccagccatgttctgtcacctatcgttttcctcaaactgaagaaatcgacgggttcatcaaacaccgatatagatcttcttgaaactattgctgagagggtattgaaggaagattcagtttttatcgtggcgtcaaagcggtcacctttggataggtgcaaacttcccgtcggaatacgcctcttcatgtcagccggccacaccgattcagacatctccaaagtgtcctcatccttgaagcgggtctcagcatcagttctgtcagattacatctgatcccctttctctacgagctgtgcactaatctctgtgtgcatgtttggttaatgtacataacctgtacatttgtaggttccgatgattcccgttgccgctcatacttgcaaacacttcgaaaaatagacgtagaacagtgaaattaggtgtgttatgtatcgttcggtcttctggtagtggtttcccggtagaattcattctatatctttaattttgtcctctattcatcacttttatcattttggcttc

SEQ ID NO: 15003 - DNA, 1892 bp, Oryza sativa
  ref <308>: DATABASE ACCESSION NUMBER: AK065538
  ref <309>: DATABASE ENTRY DATE: 2001-12-06
gatcgtctccactcccgatctccccgctccccgcgtcccgtctccgatccacccaaacacccgcaccgccgcgctacgcgagcacggcaccgcggcgcggcgcgactccgcaggcgacaagccgaggagaatcccgcgcccgcccgcccgcatcaccgccggatggccgccggccgtcgccggtagggcgataggcgggtagatccagatccggcggggcgggatcatatacaccccgcgccgatggcgggcgcggtgtcggcgctgttccttctggacatcaagggccgcgtcctcgtctggcgcgactaccgcggcgacgtctccgccctccaggctgagcgcttcttcaccaagctcctcgacaaggagggcgactcggaggcgcactcgccggtggtctacgacgatgccggggtcacctacatgttcatccagcacaacaacgtgttcctactaaccgcctcccgccagaactgcaacgccgccagcatcctcctcttcctccaccgcgtcgttgatgtgttcaagcactatttcgaagagttggaggaagagtcgctgagggataactttgtcgttgtgtatgagttgcttgatgaaatgatggattttgggtacccacaatacacggaggcgaaaatcttaagtgaattcattaagacggatgcgtacaggatggaggtatcacagaggccacctatggcagtgacaaatgccgtgtcatggcggagtgagggtattcggtacaagaagaatgaagtgttcttggatgttgtggagagtgttaacattcttgttaacagcaatgggcagattgtgagatcagatgttgttggggcactgaagatgcggacatatttgagtggaatgcctgagtgcaaacttggattgaacgatagggttcttttggaggctcaaggccgagctactaaaggaaaagcaatagatcttgatgatattaaatttcaccagtgcgtgaggttggctagatttgagaatgatagaactatatccttcatacctcctgacggatctttcgatctaatgacatacagacttagcacccaggtataaccacttatctgggtggaagcacaaattgagaaacattcaagaagccgaatagaacttatggtgaaagcaagaagtcagtttaaggaaaggagcacagcaacaaatgttgaaattgaagtgcctgttccttcagatgctacgaaccctaatataagaacttcaatgggctctgctgcatatgcacctgagagagatgcaatggtctggaaagtaaaatcatttcctggtggcaaggattacatgtgcagagctgaatttagtcttccaagtataactgcagaagaagcagctcctgaaaagaaggcaccaatacgagtgaaatttgagataccatatttcactgtgtcgggtattcaggttcgctatctgaagatcattgaaaagagtgggtaccaggcgcttccttgggttagatacattacaatggctggtgaatacgaactgagacttatatgagttatctctgatatggctgctcaaagattttgatgctaaatttcaactcccaagatacatgtttgatgctcgatatacaacatatagttggcattgggacgttgccatggaagtctttgaaaagctcaaccatgcaaggtttttctgtctcgttgttcatcttgttagtgttactttaccatggttactgtaagttacccatcaagtatagctttgaaaaaaactttttttttgttcacttgtatcattattgatttatttttgtgggtgtcgaactttcccccttttgtactacacaaaaatcttgagctgaattggtataaatgaaatacctgggcggtgcttttgaagtccagatt

SEQ ID NO: 15004 - DNA, 2801 bp, Oryza sativa
  ref <308>: DATABASE ACCESSION NUMBER: AK065539
  ref <309>: DATABASE ENTRY DATE: 2001-12-06
gattctctctgccaaacaaaaaaaaaggaaaaaaaaccaccgcttttcgcagtgcgcttcttctctctccctctctgctctgctcttcctgagctccgcggcaaggaagcttctggaaggttctgcgggatgacgacgagcagctggggtggtggtggtggtggtggcggtggcgccgtgcggctgtggtgctgcggcctcctcctgatgctcctttcaggcggaggcgggggcggaggcgccgccgcgcagaggcccccggcctacaagaccctctccggtaacgcgcccatcgtcatagctgaaggtggcttttcaggagtgtttcctgattccagcaaaaatgcctacgtttttgccttgtcttctacctcgggtgacaccgttttgtggtgcaatgtgcaactaaccaaggatggtgtcggaatttgcctccgggatttacttatggacaactgcaccagtataagccaagcttaccgagcgggaaagaaggcataccttgtcaacggcgaagaaaaaaaaggatggtttcctattgactataccatgtcttcgctgcaaagtgttatcttaacacaggcaatttggtctcgcaccgacaagtttgattttgcattccttcccattcttcctgttaccaatgtgatagatttggccaagccatcttctgtttggctgaatattgagcacgatattttctacagacagcatggtttgaatatgacaaaatacatcctttcaattccgaagggtggttctgtgcagtatatctcatcacctgaattgggttttctccaaagtatatcaggaagagttaatcgcaaaacgaagctagtgtttcgttttcttgatgcaaccagttctgatccttcttcaaaccaaacatatggttctctgttgagtaatttgacatttattaagactgttgcctctggtataatggttcccaaggagtacatttggccagtgacaactaataactatattcagcctgccaaatcaattgtcagagatgcccacagtgcaggtttagaaatatatgcttctgactttgcaaatgatagaattattccgtataattacagctatgatccgttggaagaatatttgcattttgttggtagtgataacttctctgttgatggagtattatctgagttcccactcactgcagcagcggctattggttgtttcactaatttgaatgtaagcagtaagacagatcatgggagcccattaattatctcgcacaatggtgctagtggagactacccagactgtacggatttggcttatcagaaagcggttgatgatggcgccgatgtcattgattgttccattcagatgaccagtgatggagttcctgtatgcatgagttcaattaatctgtttgagaccacgaatgttcagagaacccctttcagcaatcgtgcttctatctttaaagatattcagcctactccaggaatcttcacattcaatctcacttgggctgatattagcagtagcgatttgagacccaagatatcttccccagagagtatatattatcttgtaaggaacccagtgcacaaaaatgcgggaaatttcttcaggttatctgactttctaacatttgctaaggataaagatttgtctggcatcatgatcatcataaagaatgctgtatttatggcaaattcattaggatttgatgttgttgattctgtaaccaaagccttaagtgatgctggctataataatcaaactaccaaagccaaggaggttatgatccagtcagaagatagtgctgttcttgtcaacctgaagcagctggaaaccaaatacaagcttgtctacactctcccatcaactatcggggatgcttctgcttcctcactggtagatgtgaagaaatttgctgatgctgtcattgttgacagggaatctattttccccgagagccagggctttatcatgaaggaaacaaatcttgtgaaagatctccgttctgctgggctagctatctatgcacaggtgttccggaatgagtttgtatcaccaccttgggatttcttttcagatgtaacagtggaaatcaatagctatgtccagtcagttaatattgatggcatcataactgattttccgaaaacagtcagaagatacaaaatgaactcctgtaccggtctgggagttaacatgccttcatacatgaatcctgcggaaattggcggcctagcgcagctactcaacggcagccaagcccagccaccagctctggcaccaatgccggtactgaactcatcagacgtcactgaaccgccgttcccttctgccgcgccgaagaatgcacctggcggcgctgccaatgggagcacccctgcacccggtgcgtcgccgtcaggctctcaggccgctgctgtcatgagagccggcattctaccgatggtgacggcgctcttcgcgtctctgctcatctgagctgacatcctcagttgaagctgtgtaattggttgttcagagttcagttatcacactttccattggattgggaaagctatttattgtctgtcaatgctgtgctgctaggaatccagtagctgttttggtagggaaacatctgaatatccgtttcttcctgctgtataaatctgtttataggacaaaggctacaaatatattctagcaagcactgaactactgaatgaatgaagccgtaagtgtaactagtagtgtacattgctgactgagctggaagcttcagtgtaatgttgtaattaatctcatctcctgtctgaagagatgcattttgtatg

SEQ ID NO: 15005 - DNA, 1454 bp, Oryza sativa
  ref <308>: DATABASE ACCESSION NUMBER: AK065540
  ref <309>: DATABASE ENTRY DATE: 2001-12-06
gggagagctccgccgccgaccaggcgccccctcctcccgccgacgccggcgatcccgcgagccgctccctcggcctcgatcaagccgacgcaaccgtgggcggcggcggcggcgacgaaaccctaggggctcctccctcgaccctcgcctccgtcgctcaggacaccctggacgcctattcggccgccgacgcgctgcagagcctcaccgtgggcggctccgctgcggagccggagcgtgctctcggcgaacccgccgtcgacgcaggagatgctaaagagtcctcgaaggagagcagtgtggtggagcaggtggaatctatggccgatcagaaggttgtcattgctgaggggagtggtgagcagaagcgcaaggtcgtgaaaaagagcaaggtagagaaggacagagagctgtttgaacttgcgcaggcgtaccacaaggtggtagcagagagggatgcagctattgcagttaaagagaaactagagtctctttgtagggagtttcagcgtcaaaataaaatgctaaaggaagagtgccgaagggtgtcaacagaggggcagaatatgcggatggagttatccgacaaattcaataatgctataaaggatgtgagcgtcaagcttgacgagcagaaaaatgaatgcattgctcagttagaagagaacaacttgctgagaagtaaactcaaagaccttgcagatcaatataatatcacacagcagaaatatgctcatcagttgaaagaaaagatgctggaacttgagctcgccgatctgaaaatgcaacaacatcaagagaaaacagctcaggaacaaacccagatgcagctatatgctgatcaagtttctcaacttatgtctaccgagaagaatttaaggttgcagctagctgctgatggagaaagatttcagcagtttcaggatgccctcacaaaaagcaatgaagtctttgagacatacaagaaggagatggaaaagatggtgaagcttataaaggatctaaagaaggataatgaattcatgaagagtaaatgtgagaattcagatgttgctctagtgaagttgattgaggagcgtgagttaatgaagaagcaagttgataagttcaagaatcaaaaagagaagctggaatctctatgtcgatcattacaggcagaaaggaaacaaagcccgtccggtggtactcctgatgccacttctaacgaaacaaatctggcaactatagaatcatagtcctaccgtgcttcacggtgttctttgtggattgccaggatttgaagacagggaaatggatatgtatgatgtttatcattttatattttccttgcgattttgtaagtcctgaatgagagtatcacacatccggctacgcggcttacatgcctcgccatttgagccatctgagagattttctaaggcctcgcatggaatgggaagcaattcaattttagc

SEQ ID NO: 15006 - DNA, 1920 bp, Oryza sativa
  ref <308>: DATABASE ACCESSION NUMBER: AK065541
  ref <309>: DATABASE ENTRY DATE: 2001-12-06
gtttcggcttcatatcatccggcatccagagaaaaatatagcaacgaaaaaaaaggagaaaaaaaaaacagtctctcttccggtttagttggtgatgggaagctcagatttctcgtggacattgcctgatcacccaaagctccctaaggggaagccggtggccgtggttgtactggatggatggggtgaggctgatgcggaccagtataactgcatccatgttgctgagacaccaacaatggattcgctcaagaagggtgctccagagaagtggaagcttgtaaaggctcatggaacagctgttggtctcccttctgatgatgacatgggtaacagtgaggttgggcataacgcacttggtgctggtcggatttttgctcaaggggctaaacttgtggatactgctttggcctctggaaaaatttttgaaggagaagggtttaagtacattaaggagagttttgatcaaggcactcttcatcttattgggttgttgagcgacggaggtgtccactcacggcttgaccagttgcagttgctcctgaatggtgcaagtgcgaatggagcgaaaaaaatccgtgttcacattcttactgatggacgtgatgttttggatggcacaagcgttggttttgttgaaacgctagagaatgatctttctcaactgcgtgccaagggcattgatgcgtgcattgcatcaggtggtggaaggatgtatgttaccatggaccgatatgagaatgactgggatgttgttaaacgtggatgggatgctcaggtgcttggagaagcacctcacaagttccaaaacgctgttgaagctgtggaaacactccggtcagagaccaaggctaatgatcagtatcttcccccatttgtgattgttgacgatagtgacaaggctgttgggcctatagtagatggtgatgcagttgtgaccttcaatttccgtgctgatcgcatggttatgattgctaaggctttagagtatggagattttgataaatttgatcgtgttcgtgtcccaaagatccgatatgctggtatgcttcagtatgatggtgagctgaagcttccaagccactaccttgtttcaccaccagagattgagaggacatccggtgaatacttggtgaaaaatggcatccgcacctttgcttgcagtgaaactgtgaagttcggccatgtcacatttttctggaatggaaaccgctctggatacttcgatgaaacaaaggaagagtatgtggaaatccctagtgacagtggtatcacattcaatgttaaacccaagatgaaggcccttgagattgctgagaaagctagagatgctatccttagtggcaagtttgaccaggtccgcgttaacctcccaaatggtgatatggtgggtcacactggtgacattgaggccacagtggttgcttgcaaagctgctgatgaggctgtcaagatgattctggatgccattgagcaagtgggtggcatctatttggtcaccgccgatcatggcaacgccgaggatatggtgaagaggaacaaatccggccagccacagcttgacaagaaaggcgaaatccagattcttacctcacacactcttcagccagtgccagttgccattggaggccctggcctacattctggggtgagattccgcaacgacgtgcagacccctggcctcgccaacgtcgccgccaccgtgatgaacctccacgggtttgaggcccctgctgactacgagccaaccctaattgaagtagttgacaaataaattaaatgtaaacagcggattttgtcgctgtgattttgctatgggtcagagaaatggtctctgcgatgttgaatactccgtttttatgagcagtctgctggaacctacgagggtttttataaaaacgaaactgatttatgatttgc

SEQ ID NO: 15007 - DNA, 1865 bp, Oryza sativa
  ref <308>: DATABASE ACCESSION NUMBER: AK065542
  ref <309>: DATABASE ENTRY DATE: 2001-12-06
ggatcgccgttggatctcccctcctcgccgtcactcgctgccggataaggaaccaatgcttcgcaccggcggcggagcgcgagccacggcggcggcgcagctgctctcctcctcctcctcgccgccgccgctccgcctcccccgacgcttcctctcgctgacggccaccccctacccgctctactacgacctcctcctctaccgcccctcctaccccaatccgcccaaatcctccgccgccgatgaccgccacacccggcccaccgacgaccacctcgaccgcgccaagcgccggtacctccggaagcgccgcagccgcctcctccccgaccccgacgccaccaccgccaagccctcctcctcctcctcgtcggagttcgtggagctgaagccggaggtggtggacttcccgcggctgcacgcgcgggaggaggcgctctacttccacgacgcgttcgcgctaccctgggagaaggacaagcactaccgcatgctctaccgcctcgagaagaagtacttcccggaccaatccctcgacaacgccttcgtccccgccgacgcctcgccgccttcctccgacgccgccgacaagggcctcgtcttcttcgacgacgacgataacaacaaggaggcggaggtgaagaagaagaaggatggcgaggatcgaggggaggtgttggagaggaaggtggaggatttcttcaggtcattgaagaaaggccctggccatggcgaggctaacgtgatgaaggcgaagaagaaggagcctccgcaggtgaggcacgaggcggatgaatggccgcagccgcatctcgcgagcaggagaacggagctgccgccgaggtggaacggcccgaccgggacagtcgtgctcatcgacaagcccaaaggctggacttcatttactgtttgtggaaagctgcggcgattagtgaatgtgcaaaaggtcgggcatgctggtactctggatccaatggcaactggactgttgattgtttgtgtgggtaaagcaaccaaagttgttgatagatatcaaggaatggttaaaggctatagtggtgtttttcgacttggagaagctacatcaacctgggatgcagattcaccagttgtccagagagaaccatgggaacacattaaagatgaagatattagaaaggtagcagcatcattcaggggcgagatatggcaagttcctccaatgttttctgccattaaggttggtggtgaaaaaatgtatgacaaagcaaggaggggtgaaacagtagagctttcaccaaggcgaatatcaatacaccagtttgatattgagcgcagtttagaagacagacaaaatctgatatttcgagttatttgctcaaaaggaacatatattcgatccctctgtgcagatttggggaaagcgctcggaagctgtgctcatttaactgccttgcggagagactcaattggcgacttttcagtcaatgatgcttggagttttgctgagctggaggaacaaatcacaaagggatatttatgattactcaccatgccatttggcaaaattgcagccatcgttgggttcagtttgagtttcagcgcttagcgaacaattgctttcttccaatcttccctggtaggcaattggtcgttgagtactgagaagctattaaccaacagtaacgctcaacccagagatcagcacttaatctgacgtttcagaccttgggggaaaggaattcattctggtgtccctggacactacggatgtagcagctttatatattgcaatgatgcatacctgatgtagcatgcatcctaaattttgatgtggaacattgtcaacattacgatgaaatagaatgtggttatacttgattatg

SEQ ID NO: 15008 - DNA, 2291 bp, Oryza sativa
  ref <308>: DATABASE ACCESSION NUMBER: AK065543
  ref <309>: DATABASE ENTRY DATE: 2001-12-06
agaaaagtccagcacccaaactcgatcgagaattcgctcctcctcactccgccgcccgacgacctcgccggcggccgcccccaccccgccggccgccgcttctgcttcccgcggggggatcccttccgctcttgagcgggactcgtgagccccaaggcagtgcctccttcactcaaaaaattgtctccgatctaattaagccctccgccgccgctgcctcgccttcgccatggaggaagccgtgcgggtggacctcgacaagctccccatcaagcgcctccacgccatcgacgaggccggcaacgagcactacccgcccgacaccagcagcgaggagcagcgcctctccgccatccgccgcatcgacttctcctgggtcatcgacaaggacgccaagaagcccaagaaggacaccgcccagcagcagcagcagcaggcatggccgtggcagggcatgatggagagcctgcagcaggcgcagcaggagctctccgtcgtcattgacctcatctccactgtcgaagccaatgatgcagtggcagtcgctgggatgctcaagcccaaatcgctgccaaccgaaaccttagttgacaccgcagtctctgcagccaccaagcttcagcgcgttcggcatttgtcacgctacttcaaacaatctgccaaaacaatggagcagcagttccaaaaagagtctaggttctatggctcattaatcagattgcagcagaactggaaagtgaagcggcaacggtttggtggaagtggtccaggaagtgagggcttcatgtttgatctgatcgacacttctcaattggacacagcagcaatgcctcgactgtcatcattaccattgattccaattgaccaagactcatcaggcactttgtccgtacaagtccctcaaaaatcttgccgtttcttgagtcttaattttcgaggggacagtgccaatggtgtggaaaactacggtcataaactgaaagatggcatctcaagcatcacttcctctgaaacagacaatgatgatgtcaataaatccatcaaacatgcacattctattcttcgcaacatccacaagtcaatatttgaggagcaggtatttgatatggtgatccgtgagacatttgtccaatctcaaggcatcaatgtgactggaatgcgtgaagattttctccaattagctattggtcaggaatgttcattgtgcctctcgcttgctcattctggagatggtagtgactcagaaatggtagaccatgaagaccatgccaattcagaggatgcctcaaatcttgtgttggtcactatgaatgggaagctggaccctttaagaaaagacgtgacagggtttcctaatcccagaagtctggaaatttacttgctacaattgtttcatgagaacattcttaggaaggtcagggagaaatcccttaacattggtcgctaccaaagtcctgctcaggttgcaggtgatgattatggcctgctaggtcatttctgcttgacagtggctcacaggatattttctaacaaagtactcgtggagcttgagagtgtggtcagcagggttccatatctccatttgcgttctcttcctacttggcattctcgaacttcctcctggtctctatgcttgaaagttcctcagcctatccttgctgcagatcggattgcaaagccttctgataaccatgaacttaagtacaaatccaggtcacagttcaatactaaggtgatcgtgaaagatagccaaattagtctaatgggtgaaggctccccaagcattgctggatcattgactgggaagccctccgatggatatttggtaaatagctacaattgtgacttggaggacctcccaacaatgcttctgcagcaggttgctagtcaagtaatccactggcttcatgaagaagcattggttctcggtatgaatgtgactagagatttcctgtgcctttactttgatcttgagcaaggtgaaacgcttggcctggtggcgaatgttgacccggacgacacctgtggatgcatttcttggtaccttactattgatcacccaacggaggatgggaagatgtcagcagatagtcaggagtttgagaagcgtaggtttttgggctatgtttctcttgaagtattgtactctacccttatggacctgataaatttgtgtaacgctggcgcccaccactgacatctatctgaatatccatgtaatatcacttactaccttgtagattggtcctttgcttaggcgaatggaatcctgttggctgttgcccgctatc

SEQ ID NO: 15009 - DNA, 1388 bp, Oryza sativa
  ref <308>: DATABASE ACCESSION NUMBER: AK065544
  ref <309>: DATABASE ENTRY DATE: 2001-12-06
ttggagagaacaaacggcatcaatggcggccacatccctcctctcccgcctcctcatcctcccaccaccggcgccggccgccgccgcctctctccggcagcggaaacccgccgcagcgcactccctatcctccagggggcggaggccccgcctcgcggtacaggcggtagcccccgcggcggcggaggaggagaagggcgggctgccggcggcggaggcggagaggctggcggagttcctgcgggaggacctcccccacttgttcgacgacgtcggcgtcgaccgctcggcgtacgacgaccgcgtccgcttccgcgaccccatcacccgccacgacaccatcggcggctacctcctcaacatccgcctcctcaagctcctcttccgtcccgacttctacctccaccacgtcgagcagacagggccgtacgagatcaccacgaggtggaccatggtgatgaagttcgttctactgccgtggaagccggagctggtcttcactggcctctcgatcatgggcgtcaaccctcagaatctcaagttctgtagccacgtggatatttgggactcaatacagaataatgaatatttttcttttgaaggactgggggatgtcttcaagcagctacggatttacaagacccctgatatagaaacaccaaagtaccttatcctgaaaaggacggcaaactatgagattaggagttatccaccattcttaatagttgaagcaaaaggagataaactaaccggatcatcaggttttaataatgtaactgggtatatttttggcaagaatgcttcttcagaaacgattgcaatgactacacctgtcttcactcaggcttctgatgacaaactctcagatgtatccatccagatagttttgccgatgaacaaagacttggacagcttaccagctccaaacacggaagctgtcaacttgcgaaaggtagaaggtggcattgctgcagtgaaaaaattcagtgggagaccaaaagaggaaattgtgatccagaaagaaaaggagctgcgctcccaattactcaaagatgtgttgaagcctcaacatggttgtttgcttgcacgctacaatgatcctagaacacagagctttataatgaggaatgaggtgctgatatggttaaacgacttcacgctggagtagtagtcttcactgtctacaacacatttctgcaacatatagacacttagcattggagctttcggagcatcatagcaaggtgaaaaaaattaggaagatgcatggatgaaatgataggagaatgtaaataccgaaaaggtcactatattacatggtaattctagtccatatgaaaaatgtttgtgtataacaaaagtgaaatgaacaaaatgaaactgtttag

SEQ ID NO: 15010 - DNA, 2051 bp, Oryza sativa
  ref <308>: DATABASE ACCESSION NUMBER: AK065545
  ref <309>: DATABASE ENTRY DATE: 2001-12-06
ccttccacctccacctccagatccaggccgttgttccccaagccttccccttcccacctcgtcccccacgacctcgcctcctcctggtgctgcgctccgcacggccacacccccacccccgccgccgccgctgcctcttcctccccgtcatcccaatccagctcccccgccgccgaaacgatggatcccccgccgcagccgcccacctcctacccgtccagctacaccaagttcaactccgcgctcaacgccggcctcctcaacccaatgtccccgccgccgctgccgctcgacaagacgcgctccagcccaaccctcttcgacatgatggccaacgagcaggactaccacccgcgcaccgccgccgccatccactccatcccggccccgccgcagcaggcgcacccgctgcagcccgcccgctccatggacaggcaggtgctgctccaggatcgcgtcgccgagctcatcggcagctgcagccccgggaaccagttcaacgacgccgactcctccgacgtccgcctcaccctcacctccaaggatggcctctccgtcacgctctgcgtgcaccgccacatactcgtcgcccacagcaggttcttcgccgccaagctctccgaccgctggtccaagcagcagaggacgttgccgcacatcgttgagatctccgactgcgacgatgtcgaggtctacgtcgagacgctgcggctcatgtactgcaaggatctccgccggaggctcatgagggaggatgtgagcaaggtcctcggcattctaaaggtgtccgcggccattgtgttcgacgctggggtcctgtcttgcttggagtatttagaggcagctccgtgggcggaggatgacgatgagaaggtggcggcattgttgacacagctgcacctcgagaactcgggcgctgggggggtgcttaagagggtctcactggagttggctccctcggcagtggctgaagaggtggaggtcggcagtggttgcaatggtggtggcaattcaggtggtggggaggaggtgttagtgaggctcctgcaggtcgtcctggaagggaaggacgagaaggcaaggagggagatgaaggggctggtttccaaaatgctcagggagaacagcacatcgcgtggaggagccattggaggtgacctccggaaggagtcactgtattcggcgtgcaatggctgcttgcgcctgctgcatgaacaatttgagatggctgcagggggtgaccaatctgaggtagcgcagattgccaggcaggctgacaaccttcactggatgcttgacatccttgtcgaacgccagattgccgaggatttcttgaggacgtgggcaatgcagattgagttggcagagttgcatggcaaggtgccagcaatacaccgctatgaagttagccgagtgacggcaagactctttgttggggttggcaagggacagatcttggtgtccaaggaggtccgttgtcaactcttgagtacttggttagaaccattctatgaagactttggatggatgaggcgagcctgcaaggggcttgaccggcatttgattgaggatggactggcaaacaccatcctgacactgccgctagcaactcagcaggagatcttgctggcatggttcaatcggttcctgaactctggggaggactgcccaaatattcagagaggattcgaggtatggtggcggcgtgccttctggaaaagaaacggtgaacccgagcaaccacctcgtttgaggatcacagcaatctgtgagaattcttgattacgttggttcagttctcggatacaatgtgtggctgatgttgtgatgtaaaggttaatgctgtgtgatctgtagttgtgatctaactgtcttgttgagctctctattatttctgtttgatttaggtgattatacacgagtatgttcatcttgttcaattataccagatctgatgtacctctatgctggatccattttgaattggaaatgaagtaggatgtttttttttcccacctagtataatcagtgttacctggacactcttatcc

SEQ ID NO: 15011 - DNA, 3036 bp, Oryza sativa
  ref <308>: DATABASE ACCESSION NUMBER: AK065546
  ref <309>: DATABASE ENTRY DATE: 2001-12-06
gactgctccttatattcctccgccgtggcagtcgctcctctaccgttgctcctctccccttctccgcctccgctgagctctcaccgcttccgccatggccgcctcgcgggggccgccgcttctagggttccgagccctcgcgctcgcgctgctgctcgcgatcctcctcttgctcggctgctccgccgccgccgcgtatgcgggggcggagggggtgctgaggcaggtggttgggaggaggggcgacgacggtggtggtgggaacttcttcgagccgttcaacgtgacgtacgaccaccgcgcggtgctcatcggtgggaagcggaggatgctcgtctccgcggggctgcactacccgcgcgccacacccgagatgtggcctagtttaattgcaaagtgcaaggagggtggcgcagatgtaattgagacctatgtcttttggaatggccatgagccagccaaaggtcagtattactttgaagaaagatttgatcttgtgaaatttgcgaagctggttgctgccgaaggtctatttctttttcttcgtatcggcccatatgcttgtgcagaatggaatttcggtggtttcccagtttggttacgtgacatccctggcatagaattccgaactgacaatgaaccattcaaggctgaaatgcagactttcgtgacaaaaattgtcactttaatgaaagaggagaaactttattcttggcaaggtggtcccattatattacaacagattgaaaacgagtatgggaatattcaaggaaattatggccaagcagggaagagatatatgcaatgggccgctcagatggcaattgggcttgacactggcattccttgggtgatgtgcaggcagactgatgctccagaagaaattatcgatacatgcaatgcattttattgcgatggtttcaagccaaattcttacaataaaccaacaatatggactgaagattgggatggatggtatgctgattggggtggagcattacctcacaggccagctgaagacagtgcttttgctgttgctcgtttctaccaaagaggtggaagcttacaaaattattacatgtactttggtggaacaaattttgcacggacagctggtggtccacttcagataacaagctacgattatgatgctccaatcgatgagtatggtatattaaggcagcctaagtgggggcatctgaaagatctacacactgctatcaaactttgtgagccagctcttattgcagtggatggctcacctcaatatataaagttaggatcaatgcaagaggcacatgtatattccactggagaagtccatacaaatggaagcatggcaggaaatgcacagatttgctcagcttttcttgccaatattgatgaacataaatatgcatcagtctggatctttggtaaatcttatagtctaccaccatggtctgtgagcatactaccagattgcgaaaatgtggccttcaatactgcacggattggtgcacagacttcagtttttactgtagaatctgggtctcccagtcgttcaagtagacataagcctagtatcctctcacttacatctggaggtccgtatctctcaagtacttggtggacttctaaagagactattggtacttggggtggaaacaattttgctgttcagggaatattagagcacttgaacgtaacgaaggacatatctgactacttgtggtatactaccagggtaaatatttctgatgcagacgttgcattctggagttcgaaaggggttcttccttcattaacaatagataaaattcgtgatgtagctcgtgtatttgtaaatggcaagcttgcaggcagtcaagttggtcactgggtctcactgaaacaaccgattcaattggttgaagggcttaatgagttgacattactttcagagattgttggcttgcagaactatggtgctttcttggagaaagatggagctggatttagaggtcaagtaacactcactggcttgtcagatggggacgttgacctaactaattccctttggacatatcaggtcggcttgaaaggcgagttttctatgatttatgctccagagaagcagggatgtgctgggtggagtcgcatgcagaaggacagtgtacagcctttcacttggtacaagaccatgtttagtacccctaaaggtaccgaccctgttgccattgatcttgggagcatgggaaagggtcaggcctgggtgaatgggcatctaattggtcgctactggtcactagtagcgccagaatctgggtgctcatcttcgtgctactacccaggagcctacaatgagaggaagtgtcaatcaaactgtggaatgcctacacaaaactggtaccacataccaagagaatggttaaaagagtcagataatttattggttctgtttgaggaaacaggaggtgatccctcgctgatatcactggaggctcattatgccaaaacagtctgttcaagaatttcagaaaattattatcctcccctttctgcctggtcgcatctttccagtggccgtgcctcagtgaatgcagcaactccagaactgcgcttgcagtgtgacgatgggcatgtgatctctgagattacatttgcaagctatggaactccttcaggtggctgcctgaacttctccaaagggaattgccatgcatcgagcactctggatttggtgacagaggcatgtgttggcaacaccaaatgtgctatcagtgtttccaacgatgtctttggtgatccatgccgaggagtcctcaaagatttagcagttgaggccaagtgttccccaccatcaaccaccaaagagcctcgcggtgagatgtgatctggaattcatcatggcacatctgttgcgaacaaggtagggctcacttaactctgcaatggcacacacagcattgctgtacgcggtttgtccctgtacatccatgtgtaaaaagattacctaaaaattgaatgaaatgtgaataaaaatgcaaaggagatttcccttgaattggttatatt

SEQ ID NO: 15012 - DNA, 1501 bp, Oryza sativa
  ref <308>: DATABASE ACCESSION NUMBER: AK065547
  ref <309>: DATABASE ENTRY DATE: 2001-12-06
gatcttttcccagtctccgcgacctcgagcggtcataaaccctcctctcctccccctctcccctcctcttccccgtgcgacccgcccaacccaaaccctaggtcacccagcgccgcggcgcccccggttgctgacttgccgcgggaaggtggatgagcaggcggtggagccggacgatctacgtggggaatctccctggtgacatcagggagagggaggtggaggatctcttctacaagtatggccgaattgttgatattgacttgaagatccctccgaggccaccaggctatgcttttgtagagtttgaagatcctcgtgatgctgaagaagcatgtgctggcagggatggttataactttgatggacatcgtctaagggttgaacctgctcacggtgggagaggtaatggtggttcctcctttgaccgccccagcaactttggtggtggaggacgccgtggtgtgtccaggcactcagaataccgtgttctggttactggtttgccttcttctgcatcatggcaagatttaaaggaccatatgcgcaaggctggtgatgtttgtttctcagaagtgtatcgcgagggcggcggtactgtagggattgtggactacacaaactatgatgacatgaaatatgctataaagaaacttgatgacagtgaattcaggaatgccttttctaaaggtcacataagggtgaaggaatatgatggcaagcgcgcccgctcctattcacgtagccgaagcccaagtcgtagccgaagcaaaagcaggagtctaagtaaatctcctagaactcgccgttcagcatcccgatctcgatctcgatcaaggtctgtttcttcccgttcacggtcagcatcaaaagggcgctctccatcaagacccgattatctcttcatttatctgggattgtgcggcgatctggggattgcgcattaggatattgaggatgggatttcctcaatttgctcttggttgtatgagagattgggcatagcgcattgtttggaattctggacataggagcattaaggattgacgatatttggataatgatggtacaatgactaggaatgtgcttggcgttcaatgcttgagatcaccagcaagatccaaatctccaaatgcttctcctgcaaatggtgaagcatcaagccccaagaaacggagcccaagcaggagcccatctcgttcacggtctcctgatgcgaaatctgaatagaagtgatatgttgatgtgagcagtgacacggacttctcatgtacggctatttgctgtccttgatgtccgattacatccgaatcttagctgtggtgcaatgaagctccaaaaaaaatgatactatgaatttgtagtaatgaaaacatcaaactatgcacttcatgtggccttctgtggctggtcttgttcccttgggtttttggtagttcgccgaatgctactatctggattatttttactcaaaacatatgtcggatgcttattgatttcc

SEQ ID NO: 15013 - DNA, 3553 bp, Oryza sativa
  ref <308>: DATABASE ACCESSION NUMBER: AK065548
  ref <309>: DATABASE ENTRY DATE: 2001-12-06
gagcagagagacagacagacagacaggcagacagagtgatcagagcgagataacgtgacacagagacacagagaggcaaagagatgatgaggatacgctgcagcagcagcagcagcggcggccatggtggtcatcagctcatcctgtgctggctggtgatcgcgtgctcatgggttgcagtagctcgagctcaggctcagaagccggcaggagcaacaactgatccagtcgaagtggcggcgctgaacacgattctggggcgatggggaacgaagccgcccaaaacttggaacatcaccggcggcgacccctgcaccggcaccgccgtcgacgacaccgacatcgacaacaaccccatcgtcaaccccggcatcaagtgcgactgcacattcaacaacaacaccgtctgccgcatcgtcaagctgagggtgtacgcgctgaatgttgtcggtcagatacctgcagagctggagaaactcacccatctagctaacttaaacctgatgcaaaattacttgactggtcctgtgccatcattctttggcaaatttcccatgcagtacttgagcttagcaatcaatccattatctggaccacttccaaaggaacttgggaacctcacaaatctcatctcattaggtatcagcctgaacaattttactggaaaccttcctgaagaattgggcaacttgaccaaactcgagcaaatgtatattgatagttctggcttctctggtccattcccttcgacaatttcaaaacttaagaagctgaagatcctgtggatatcagataatgatttcacagggaaaatacctgattttattgggagcttgactaacttggaggatttgaggttgcaaggaaattcttttcaaggtccgatcccagcaagtttttctaagttaaccaagttgacaagcttacggattggtgatattgtaaatgggagctcttcattggcctttattagcaacctgacgtccttaaatgtcctaatattgaggaactgcaagatatccgataatcttggagcagtaaattttactaagctttctcgattaaacttgctggacttgagttttaacaatatcacgggcgaagttcctcagtccatccttaatctgaacagccttcgatatttgtttcttgggaacaatagccttacaggaagcctgccagatgtgaagagctcctcactaaataatttgtatgctaaaatgattttcagcattgcaatgatatattcatttcatacgttcgtaatcctaggctttttgcagagatttttcgtacaaccaactcatgggaaactttccttcatgggctaccaataataatttacaactgaatttggtggcaaacaaatttaatattcgaagcaacaacgatagtattctaccttcaggactaaactgcctacagcaagacactccttgtttcctcggttctccggaatactattcctttgcagtagactctggtagtaatagatctgtgagaggtttggataatactgtgtacgaagctgatgctacaagtctcggagctgcatcatactatgttacggggcaaacacgatggggtatcagcaatgtaggaaaattcaatgaggccccaaatggaagttacctaatgtacagctcgcaacaatttcaaaatgcgttggattcagaattgttccagactgccagaatgtcaccatcgtccctgagatactatggcctagggcttgagaatggaaattacactgttcttcttcaatttgcagagtttgcttatccagacacaaagacttggcaaagcatcggaaggagagtttttgacatatatgtccagggtgatctgaaagaaaagaacttcgatgtaaggaaaacagctggcggaaaatcttttattgcagttaacaaaagatacaacgcaactgtgtcaaaaaacttccttgagatacatctgttctgggctggcaaaggcacttgttgcattcctactcaaggttactatggacccatgatctctgcactaagtatcactccaaattttactcctactgtgagaaatggagttccaaaaaagaaaagtaaagctggtgtaattgctgggatagtgattggtgcgtcagttataggatcagcagccttacttgggatctttgttttggtaaagaagagaagaaaagcggcaaggcagcaagaagaactatacaacctggttggaaggcctaatatcttcagtagcgcagaactgaaattagctacagacaatttcagttctcaaaacgtgattggagaaggcggatatgggccagtatataagggtaagctacctgatggaagaattatagctgtcaaacaactttctcaatcatctcatcaggggaaaagtgaattcgtgacagaagttgcaacaatttcagccgtgcagcacaagaaccttgtgaaattgtatggctgttgcattgacagcagcacacccttgttggtttatgagtacctcgaaaacggaagcctagaccaagcactctttggacatggtagcttgaacctagattggccaacacgcttcgagatcattttaggtattgcaagaggcataacttatcttcatgaggagtccagcattcggattgtgcatagggatatcaaagctagcaacgtcttgcttgacactgatctgagcccccaaatctccgattttggacttgccaagctctatgatgaaaaggagacccatatcagcacgaaaatcgctggcacattcggctatctggcacccgagtatgcaatgagaggccatctgactgaaaaggctgatgttttcgcatttggagttgttgctctagaaacagttgctggccgatcaaacaccgacaattcccttgataatgacaagatctatctctttgaatgggcttgggggctatatgaaagagagcaaggaatcaaaatcgtagacccaaaactcgatgagtttgacagtgaggaagccttcagagtcatctatgccgcacttttgtgcactcaagggtcaccacaccagcgaccaccaatgtctagggtcctggcaattcttactggagacattgagatgactgagatggtgacgaagccgagctacatcactgagtggcaactcagaggagggaacaccagctatataagcagcaactatagctctggatctactactggtgaatttagagagcagagggagacttccccactcaccccttctccaacgataaccggagtcacatatgatggaaggtgaatgcaaatatgttcaaatcgcttctggttttagcttcaagtgatatttttggacattgtggagttgcaacaaatatatggatttattttgttctgaatattttccatactcataaccaagtcatcctggtaatttgtatatgccagttgtatttgcatgggtgctttaaaattcatttagttaaattagttttgatttttttttttttgagaaatgactgacgaatttgttggctagagcacacttccgtaatcacagatgcttggcattgcataaattaatt

SEQ ID NO: 15014 - DNA, 2987 bp, Oryza sativa
  ref <308>: DATABASE ACCESSION NUMBER: AK065549
  ref <309>: DATABASE ENTRY DATE: 2001-12-06
gggtcatctttcttctctctccctccttccttcctcttgatcatctagtataaattgaggaggcttgctggatccatacaacaacaaagacagtagtatcatataacagcaagcaaataagaaagctaggtagggcattcctccctcctcaagtagagaagagctacagctgcagctgcagaggggggcataatggccgtcgggttgaggagatcggacagcattgccgacatgatgccggaggcactgcggcagagccggtaccagatgaagaggtgcttccagaggtacgtgtcccagggtaagaggctcatgaagaggcagcagctcttggacgagctcgacaaatccgtcgatgataaggccgacaaggaccagctcctccagggcttccttggctacgtcatatcctccacacaggaggctgcagtgctccccccattcgtcgcattcgctgtcaggatgaaccctggcatctgggagttcgtcaaggtccattccgcaaatctgtccgtcgagcagatgacaccgtcggactacctcaagaacaaagaggccatggttgatgacaaatggggggcttacgatgacgactcccagctggaagtcgattttggcgccctggacctgtcgacgcctcacctcacgctgccctcctccatcggcaaaggcgcgcacttggtctccagattcatgtcttccaagctgaccgacaacaagaagccattgctggactacctgctggcgctcagccaccgcggcgacaagctgatgatcaacgacatccttgacaccgtcgacaagcttcagacagcactgcttctcgccgaggtttacgtcgccggcctgcatcccgacacaaactactccgaatttgagcagaagtttcaggagtggggactggagaaaggctggggtgacactgctgaaacatgcaaagaaacactaagcagtctctcggaggtgctccaagcaccggatcccatcaacatggaaaagttcttcagtacggtgccctgcgtgttcaccgttgtcatcttctccatccatggttactttggccaggagaaggtcctcggtatgccagacaccggtggtcaggttgtctacatcctggaccaagttagagctctggaagacgaactgctgcaaagaatcaagcagcagggcctgaatgccacacctaagattctcgtgctaacaaggctcataccagaagcaaagggcaccaaatgcaatgtagagttggaaccgattgaaaacacaaagcactccaacatcctccgtgtgccattcaagactgaggatggcaaagttcttccacagtgggtctcccggtttgacatctatccttacctggagagatatgcccaggattcttcagtcaagattctcgaaatattggaggggaaaccagacttggtcattggcaattacaccgacggtaatctagtagcatccctcctgacaagcaaactaggagtcactcagggaacaatagcgcatgctctagagaagacgaagtacgaggattcagacatcaagtggagagaattggaccacaagtaccatttctcatgccagtttactgctgacatgattgccatgaacactagtggcttcatcatcgctagtacctaccaagaaatagctggaagcaaagagaagcctggccagtatgagagtcactatgcattcactatgccagggctctgccgctatgccacaggcatcaacgtatttgatcccaagttcaacattgctgcaccaggtgcagatcaatctgtttactttccctttacacaaaagcagaagcgcctgactgacttacacccccaaattgaggagttgctctatagcaaagaggacaataatgagcatatagggcacctagcagacaggagtaagccaatcatcttttcaatggcaagacttgacaagataaagaacatcacagggctggtcgaatggtatggtcagaacaagaggctcagggaccttgtgaaccttgtcattgttgggggcctcctggacccttcacagtcaaaggaccgtgaggagatagaggagataaacaagatgcacagcctgataaacaagtaccagctcgtgggacagatccgttggataaaaggacagactgaccgagtgcgcaatggggaactttaccgttgcatcgcggacaccaagggagcctttgttcagcctgcactttatgaagcattcggactaacagtcatcgaggcaatgaactgcgggctgcccacctttgcaacaaatcaaggaggacctgcagagatcattgtcgatgaggtttcgggtttccatatcaacccgctcaatggcaaggaggcaagcgacaagattgctgacttctttcagaaatgcaaggaagacctcatctactggagcaagatgtccaccgctggactccaacgcatctatgagtgttacacgtggcagatctatgcaaccaaagttctgaacatggcatcaatatatggcttctggaggactctagacaaggaagaaagacaagctaaacagcactacctacacatgttctataatcttcaatttaggaagttggcaaagaatgtgccaacactgggcgaacaaccagcacaacctacagagagcgcagagcctaataggatcataccaagacccaaagaaaggcaagtgtgcccattcttacgaaatttactgaagaaagagacagggaacaactgactgaaacatttgtcgtttgagcgctgcagaaggacgcaaataaggatccagaggattgcaaccaacttacttggaccactgctcccagcctccaatttctcaacagatggagcttgaagtagagaccaatcgtcagaactttctgaagttgttggagtgagaaatgtattgtataacattgattgtgaagatttaataaatgattactgtgggaataataaaaagattaacatacttggtagcactgactactt

SEQ ID NO: 15015 - DNA, 1941 bp, Oryza sativa
  ref <308>: DATABASE ACCESSION NUMBER: AK065550
  ref <309>: DATABASE ENTRY DATE: 2001-12-06
gatttgaattagagatagagatgaagcccaagcccttcaaggaggagttcaccctggaggagagggccaaggagtcggcctccatgatcgcctcctaccccgccaggatccccgtatgtgatgtgatgtgatgtccacaattgtttctctctcactacttgtttctcctaccagtttccccttccttcaagttcctcatgctgctacagtaccacctatacataactcagccgccatgccatcaaattttgcaaactcacattcttcgcacgcactccaatcaacattatatcatcactgtgccacaataacctcgctcctatattttttttggaattaatcacggggggggggagattccccacctaaattatattggaaaaaaggaagagggggtacaaccggaagcattacagcattagtcggagcgaatagaagaagaaagaagacttttccagttagtcacaaccggcctatcttctctactgaggtgctcagcccacaaagtagcgtcctcaatacatttagccactaaccttgtccgggagttaggaagcccccggaaaacaacgtcgtgtctatggatccaaagtccccagaaacaaagtaagaaaaaaacttggaagtgcttgacaggcaagtggcagggagcagcgaggtcagcaagatcttgaacattcgaaaccacagatatacgcaaggctctccagaattcctgggcgaattgacattggagaaagagatgagtcacagtttcgtcagcacagttgcagacgatgcacctcgctcctatatatgtcgtcatgtgactgaagatgttattcaaatcccttcatgtttctcttgagctgtccaacaactctagcgaaactttactgaaaagaaaatcaaatagatgctgcatacatgttctgttctgttgattctccgctgtgttggttagttatttccaacacaagtacccatttgcgtgcggcagtttcttgtcaatggtttgggtcaacattttcaagcacttaatgagaggatagaggtgctgactgaattacctattccatttttattcatctagcaagtagactgtgatcacatcattttccattatcttaacattgtgcaaaaagaaattagttgggctctgttattcgcaagttattggccattgtatttcctaccctgtttaaatgttgcagattgaatcagggctcagggtcaatcagggctcagggtcaaactcatggagcattcttgggggtattcctagtcctagatagaaatagttcaatttgcactacctacccttttgtctctgcacgttagcttcagttaactctgttgtgaatcagttttgcaagtactggatcctgaaaactaaaccaaaaccagaattcgtacctaaaccatctgtgtcgttgaattccacaggaacacatcaaaactgattacttttcatttgtgcattttcttctgaagtgtgtttcttgaacattatgctaagattctagtatctatgattgcaggtcattgttgagaggttttcaagaagtagtcttccagaaatggagaagcgcaagtacctagttccatgtgacatgccagttgggcagtttattttcatacttcgttcaaggttacatctgtctccaggaatagcactgtttgtgtttgtcaacaacacgttgccccagactgctcagctgatgggcagtgtgtacgagtcatacaaagatgaggacgatggcttcctctacatgtgctacagcagcgagaagacattcggctgaccaactcatccgtggagatctgctttcttttctttcatgtgtatgtgttgctcgaacataaagatgcatgcatgtgcatatattagtatcattagaaaatgcatgaagtgttatactgtacactgattaatgtgaaatgaaatacactagttatttc

SEQ ID NO: 15016 - DNA, 4484 bp, Oryza sativa
  ref <308>: DATABASE ACCESSION NUMBER: AK065551
  ref <309>: DATABASE ENTRY DATE: 2001-12-06
gatacgcgacacagaacacgggcttccctccatgaactcctcctcctttgtcgaagaatatcttccagcaggtgagacattggatctgtccctgtcaatagctacgagcaagatttatcgatgcagcgttggtcaggggcctctccgtctatctgttcctatggaacctgccggccgggggctgcttccatgggagagaaaaaaaatagtctggcggtggttcgttccatagaagcacggcggaagtagtctggctgcggttcgtcccattgaaccggatctgacctgcaatgggtgagatcgatgccgcagttacccgccacaggccagatcgatctaccggcgtcagtgatatcgccgtcgaacagttcccatgttcgagatcgagatgaactaacggcggtcgggcgagatcgatctaccggcgtcagtgatatcaccggcggacggggttctgatctccaaggggagtaaagtctgtcctgtctggtggtgttttttacgatattgtatagaacaacggcgacggcaatgatatcgatgaaaataatttgtcgccctgtttctattcttcagatagatcgtcgccatgatctctccaaggagggaaataacggtgatggcaatgatatcgatgaaaataagttgtcgccatgcatccattcttcagatagatcgtcgccatgacctctccaatgaaggggtggcagtttgcgtgcaggggcttgggacatctttatgtaggattttggctgggtattgcgctctgcatcatccatgcatcgccgtcctaggtctagaacttataagaaagctgagatgaaatcggctatccctacatgagagggaagtccggttcggggtgtctacaattttccctccacgtcgaaagaacagaacatttgcagcaggaggaggaggtgctgcagtgagtggctggaggagatgctgcagtgagcggctggaggagatgctgcagtgaggaggaggaggagatgctgcagtgaggaggatgaggcggctgcagtgaaagaaaatacaccaggggacagatccaatcacttgaagtgaaagagaatacaccaggggatagatccaagcacttgaaattggtgtaaaatgttgaaaaagatccaaataaagagacaattctgtcagtttcagttgctggtgcccaaaatggcagggaagctcaatggactgttgataggactgtgtacacttatgctaacttctatgatgattttaaagccaaggtttttgactttggtgataggctcaagatttcgtttatagaattagttcagcgtcaagaaaatgatctattgcttggatcttttgagaaagagttaagattaaaagtacttctagcggatgaacatgatgaggtatccataaacatttgcttaatcccacacatgttcggttgttaagctaaacgattatctaaatttgttaggagttaaatgactatctaaatttgttaggagctagcatggttgttaagttaaatggctctatctaaatttgttaggagctccaaagtgagaggtttgtcaagatgcaggggaagcatcaacctgttggtttaaaaaatgagaaaaataagcaagtattgttccttttttttccatcttttttgtcagtgtttgtttaagttccatgtccttaatgttttgtgtatagctgttttggtaatgtagtgctccaatgtttggcaatcacggaaccatttgtttcaagactctttggacaacaatttggagaagaatgtatgatttaatcacaatttttttagtaaaaaaaatatttgtttaagtactaaacgtgtagtgttttaggcctaggaaactgtcacgcttgcgacctgcgccgtgatctgaagaggataagaaaaactggtgcaccagccttctttcccactatctttaagcatattcgatcattaggtggtgattttgaggatggcttgggacgtcatcgtgactcttctgagttcttattgtaataacttaactcaacttttgttgttttagtttgcatttcagttatttttgtgtgttatagattatttttcttttccaggttattactacaaaagttatttgatggtacacatggatgtttaacagatatgtttggtggaaaattccgtcgcagtaaagtttgttccaaatgtggaatgctttctaattctgaagaagattttactttgctaatgtttaatatacctcatcgtgaacaagttgttgctgcaacattagaagattgtcttgatcacattgtggaagaaaacgtacatgattcattatcccgttgtgaaagctgtatgaatgaccagaagtcaaccagtaagtgtacatttcatgaaactagagatgttgttattgtgttgcaaagatttgaaccacttacacttgggggttatcgaaagattggagaactaattaactttcctacggagctggacatttcaccatatatgagtggtgttgtaactgacaagcatatatatgaactgtttggaattatagttcatgaaggcggtgttatagggggtcactatagaagttacgtgaaaacaaactgttggtatgaagtcagtgatagagatgtgaaaagagtaaatgaaaattttgtcctaggggcacaagcatatatcctgttctacaacaggaaagaagaggccaaatcattcgatgaggttttagcttttgctgctacagctatgtcttcatctgatgccgtgcctacatcaacttcaaaagattacactgaaagaacattatcacctgaagtatcgtctgctgctctgtcatgttggattgatgctgcacgggtccttgagcccaagagttactcagaccaggatatcctagaaaaatatatcatttgtatggaccgtgacagttcagatgtatctgagaggataaggaatgccatgcggaattgtaatgagtccagacaggagtatcattttaatctccctacaacggatggacctttttatgatgacaacttggggcagtactgtcttcttcggggagctagatttcgaaccattagtacaagcagtaatgtagaagcgaagagagatagggctgttagaatgcacttccttctttctgaaatcttaaaactcctacagctgaaaaaagtgattgacgttggagctattggctatctggagaaatttaagtttgggaattattccaggagtgctcttttacggcgaattaatgatgcatgtatgctcttggggactaacagattatcccttaatatctcagttatgtcaagaggatctatcattgggccagtgctgttcaaagttggagaagatgtgatgattgatgcaagcttaagggctgtacagattccacacgacattcacttggtggaccatattaagttgaaaaaaccagtcagctttgttcttgttgttgaaaaactatcaatatttaacatgcttgtcaatcttaactttcatgtcacacacaattgcataatcatcactggatgtggaaaacctgatatggcaacaagaggtgcagtttttaaacttaattattgcttgccagtcaaagtttatatccttgctgatcttgacttggatgggctccagatatacttataaacttggcagcaaagtaagggcttttgagaactttgtgttgcatctagagatcttatatggctgggtgctagaccagaagattctctacttttacaagaacccaatgaatttaccagagtgcagcagaaatctcttactgatcttcgtgattctcttcccaatatttcggacagagatcgtctaaacactgtgttggactggaactttacattgaatctgcatgacattcttgattatgagaatattgtagagtatttgactaatcgaatggcagagtttgaagatccttgatggagaaagatctgacctcagctgtttgcccataagtgaagctgaagatgggttgccaaacgtgtgtcgccatttatgccacttgtatattttgcacgattgcatcttgtttactgcaataggcgatactgtgccagtgtgccaccatctggatgatatcccctactgactgtagttctcattctgggtaattctaattctggtttttaagagtatgctgtaacgtaggagcaatacctctttgctgataagagtttaacagatcaggcaatttctgattaacttaaagactacgtgttttgattaaccgtcgcttaaaaagtgtgttagtatgacatttacttttgtttgtctttgaactgtgctgaatcctgggaagtccgatgggtgccacagctgtgatatggtcaaagatgagatctccgggcggtggtttcgcggattgtagatttgtagcacagggagtattgctgattgtaatgcaaacttttggtcatatttacgtactttgcttggtgagattgacattacttacatggtgtgtttatttcacgct

SEQ ID NO: 15017 - DNA, 2249 bp, Oryza sativa
  ref <308>: DATABASE ACCESSION NUMBER: AK065552
  ref <309>: DATABASE ENTRY DATE: 2001-12-06
ggcattcgctagctcctgattcggccatggcggggtgtattgttgttgtatttggggttctggtgctggtcgcggggatggcggcggcgcccacgccggactgcaacggcatcctgctcacctacaacttcgagggccgcgccaagatccggccctacgtggcggacaggaacaagcagccctactcgttcagggccaacgccaccgtgctcaactccgggacgcgcccgctcaagtcgtgggcgatgctcgtgacgttcgggtacggggagatcctcgtcggcgtcgatggcgccgtgctcaccggcggcggcgagatgccgtacaacaccacccaggacgccggcaacgcgacgtcgttctccggctacccgcagaccgacctcctcaccccgatcgccaccgcgggggacatctcgcagatccaggccaaggtcggcatcgtcggcacgctcttcgccgggccagggccgttcgtgccgctccccacggcgctgtcgctcgacgacccggcgtacaggtgcccccaggagaccaatgtttcctccggggtgctctccacctgctgcgtcctcaccccggaggcggaggccaacgccaccgtcatcaacgccaacgccaccgacccgaccaagaacttcctcccccgcggcaccggcgacctcgtcatcacctacgacgtgctccaggcctacccctcgagctacctcgcgctcgtcacgctcgacaacaacgccaagctcggccgcctcgacaactggcggctttcctgggagtggcggcgcggcgagttcatctactcgatgaagggtgcgtacccatcggagaaggacacgaccggctgcatctatggggcggcagggcagtactatcagagccttgatttctcccaggtgctcaactgcgacaagaagccggtgatccttgacctgcctctgtccaggtacaatgacactcagattgggaagattgaccattgctgcaggaatggcacaatcctgccgaagtccatggatgagacgcagtcaaaatcagccttccaattgcaggtgttcaagatgccaccggacctgaaccggacaaagctcttcccacagagttccctgatccaagcgggcttgattcaacgactctggcgatcgcgacatggcaggtggtttgcaacattaccacgagtaagggggcgaagccgaagtgctgtgtaaccttctcggcatactacaatgattcagtgatcccctgcaacacctgcgcctgtgggtgtccgtcgaaccagcggggtcctacttgcagcacgactgctcaatccatgctcctgccacccgaggcgctgcttgtgccattcgacaatcgcacacagaaggcattggcatgggccgagttgaagcactacaatgtgcctaagccaatgccttgtggtgattactgtggcgtgagcatcaattggcacatatctacagactacaacaagggctggagcgctcggatgacattgttcaattgggacaatgtcgacttggcaaactggtttgctgctattgtcatggacaaggcttatgatggttttgagaaggcgtactctttcaatagcacatcagttggcaagaacaccatcttcatgcaaggtcttgaggggctcaattacctggtgaagcagaccaacatgagtggatcagactaccttgtgcctgggaagcagcagtcagtgctctcattcaccaagaagctgactcctggcatcaatgttgttgctggagatggtttcccttcaaaggtcttcttcaacggcgacgagtgtgcaatgcctcagaggattccaatgagcaatagtggattcaggacccatctcagcagtgtcctctcactggttttggtcctggctgcttcggccttcgtattgcttcagcaataatcctggccgttgctccgattctttcattctttcaggtggttggatcgacgccatttgtaagaaacctttttgtttctggcggtttactagatgcgtaatggttgctatgtagcagaatctggcagcaattgtgcggcgagatgaacacatagggggaggaaacattgttgcagacttgcaacatagcatcaggatcactttcctgaatcctgatgatatttattactacatgtttacatcaagatgagtgatattgtacatctctgatttaagttggtgtagttgccaggaatgtcttatgtttagttatgttatatacaaaatacattttgccacc

SEQ ID NO: 15018 - DNA, 2907 bp, Oryza sativa
  ref <308>: DATABASE ACCESSION NUMBER: AK065553
  ref <309>: DATABASE ENTRY DATE: 2001-12-06
ggtcgtccacgcctccgctcccccttcctcctcctcctcccctcctcccctcgcaaacgcaaccttctctcgccgaagagggagaagggaaaaggggtttcgatttctccgcgatttccccgcggattcctccccccaccgcctccggctccggcgacttgctccgctcccacgtcggcggcgcatccaagattggtgatccaaattttgaggtgcgcgagcgtgttcgctatacaagagatcaacttctcgaactgcgtgagatcgttgacatacctgaggccatcttaagaattaatcaagagattgatatagagcttcatggtgaagatcagatttggggtcgccctgagtcagatgtgcaagtgcagacacaaacccaggcgcaaccgcacaatcggtatggtgagacagataaccgtgactggcgtgcacgcacggttcaacctccggcagctaatgaagagaagtcctgggacaacattcgtgaagctaaagcagcacatgcttcaagtggtcggcaacaagagcaagttaacaggcaggatcaattaaaccaccagtttgcttcaaaagctcaggttggcccgactcctgctcttatcaaggctgaggtaccttggtcagctagaagaggcaatctctcagagaaagatagagtcctgaaaacagtgaaaggtatactaaacaaactgacaccggagaaatttgatctactcaagggccaactaatggaatctggaattaccactgctgatattctaaaggatgttatttctctcatatttgagaaggctgtttttgagcccaccttctgtccgatgtatgctcaactttgttccgatctcaatgagaagctaccatcattcccttcggaagaaccaggtggcaaagagattacattcaagcgtgtgctgttgaacaattgtcaggaagcatttgaaggtgctgagagcctaagggctgaaatagcaaaattgactggccctgaccaagagatggagagaagggacaaagaaaggattgtcaaactaagaacacttggaaatatccgtctaattggtgagctacttaagcaaaagatggtacctgaaaagatagttcatcacattgttcaggaactcttggggtctggacctgataaaaaggcttgccctgaagaggaaaacgttgaggctatttgtcagttcttcaatacaattggtaaacagcttgacgagaacccaaaatctcgtcgaattaatgatacctacttcattcagatgaaggagttaacaacaaaccttcagttggcaccacgtctgaggtttatggttcgtgatgtggttgatcttcgttcaaacaattgggtgcctcgacgtgaagagattaaggccaagacaatcagtgaaattcatgatgaggctatgaagacacttggactacggccaggggcaacaggactcacgaggaatggccgtaatgcaccaggtggtcctctttcccctggtggattcccaatgaatcgaccaggaacaggagggatgatgcctgggatgcctggaacacctggtatgcctggatcaagaaagatgcctggaatgcctgggttagataatgataactgggaagttccacgttctaaatcaatgccaagaggcgactctcttcgtaaccagggtccgttgcttaataagccatcatctattaacaagccatcatctattaactccaggcttcttcctcatggaagtggagcactaattggtaagagtgctcttttgggcagtggtggtccaccatctcgcccttccagccttatggctagtctcactcatacaccagctcaaactgcaccatcaccaaaacctgtaagtgcagctccagctgttgtgcctgtcacagacaaagcagccggttcttcccatgagatgccagctgcagttcagaagaagacggtatcccttcttgaagagtattttggcatacgtattctggatgaagcacaacaatgtatcgaggagcttcagtgtcctgagtactactctgagattgtgaaagaagctatcaatcttgctttggataagggtcccaacttcattgatcctcttgttaggctgctggagcatctgcacgccaagaaaattttcaagactgaggacctgaaaactggatgcttactgtatgcagccctgctggaagatattggtattgaccttcctctagctccagccttgtttggtgaagttgttgcacgactgagtttgtcgtgtggcttgagctttgaagttgttgaggagattctaaaagcagtggaggatacatacttccgcaaaggaatttttgatgctgtcatgaaaaccatgggcggaaactcttcaggtcaggctatattgagctcgcatgctgtggtaatcgacgcctgcaacaaacttttgaaataatagccccttggcagccttggcatatcaaccttttggatgctgtgcctagccaaaacagcatcgtgtattctctatagcttaggtgtttcaccccagaggaactctcgtactggagatgtgagcaacagccagttttgtgctgtatatttttgcaaggtcagatgagtgttcattattgtttcgacaacgaaggaaagaaagaagccatggattttgctatcgggtgacagcttaattcgctggagcctgagatgaacaaggcttaatgtggtatttttgtgtccctttattagttcttttctgtgcgtacacattttgtaacaatgtactatggttttggagtattctgttggtttacaatatatcgtgtcattgtagcggtcaaattttgatacctaattctgaggtttgcttgagcattcgtgcctcgtgtgcgatgaagttttatcattttcctcagaattacttgctgatgcatttgact

SEQ ID NO: 15019 - DNA, 1322 bp, Oryza sativa
  ref <308>: DATABASE ACCESSION NUMBER: AK065554
  ref <309>: DATABASE ENTRY DATE: 2001-12-06
gagaatttgccctcctcacttctatacttcaatccccttcctttattttttttttttgggaggggccgaggcaaccgtcgccactccgacgatcccgtcccatccgccgccgccgccggagatttcctcgagataagccatgggtcaagcactcggtttggtacaagtagatcaatcgacagtagccatcaaggagtcctttgggaagtttgatgaggttcttgagcctggatgccactttttaccctggtgcatagggaagcagatcgctggatatctttccttgcgtgtgcagcagctggatgtccgttgtgaaacaaagactaaggacaatgtttttgtcaatgttgtggcatctgtgcaataccgtgctcttgctgagaaggcatcagacgccttttacaggcttagcaacaccagggagcaaatccagtcgtatgtttttgatgtgatcagggctagtgttccaaagatgaacttggatgatgcatttgagcagaagaatgagatcgcaaaagctgtggaagatgagcttgaaaaggcaatgtcaatgtatggttatgagattgtgcaaactcttattgttgatattgaaccagatgagcatgttaagagagcaatgaatgaaatcaacgcagctgctaggctgagggtggcagccaatgagaaagctgaagcagagaagattcttcagatcaagagagctgaaggagatgcagaatccaagtacttggctggtctgggtatcgcaaggcagcgtcaggctatagtggatgggctgagagacagtgttcttgccttctccgagaacgtgcctgggacctctgccaaggatgtcatggatatggttctggttacgcaatacttcgacaccatgaaggagataggagcctcatccaagtcctcttcagtgttcatccctcacgggccaggtgccgtcaaagatatcgctgcgcagataagagatggtcagctccaggccaaattgatctaagaggatggcagggaatggatgttctggatttcttgggcattacgaaagtctgcagtaataccttatctacgtattcgatattttgtgagataaaaacttaggcaaaagaagttctattgtaagtatcacatgcacgcgtgcttcagtaccgtttgttcatagtaattcctgaggttatttccctagacgagtgtcaatatacttcttgaattgcatgtttctgtaaataattcctaagtgttaccgggctgtttggaattatttgcatgttgatgttagtgaccttaagtaatgtcccatcttattatgtgatgtcatgatgatttcc

SEQ ID NO: 15020 - DNA, 1492 bp, Oryza sativa
  ref <308>: DATABASE ACCESSION NUMBER: AK098933
  ref <309>: DATABASE ENTRY DATE: 2002-08-28
gacacacacctcacacctcaccaccatcacctcctcctcctcctcctcttcctccgcgcgcgcgagatccagggagagggagagggagagatcatggcggggacggtgacggtgccgtcggcgtcggtgccgtcgacgccgctgctcaaggacgagctggacatcgtgatcccgacgatccgcaacctggacttcctggagatgtggcggcccttcttccagccctaccacctcatcatcgtgcaggacggcgacccgaccaagaccatccgcgtccccgagggcttcgactacgagctctacaaccgcaacgacatcaaccggatcctcggccccaaggcctcctgcatctccttcaaggactccgcatgccgctgcttcggctacatggtctccaagaagaagtacgtcttcaccatcgacgacgactgcttcgttgccaaggacccatctggcaaggacatcaatgctcttgagcagcacatcaagaacctcctcagcccgtccaccccgttcttcttcaacaccttgtatgatccctaccgcgaaggcgctgactttgtccgtggttaccccttcagcctcagggagggagccaagactgctgtctctcacggcctgtggcttaacatccctgactatgatgctcctactcagatggtcaagcctcgtgagaggaactccaggtatgttgatgctgtcatgactgtgcccaagggaaccttgttccccatgtgtggcatgaaccttgcttttgaccgtgatctcatcggtcctgcaatgtactttggtctcatgggtgatggccagcctattggtcgctacgacgacatgtgggctggatggtgcatgaaggtcatctgtgaccacctgagcctgggagtgaagactggactgccgtacatctggcacagcaaggctagcaaccccttcgtgaacttgaagaaggaatacaagggcatcttctggcaggaggacatcatccccttcttccagaacgccaccatccccaaggagtgcgacaccgtccagaagtgctacctctccctcgccgagcaggtcagggagaagctcggcaagatcgacccctacttcgtcaagcttgccgatgccatggtcacctggatcgaggcctgggatgagctgaacccctcgactgctgctgtcgagaacggcaaggccaagtagattgatcctgggagcttgtgtgtcgcaggatggaaagtaccctttaagtgaaagtgttgctgtggcctaggccccctagatatagctctttttgagatgaagggagagattacttaagcaactttataattctttgttgttatgctggttcttttgtagctggaaaaggatttgttatcatcgtttacataattcaagacaataataattttatcatgtaattttgatagtcgtgctttggttgctaaatggtgttattgtatttaataacctttgcaaatcactatacctgttggttgttctg

SEQ ID NO: 15021 - DNA, 1570 bp, Oryza sativa
  ref <308>: DATABASE ACCESSION NUMBER: AK065555
  ref <309>: DATABASE ENTRY DATE: 2001-12-06
gattctaaaaaccacaaactagctaggtaactctggttttttatcgctttctgaaactaggtggcaagatatatacctattctgaagcaatgagtttcctgctgaagactaggagtgaatctgacaagccgaagtcgccatcttctgaagaactgcagcaaaagcgcgctaccagcggtgagccattgatatccacgccgacctcctcgagcatgagaaacgaagaagagccgttgctgcctagctatattggtgaccagaggtcgccgcatgccatcgccttcacagcatttgatgccggtcaccatgttgttgtcgagcgccatcccctccctctccatgagcatcttctatggatgctaaggtgggccacgtgctcaggacgtacagggagagaacatgagatgagatatgggtagaatgaatgaacagagatggatgaaaatagttcaagtccgggaactcctgggaagcctggcagctgagatgccggcattcttatcagacaccaccatccgccgtttcctaagggcaaggaactggagcacggaacaagcaaccaagtcgctcaaagaaactgtcaagtggaggcgtcagtacaggccagaaagcatttgctgggtgctctcacaaatcccaaatcaacccctttgttgagtttgtaccaattgttttttctaaagcataattgtttgtaattattatgttttggacgacattgctgacaaggagtatgagggtaggagagcatatatagctgactaccttgatgccaaaggaagatctatactaatcacaaagccgacaattaaggggagagtttcagggaaggagcagataaaacactttgtatatctcctggagagtttggctatgaactctgcagatgaacaagaagaacatgttacttggctgatagacctcagaggctggagtatatcaagtacgccattatcgacatcccgtgaatccatgcacatagttcaaaactactatccagggattattgcagtagcaatactcagcaacactccaaggatttttgaatctttctggaagattataaagcacttcttggaagcaaagatgagcgagaaggtgaagtttctatatactaacaatccagagagccacaagatagtgtctgaaatgtttgacatggatctgctggagactgcatttgggggcagaaattcaattaccattgatatagacaattatgctgagagaatgaggagatcagatcttgcgagaggagttttaatcatccaaacggacataaatctgattagtcgacatcactgaatctctattctctgtggagaatgcctattgcttaatgacagctaatgaagaacaagaaggtaccgtgcaaaaaagtggaagaaaaagaacaagccatagaaaactacgtgctcaccttagctgttttagatgttatatcaattaatctcaataattatggacgacatgttgcgcatgatcaaaaaaccagttaatccttacagtatgtttatgtaatctaatactacctctgttttatattattaattgttgttgacatttttcc

SEQ ID NO: 15022 - DNA, 3783 bp, Oryza sativa
  ref <308>: DATABASE ACCESSION NUMBER: AK065556
  ref <309>: DATABASE ENTRY DATE: 2001-12-06
gggtggaccacctcgccgtcgccggccgtctccctcctcctccgccgcgtcccatctctccctccgccaccgccatcgccatcgccgcagtctcgcaggtcagtctcctcgcccacgccggaatcgggagtttgtttgtttctgctcgaccgattcagaacgaggtaaaatttctcgatcgatttcccctcggagcgacgcccatggccgagcaccttcctcttgaggaaacccaggggaggcgaggccacggcgccggcgccgcggtgggcggacagcgagagctagccgctttggccgccttgccgtgctgagtagcggcggctagggcgaagggtaaggcttacccttgtatcgggtgatgatacccgggagcttctaaacattggtcattggcagtaaatagtgcagaattgaacatttcccctgctgaatcgttttgtttgtttgtttttttattggcattagggccgcaatccaggtagcttcccttgctaattggggattttcacattcatgctgtgttagcagggtaaagttgcagtcttgttcttggctggcatatagatgtgtccagagtggttaggatcaaaacctgatgaaattgtggagttatcgaatcgggggagggttaattctgtggtgctgtgtatgtgatggacaaagacgagaggagttgaccaacatggctgccttttagctgaactcttttttatatttcacttgtgcagttgggttggctaagagaaaaggtttggtttcgtataagatgatgactgaccttacgttgaccaaacgtgtaggaatagtaacctgctattttgagaaagtttctgtggtcgggacaaacagctgcttttgtttcgtggttttcatttcgttcttagaagtttgcatgaagcttgtttcatcgtttttcataaaaaaatgtgtcatttacagtttaacaaatgatggtggacatcagatagtcccttgtcctggtgaatataggatctttgacttaaccaagacaagttgtcttatcttgtggctgcactttgcttattgcttattgtatgagaggcagaagttggggcaggctttaaccctgcggcacccacaaggggaaaacagaaatggcaatacatcatttgcattttctgttatttctatactcttgtcaggcacaactaaatatgctaaatatggtttcagttgaccaaccactgtaagaagtttctgcaggaggatgtgtaaggtacccaattaggcaaatctgttgtttggaacttcagctgggtaattttctctcctctgcatctccttgggccttcaagttttcatatttcttaaaaatcgagtgatagtaatcagcaggcacagggtttaattccaaaatgtagcaatcacatatgttatggcttatgttcctctttttatttttaatctttgttgagattttaatgattcaattggttgttatatcacttaattgtcgattagtaaaacagcagtgacaatttttcatcaaagagaagatgacaagaatgaaatgtagtatgaacaagtttattggaagcaactggtcaacttcccttccctaaagttattaaagtggaaacaatgagaccacaactttgtcatattcttttaagaactccaggagcataagaatggatcaggaattattttgatattttatttgcttctctttttcacttatcttctgccatttgatggtttaaagtacagttaccagtatggtaaatattatttcttttcagaaataactgagcggtgattatgtattgctttaatttcatctgtcttgtgccttctgactggttctatttgtgctttacgtcattcacctgaatgagactagaccattttttagtttatcttttctatgaaggatttacccatttaggttatagactactacattgaaatgatttgacttctcagcattattgtcatgaccagagttttcataataaactgatgaacactagagatgtttccaagaagtgggtttaatgagatcttagctgtttcatgcctgatgctgtagttttaagctaatataattaaaatctagtatcctgttgtaattgccccctatatataatagcccacgtcaataccaaggagccaatgagttttctgattttataatttaactgcaaggaatcaaactgtacttaggtcttacgcgatgtaacgaaaaggggaataaataagtgcctgtttttggcatgcataattcaaagcttgatgaaagcattgacctgcatagctataataattgttacgtggttgtccaaactactgctacaggctgctgtttcaagttattctcaattcaattttcatatgggctgctatttcaattggtctttcctgactgtggaaaaaatgaaataatgtagagatgacattgggccagcgccttgtagagatgacataatctgagcaatgtaatgttcagaagttaaatgtttctagtaggtctagtttgatggatcacaccgagtctagcttgatgggtcacactgagtctagtttgacatatttaagatacaattgttgtggctacagttgccttttgcattcctcctcaatttactggatacatcctaaaccagatttggatgctattccattacatctctaagttaaacccaagttcgatatctcttatgctactccatttgcagaaagtatattattgaattttctgtgcatctacaacttgtaagtctcgagcaatttgctttgttattgctgaatgcattatgtcgttgcatacttgaaaaactgagaattgcacattcaaatatctagatataacttgcatttatcaatagttgtttgatatgctaaaatcctggcaggtgcctgccagttgctgccattggaaaattttccctggtaggccgaagtagctatggtgctgatgatgagggcatggtacttctcttgcaattatgtgttgtttgaatttgaaacttcttgaaccttaagagaaacttttttgatgaaaacatcagacttcagaggaaactggtcgaaaagaaaatctgattgcacgtgcatattcagtcaactatctcatgttcagcatgatggaggcagttacgagtttcagaactcatgacctatctgttgtacatttgttgacatttgcattaaacaataccgtatgaagttagtaccatttaaatcaagcagagacagaaacccaaattggatctgaaaaggagtccatgttgggtggtagggggtgacccacccctttcaacccaaatgatatgagcctacttcaaattaagtaaaaggtactttaccggagtcctgtttatccaattgttacgtttacgcaaaagcgttgaatttatatgtttctaaactgtgtctatgtcctagtcagccagaaaccagcagttagatattcccctttattttaccagctacaggataggtgttctttggtcatatttgctcgtctactttactcatgtccatgatcaactgtttgtatgagataatcctatttaaagggcaacttgattaacttggacaagatccatagctacgttttgtttctaaataatgaactgacttattgctctccatttttttttttctgtcaacatggttgtgctctattggtttgcagttgcagccaaactaaggtacagtttgtttattcatctattctcctatcctatattacgtcctgtaacttcttgaaggtttggaaattagatacatgtatacagctaggtgattggaacc

SEQ ID NO: 15023 - DNA, 2593 bp, Oryza sativa
  ref <308>: DATABASE ACCESSION NUMBER: AK065557
  ref <309>: DATABASE ENTRY DATE: 2001-12-06
gattctcctcgcttcctcctctttctctctctacgccctcgtctccctctctctctctctctctctctctctctctgcatcttcttcttcttcttccagtgctcggctctctcttttactcaactgctcacactccccaaacaaccaacccacctccatctccatctccatgtggtgctgaggccggagcagcagcgaggaatcggagcggtagccatggcgccgtgaattcgcgcgaggacgtgcgatctctgagagaggggggagtgtagtgctcgagtgagtgattcggaggcggtgctgcagctgcggcggcgttcggagatgaggcattgttggggcggtgcttcctccgtcctccggctcctcctcgcgttgcagtgcggggtggtggtggtggtgctgcagtgctcggcgaatgcgttgggcagtgacgtctcggcgctcatcgcgttcaagcgcgcaatcatcggggacccccggtcggcgctcgcggaatggagcgatgcggacgggaacgcctgcgactggcacggggtgatctgctcctcgccgcagggctccgtgatctccctgaagctgtcaaactcgtcgctgaagggatttatcgcgcctgaacttggacagctgagcttcttgcaagagctgtatttggatcgcaacatgctttttgggacaattccgaaacagctaggttcactgaggaaccttagggtcttggatttgggtgttaataggcttactggtcctatacctcctgagctggctggattgagcagcgtaagcgtaataaactttcattccaatgggttgactgggaatataccttcagagctgggcaagctacagaatcttgttcagctgaggttggacagaaatagactgaaaggatcaattcctggaagcaatggttctggtttttctcctacggccaatagtggatccacggctcacaatgggctatgcccttctcctcgattaaatgttggagatttctcatacaactttcttgttggaaaaatcccaccgtgcttgaagtatcttccaaggtcaagtttccaagggaactgcttacaggatgagtactctgtccggcagcgggctttccaaatttgtataagtggttctccggctggccagcgaggtggcgtaaagggattcaagcatcccacctctgaccataaacatgaaagatcaccacaaccaacatggcttctcattttagaaatttcaactggtattcttctgcttgtatttgtgatcactggtgcaattactgcttccagaagttgcaagctaaagccatcgataagaatatcctcgtggaacagatcaaaaagttggagtgatgagataacagtgctgatcgattctgatatgctgaaaagcctgccaaagttaagtcgccaagagcttgaagtagcttgtgaggattttagcaacattattggttcatctcctgagacagtagtgtacaaaggaaccatgaaggatggacctgaggtttctgtcatatcattatgtgcctttgaaggtcattggactagccaacatgaactattttaccaaaacaagagaaagtgacccattctccaggatgctagtgtttgaatacgcatcaaacgggaccctgtttgagcacctacactatggagaaggagctcagttatcttggctcagacgaatgaaaatagccattggcatcgcgcagggtctaagatacctgcataccgagttgcagcctccatttgctatctctgagctgaattccaactctgtatatgttactgaagattttactccaaagctggttgattttgagtgctggaaaatgatgttcaccaaacaaaaacatgagaaggctcctggccgcatcaataacaaatcctctttccctggccacttggattcttcagaggacaaacaagcagacatccaaggcaatacatttgcttttggagtgattttgctggagatcatcagtggacggcttccttattgcaaggacaaaggctatttgattgactgggccatcaagtatctgcagcagacagaggagatcggtaagcttgtcgatcctgagctgaccaatgtcagaacagaggatctcatggtgatctgcagcgtagtgagccgctgcatcgaccctgatccatccaagagaccatcgatgcagatcatcacaggagttctggagaacgggatcgacttgtcggcagccgccatcctgaaggaatcctctctagcatgggctgagctcgccctggcgttgtagcataccattcttaccgctgtaaattcgtccgtcacatcacacactaatatttatctgatcatggccattgcatgctcggaatatagaggagctgagacgcacgagcaggcaggcactagttcagtttggtcgtgatactgtattgactgtttttgactcataatgctgtatgatttacagttgattgccggtattgcacagcaggtgtttcttcaatgcctcaccggtctaacgaaattcctttgttcgcctctgctggcatacatgtgtaagtttgtggtgcaacctattaggatgaaaaccggcatggaaattccc

SEQ ID NO: 15024 - DNA, 1822 bp, Oryza sativa
  ref <308>: DATABASE ACCESSION NUMBER: AK065558
  ref <309>: DATABASE ENTRY DATE: 2001-12-06
gctcttcttcttctcacttcatcaacaacctcacctcgcctcgcctcttctcgcggccaacgagagagggagagggagagctaggaccaccgccactgcctcgggaagtaggtggctcccctgctttccctcctctcctccgccgtcgccgaggcagccagccaagtcgtcccagcaggtggtaggctactagtccgggtggccggcagtgagcaggaggaatcatctctggcgttcttgtctccgaggaactttgattctttctgggaggggatttggtgtgctgctgctgctccagatgcttcccaccaacaggaacaggccccagcagaggcctgccagatcttggtatttcatctcagacatggacttctccgatccgaagcgcaagccgcggtacctcagtaagatcctcatggtggcgctcctcaccgccatgtgcgtcgtcatgctcacacagccgccctgccataggaggactcccagtgtgttctccatccatgaacccggagtcacgcatgttctagtgacgggcggcgctggatatatcggttcgcacgctgcgcttcggctgctgaagattccttcagagtcaccatagtggataatctttcaagaggaaatatgggggcaatcaaggttcttcagaacttgttttcagagcctgggcggttgcagttcatctatgctgatttaggcgatccaaaagctgttaatagaatatttgcagaaaatgcttttgatgctgtcatgcactttgctgctgtcgcttatgttggtgagagcacacttgagcctttgaggtactatcataacatcacctcaaacactttagttgtgctagaggctatggcagcacacaatgtgagaaccctgatctactctagcacatgtgccacctatggagaacccgagaagatgcctatcaccgaaggaactccccagtttccgatcaacccatatggtaaagccaagaagatggcagaggacatcatcttggatttttccaaatccaagaaggcagacatggctgtgatgattctaagatacttcaacgtcattggttctgaccctgaaggaaggcttggcgaggctccaaaacctgaattacgggagcatggccgtatatctggtgcatgctttgatgctgcactggggataattcctggtttgaaggttaaaggtactgactatgaaacacctgacggtacttgtgtaagagattacatcgatgtcactgacctcgttgacgcccatgtgaaggcgctcaacaaggcggaaaggggcaaagttggcatatacaatgttggcacaggcaaaggtaggtcagtgaaagaatttgtcgaagcttgcaagaaggcaacaggagttgacatcaaggtcgactacttccctcgtcgacccggtgactatgccgaagtgtacagcgatcccgcaaagatcaacagcgagctgaactggactgctcaacataccgatctcctggagagcctcagggttgcctggacatggcagaagaagcaccggagcggctacggaccccctcaggccatggttttgtgaagagaatttaccctgtagcatctattggctgaaaacttaaaaacttaggtggatatattcttaggaatgttcatcatcaagggctttcaattgctcactcacagaagttatatgtaatatagcgcttatggtcattcgttcaattcttgagattcatattatgggaggattttagaagattgtaatattgttgatgtattcagtatacaataaaaatccaacaagctatcctcagaattgttatcctggttggtttctc

SEQ ID NO: 15025 - DNA, 1692 bp, Oryza sativa
  misc_feature (677)..(677): "n"=any one base of a, t, c, or g
  ref <308>: DATABASE ACCESSION NUMBER: AK065559
  ref <309>: DATABASE ENTRY DATE: 2001-12-06
tgaatttggttctgaagtaaggagcaaatatgctaccttcctgttctccctttctgccactacattgagataactacattctgcgaagttctctatcatattccagtacttccaattttagctttaattatctatttaggtttctctatctagccttcccacagtcttaatgtacctttctgcttcaacctatcattccttttatttgcaccaacctataagcaatatcacattgtcttctccaaattattttatattgcagattccttttgctcctctattttccatttccccattcatatgttatctgtaatactaaaaactttctaggttttattcaaataatgcagggcagcaagtgatatgtgataactatcttcttgaacatatttatatacatgggcaagatttaggtgtggtcacaaataagagaaatatttgtgctttataaaagcaattctcagtttactactgatgaatgattggcatactgcatttggaacttatgaatgccattaagtttctatttttgtatatatatgccgtataggttaattgcagttcataggtattattgcacatttactgcaaagtacatggggtgtcttgagctccatccatcaactcgaattcataagtgacctgccatactaacatccatgctcctgtatccagtntattcatctattgcagctaagctgatgcaatcagtgagtaaatcacgtctgtgaagcaaaggactgcttgtgttccttcccgaccctcccctaacagtgtatgctcttttttgtttgctgattgattcatcgtagttagacagcaatattcacatgcactttaccctctaggttattaaggaatagtctgtctacagttttgtttgctttggtctgactagcaaacatgatcactaacattggtttggggttttgaatattatttagtatgatctttcggaacttatggtgcttttgttttgtcattgcaggttaccagagctcccaaggaaacagtttggagaatgatcccaataatacaacaatctttgtgggcgggttagattccaatgtaaatgaggaccatctaaagcaagtatttactccatatggggaaattggttatgtgaagattcctctaggcaagcgttgtggatttgtccaatttactagcaggtcatctgctgaagaagccatccgtgtgctgaatgggtctcagattggtgggcagcaagttcggctttcatggggccgtactcctcagaacaagcaggctccccagcaggatgccaaccagtggaatggcaactactatggataccaacagggctatgattcttcttactatggtgcacccaatgcacaggatcctagtgcgcaaaactactatggatattctggctatggcaattacgaacagcagcaggagcccccacagcagcagcagcaacccccacaacagcccccacagcagtgaccatggcgacgtgcaactttcagatctcgcagttggattatcagggtgtacattttgcgtgaactcgagctggcgcttccttaagttatttgtagatgtctttgtgtggatgaggtcgtgttctagctccgctaccacctgtcgttagacgactgatcgaacccttttgacagtagccagtgtttcgttttttgggcctccctgggtgtgatgatcacc

SEQ ID NO: 15026 - DNA, 2252 bp, Oryza sativa
  ref <308>: DATABASE ACCESSION NUMBER: AK065560
  ref <309>: DATABASE ENTRY DATE: 2001-12-06
gattttgagcatattgcagcacaaaaagtagagtttcgataagatgcttcaggtttcgatcagatcaaacacatcgctatgtttcacgtttcaatcgcggaatgttgccaaattaatttggtctatggggagctgagatgaaaacagtgcgctattttggctagtcgttgccatcagaggatagggcagaatttggatcatctacagaagtgcgagatcacgcttagaaaaggagaatttggatacatgcttgaacaaagctattttttttagcttgatttggtgtccgaaaattttgactttttttttgtgtgtgtgtgtgtgcgcggggcagtggttacaatttgctgagggatcctcgctacaacaaggggcttgccttcaacgaaagggagcgcgaaacgcactacctccgtgggcttctgccaccagcaatcgtatcccaggagctccaggaaaggaaaatcatgcataacatccgacaataccagctgcctctgcagaaatacatggctatgatggacctccaggaggggaatgagaggcttttctacaagctcctcattgacaatgttgaggagctacttcctgtcgtttacactccaacagttggtgaggcctgccaaaagtatggatccatatttagccgtcctcagggtctttatatcagcttgaaggagaagggaaagatccttgaggtgctaaaaaactggccagagaggagcattcaggttatcgttgttactgatggtgagcgaattttggggcttggagatcttggctgccagggaatggggatccctgttggtaagcttgccctttacactgctctaggaggagtgcgtccatctgcttgtttgccaatcacattggatgttggtacaaataacgaggcgctgctgaatgatgagttctacattggcttaagacaaaagagggccactgctcaggagtatgctgattttcttcatgaattcatgactgccgtgaaacaaaactatggggagaaagtactcattcagtttgaggattttgcaaaccataatgcatttgaactccttgcaaaatatggaacaactcaccttgtattcaatgatgatattcagggaacagcttccgtggtcctttctgggcttgttgcagcactaaaattagttggtggttcattgtcggagcacagttacctgttcctgggagctggagaggctgggacaggcattgcagaacttatagctctcgagatatcaagacagaccaaagcaccaattgaggagtgccgcaagaaaatatggcttgttgattcaaagggcttgattgtcagttcacgaaaggagacccttcaacacttcaagaaaccatgggcccatgagcatgaacctgttggaaatctcttagatgcagtcaaaactatcaaaccaacagtattgattggcacatctggaaaggggcaaactttcactcaggaggttgttgaagctatttcctcatttaatgagaggcctgtcatttttgccttgtccaacccaacatctcagtctgagtgcaccgctgaacaagcgtacacatggagcaagggccgcgcggtgtttgcaagtggaagtccatttgatccggtggagtatgatggcaaaatatacgtgcctggccaggcaaacaacgcctacatcttcccagggtttggccttggtgtggtgatgtctggtgcaatccgtgttcatgatgacatgcttcttgcagcttcggaagcactggctcagcaggtcacacaagagaatttcgacaagggccttacttatcctcccttctcaaacatcagaaagatctctgcccacattgcagccaacgttgcagcaaaggcatatgaacttggtttggcaagcaggcgccctcggccaaaggacctggttaagtatgcagagagctgcatgtacagcccactttaccgcaactaccggtgaatctggtcatccggtatccggatctattccagtcatgtatatctatgaactgtttcctgcaaaatcttactacttgttcagtactgcacgctgtaattctgatgagtctaccggagttacttcaagcctttttttccccgtgtcgttcatgcctgtattgtaatatttccttttcgacgtgatgtgaagttccttgtatccagttaccttaagcatgggcatatgtattttcatcacaagaatgttaccgtcctagggatgggtaataaatgataaatctggaataaagtttct

SEQ ID NO: 15027 - DNA, 1961 bp, Oryza sativa
  ref <308>: DATABASE ACCESSION NUMBER: AK065561
  ref <309>: DATABASE ENTRY DATE: 2001-12-06
gggccgtcgtctcctccccccgaccccgccgccgccgacctctctcctccgcgccgccgacgaaccaccgccgccgaatccccctcgccggcggccacccggatctccccagccatgtacggcggcgatgaggtctcggccatcgtcatcgacgtggggtcctacagctgcaaggcggggtacgccggtgatgacacccccaaggccgtcttcccctcggttgttggttcaattgagcaaacgggagaaactgatgaagcaaaggcagacaaggaggctgaagctgcatcagattctaagaatggagccaaacctatggatgtggacaaagccaagacaaagcgcaaattgtatgttggtcaagaattggagttcaggagggatcatatggaggtgatttcaccaatgaaagatggaacagttactgattgggatattgttgacaatatatggaatcatgctttcaggcagcggctattgatcaatcctgaggagcatcctatgttgatagctgaaccatctacaaacacaggacagcaaagagagaaagcagcagaacttatgtttgagaagtacaaagtgccggcactgttcctagcgaaaaatgcagttctcacatcttttgcatctggacgtgctacatcgttggtagttgacagcggtggtgggtctactgtggttgctgctgttcacgatggttatgtattgcaaaagtctgtggcgacttctccaattggtggtgaatttttaactgactgtatgatgaaaagcttggagagcaagggcgttgttataaggcccaggtattcattcaagaagaaggaagtcggccctggcgaatataaggttgtagatcttgatcttccaaacacaacggagagttacaagttatactgcatgagagctattgctagtgatatcaaggagtcagtttgcagggttccagatactgccttcgatgaagtggcatatgcaaacgttcctacaacttcatatgagcttccagatggacaaaccattgaagttggtgcagacagattcaagattcctgatattctgtttaatccatctctttctcagactattcctggagttgatggatttgcagattcaatgtcagttcgtggccttccacgaatggtcattgatattgtaaataggtgcgatgttgacattcgcaaggaactgctaagcagtattctgctttcaggtggttcatcatcaattctgcagttgaaggagaggctagaaaaagaagtacttgaggaatcttctggtaatactcgtgtaaaggttttggcaagtggaaattcagtagagaggcgattcagtgtttggattggagggagcattctagcatcccttgggtcgttccagcaaatgtggttctccaaagcagaatacgaagaacatggagtatcctacatccaaaggaagtgcccatgaagttgtggagcatcgctacgatttgtgaccaaatttgggtgcatgtgggcaatcgtattacagccaccctgttgttgatctatatcgactattatccgacgatatttatcattatattatgactagttagtttgtagattttgagagggcaacataagaagcaatccagcttaacctgttatgttcttgatggtagattctagttcatgtgttgaatctgttctccctgctgtagaatgtatcgagttgctgctctctactctgtacttttagaataccttttcaatcatttggagtcagctgattgttgtactacttatacgccacctgattagtcatgtcaacaattaaacttgagcactggttaagttaagagtggcctgattgtagttgataatcacattttattcgtagacattgtatgctggatctttatcagccaccgtcagatcatcctctgtaataaatcttcatcagacgtgtgtgccaatcgcaaggaacacgaaatgcatccg

SEQ ID NO: 15028 - DNA, 2126 bp, Oryza sativa
  misc_feature (2088)..(2088): "n"=any one base of a, t, c, or g
  misc_feature (2107)..(2107): "n"=any one base of a, t, c, or g
  ref <308>: DATABASE ACCESSION NUMBER: AK065562
  ref <309>: DATABASE ENTRY DATE: 2001-12-06
gggagccgaagccgatcgagccagagaccgacctctcctccgccgcaccgaactccggcgagcccacgtgaacaccaccactctccgacgaccgtgcgtctcgttgcgtttggcttctcttctcgtcgtcgtcgtcgtcgtcgcgtacgtacggtgtggttcttgagggcggacgcgacgacggcggcggcggtgtacgagatggaggtggcggggatgaggaaggcgtcgtcgcacgcgtcgatggcggcggcggcggcggacccggacgacttcgacctgacgcggatgctgaaccaccggccgcggatcaacgtggacaggcagcgctccttcgacgaccgctccctcgctgagctctccatctccggcacggccagccgcggcggcggcggaggagggtacccggcgatgatggagagctacgagagcatgtactcccccggcggcgggctccggtccctgtgcggcaccccggcgtcctccacccgcctctccttcgacccccaccccctcgtcttcgacgcctgggacgccctccgccgctccctcgtctgcttccgcggccagcccctcggcaccatcgccgccgtcgaccactcctccgacgaggtcctcaactacgaccaggtgttcgtgagggatttcgtgccgagcgcgctggcgttcctgatgaacggggagccggagatcgtgaagaacttcctgctcaagacgctgctgctgcaggggtgggagaagcggatcgacaggttcaagctgggggaaggggcgatgccggcgagcttcaaggtgctcaaggacgcgaagcgaggaggggcggagcggctggtggcggacttcggggagagcgccatcgggcgggtggcgccggtggactccggcttctggtggatcatcctcctccgcgcgtacaccaagtccaccggcgacctgtcgctggcggagacggcggagtgccagcgcgggatccgcctcatcatgaaccagtgcctcgccgagggcttcgacaccttccccaccctcctctgcgccgacggctgctgcatgatcgaccgcaggatgggcgtgtacgggtacccaatcgagatccaggccctcttcttcatggcgctacggtgcgcactgctgatgctgaagccggacgcccccgaggggaaggagacgatggaccgcgtggcgacacggctccacgcactcacctaccacatgcggtcctacttctggctcgacttccagcagctcaacgatgtctaccgctaccgcaccgaggagtactcccacactgcggtcaacaagttcaacgtcatcccggagtccatcccggactgggtgttcgacttcatgcccagccgcggcggctacttcgtcggcaacgtcagccccgcccggatggacttccgatggttcgcactgggcaacttcgtcgccatccttgcgtccatggcgacgcccgagcaggcggcggcgatcatggacctcatcgaggagcggtgggaggacctcatcggggagatgccgctcaagatcagcttcccggcgatcgaatcacacgagtgggagttcgtcaccgggtgcgaccccaagaacacccggtggagctaccacaatggcggatcctggccagtgctcctgtggctgctgacggcggcgtgcatcaagacggggaggctgaagatcgcgaggcgggcgatcgagctcgccgaggcgaggctggcgagggacgggtggccggagtactacgacgggaagctgggccgctacgtgggcaagcaggcgaggaagctgcagacgtggtccgtcgccggctacctcgtcgccaagatgatggtggaggacccctcccacctcggcatgatctccctcgaggaggacagggccatgatgaagcccgtcctcaagcgctccgcctcctggaccgtgtaaattactaattaattatggtgaaaaaactttgattgatccatgcaaaaaatagtacagaaagaagaaaatgtgtttgttttgggggattttccgctttttcacaaaccattcgttccgaatttggaaggcgtggtttgggctagctatatggttgtgatcagnttgtacactatgtaattanatgatcaaacatagggggg

SEQ ID NO: 15029 - DNA, 2858 bp, Oryza sativa
  ref <308>: DATABASE ACCESSION NUMBER: AK065563
  ref <309>: DATABASE ENTRY DATE: 2001-12-06
gatcctgtccccttccgaagaccaaaccggctacctgaacttcggtgcgcgtccatggagctcaacccatccgcttccctcccctagctctctctcgtccacctcgggttccaaccgcagcatcggaggcggagccatggcgtcgtgctcccgcacttggctcctcccaggcatggcgccgcaggccaccgcccagactgttcctcgccccctccagtccttgaaggtgtttgctggattgcctcaccggagaagggtgctgttttctggtgtgtcgagcagaacgcgaagaggcaggatcaggagcgtcaaggacgactcgctccattttgatccatctaagatcgaggcgccaccgtactccagttacttcgactccacgtcgggccagctcgagccggcgtcgggtgctcgggcaagcatacctgggcaggagtactggccggagggcactgcatcccgcgtacgcgctgcccgtgcacctgcaccggtcggggaatcagctgggacaccgtcgtttggtaagaagcccgggagtagaaggaaagggtacaaggagcaggtagcatcagcgacggcagggagaggcacggagaccagtggagatgagggagagtcggttgtggccattgaggcctcatcagatgagacactggaggagacaaaggattcattggatgagtacgtcgtttatgagatgcccaaggaagaaaatttgagtgaatatgagatggacaagatgatgggacggccacacccgttcgttgacccgcagaaggcaatgtctgtaggggaaccaaaatctagtgaagagctgtggtggaactggaggaggaagtctgaggaaaatgaaatgtggtcaagatggcagaggaggcgtccagatgttgacacggtctttgcaaaagcaatggcagaaactgggcagatcaaaatatttggggaccaccctaccagaacagaagctgctcttgccaaggcaagaagacatttattcaaagaggaaaggttagaagcagaacaaaggagactagaagaaatagggccaatagcatactattcggaatgggttgaagcgtataaaaacaaagacacttcacgagaagctgtacagaaacactttgaggagactggcgaagatgagaatactcaacttataacaatgtttcaacaccaaactgctggggaattccgtatcatgatgggcactgatgttcgcatacaacgagatcctttggcaatgaggatgcgggaagaccagatcaaacagatttggggtggtgatcctgtttacccaaccattaactacgttcatgatcctgacgaagtagcggactacaggggtccagactttcatgagcctacacctgaagttgtaccttacttgatggagcatggtataatgataacaaaggaagagctatatgcccgtttaaatgaagagatggaagacatcaatcaggacattacgtatcttcctgaagtcagagatcccatggctactgctgttgatattggggagcattcttacaacgaagatagtgatgacgatgaggaggatgctgacaaagttgttgcgcagcctgagtcactagaggatgatgaagatgatggtgatgatgctgaggatgctgaagggaaggtcagtcgtaattggagtgttctaaaaactaccggacaggctgaaaatccaaaggaaaagtcgaagaaagatcaactgtcgctaaaagaagctattgcagattctgagaacttgactgattttcttatggacttcgaagaagatgagtaatatctgggcatttactttactatgctgcacgttacacatggctcaaagctgcatcctttatctgcctgagggattcggaaaaatcatccaaaagctcatgacaatctggaaattgtgcctcgtccacggcaagatttaccatcatggtgttaacgtaactttgaaaattcacggttaaggcctgcacaagcaaaccaaacatttagatgtaaactacgtcttgctaatcgcatctgtaccgagattccatgacaaagggaaaaaaaatactttcaccatctacaacgctgaaggattattcatcactatgcacttgttatccttgttataaaagtgtcatacaagggcttaattacttcttttttcaacagatcaaagcaattagtttcagtcagattaccttattttcgcgatgacttagtgatatctgctagacagctaccaggccatatttcatgggaaatttttggttttttttttcattagcagattttttttttcatactgtttttgccactaagccaaggatcatctcacgttcgtcattcatttgttttttagccctagcgacaaaagtgagatactcatagcaaaaacaagggaacttacttctggaggtccatagccgctaggggcaatgaagacaactggatgcccacaaaactccacctgttcaactgggccgatcatgttggagaatgatatggtagtatgagagatcatacgatggaagatagcagctgctgcctgtttgattcacaagttgcaatgatattgggaacaaagaaatccacaggggatgtttttggcgcatggctcaaaatttggcgctgtaatgctctttctaggaaacaaggaagttaaccactgccaacaactgggactgtacacaatttctagtgaatatcacaatcttgtacacctacgattgtattttcttgataactaaattagcatggttagacagcaaatactaaatcaggtattcagttatacttggagtatcctgaaatctattgttttgtgaactaaaccagtgcttgtcaatagaaacaaagtgattatc

SEQ ID NO: 15030 - DNA, 1749 bp, Oryza sativa
  ref <308>: DATABASE ACCESSION NUMBER: AK065564
  ref <309>: DATABASE ENTRY DATE: 2001-12-06
gagtggtttgactagtcctctctctccgggagaaattttgctccggccgcctcggcgtcgcgctccgcggctcgtaatctttcgcggtggccggcggcgggggagaggaggaggaggaggaggagggagatgaaggcgtgcgcgagggcagcgggggagaggctccccctggtcggtgctcccgccaggcaacccctggctcggagttttgttaaggtcaacagattatcatctcaacatgagacgaagtctgtggtatcctgctcggtaagggtgtcagatgacaagacacaccgaatagaagccacggcagaacacatccttccagcaacaaatgatcatgtcatgaaagcaattgactcaattaacagggggcaagtgattgcggtgcccaccgatacgatttatggctttgcttgtgatgcatggttagttttactaaaagtacattttgtgccaagaattttattcttctcatttgctttgttgtcctattgttctcatgttaactccaatttaacaccttctgcaatgatgtgagtagatgtctaacaaggccaacccctgaaaagaaactctgatcagtaaatccagattctagttatgaggagtttgtgtgctcatatctaaattagtcatgtacaaaaaatattcacaaacagttcagaaactttcattagttactattgaatctcactttcatttagatttggaagcaatgtttcgtgactttgttcattttaagctaggtttacttttttggagattctctgactggttggctgcattcatccattggttatttttaaaatgggtctctcaatcttcatgacagctctgcagaagcagttaatcgtatatatgagatcaaaggacgcgtacagacacggcctcttgcaatctgtgttgctgatgtcccagacatatcacggtttgctgttgtggatcacctacctcatggcctgcttgatagtctacttcctgggcctgtcacagttgttttaaaacgaggtaacaacagtatattggagagatctcttaatcctggtttggaaagcattggagttcgtgtgccagattttgatttcattcgagccatttcccgtggtgctggaagtgcgcttgcacttacaagcgccaacttaagcgggcatcctagtagtgtcaacgtcaaagattttgaggatctgtggccacattgttcatatgtctttgatggtggaatcctcccttctgggcgtgctggttcaacaattgtggacctaataacaccaggagtctacaagatattgagagatggaagttcaaggcaggaaacgacagcggtgctcggcaagtttggctttgttgaagcttggtgacaacttgttgacctcataaaattggatcatgattcaatttgaaatagtatactctttgttggtgattaaatgtaacagaagtcagaatcatgaccggagatgatgtcatctcgatagaaaaacaatcatacgctaatggccatgggaaaaggatcggccgtccaagctacagcaaacctgctgaaatccttcagcgagaaagaaagaataactggaaatgagtacaagagactccaaaagtttagcataatggctaatatgggtactattaggctatatttttcccttttgtgtagctccatttcaattcagctgcaatttttcagagtaaaattggtacatgaatcatgaatggctaatatgggtactattaggctatttaagctgc

SEQ ID NO: 15031 - DNA, 3833 bp, Oryza sativa
  ref <308>: DATABASE ACCESSION NUMBER: AK065565
  ref <309>: DATABASE ENTRY DATE: 2001-12-06
gagaagcattggtcgaccttatcttcaacgcgccgcatccagctctccgtctctccgttcgcgggatagtcggcgagcgcgagttggagatcatcggttctcgcggcgatgacttttatcaacgagcgaaccgtctccgactggaactctgggatcagtatgtttgttccacagttcatccgttttcccaactatcgcatatttgtcgttgcgttggcaaaaaggagcatacttgcatccgtctccgccgcatctgtaatacacaaaggataactacaatggcatgtgatatgcttcaagctgttaacaatgaaaaggaaacatggaaagctgttaacaatgggtaattagactttgggttgccataaatcctaacagcaacgagcttattagccttgacatgatactgattgatgaagaggtcaataggttcagggcattcaagaaggatcagtgtccatgatatctaatttcaaggtttcttcagtagcagaatatcgtccagttcacaatgacaaaattctcaacttctcaaaacactgccaaagttcaggagatcaaaaccctagaaaacaaaccaaaactagaacaaacctttagattttcaaccattgagagtctttccaaaagagtatacagcaaaacatatttatctgatgttgttggcttagcatcttacataggacaaatcgaagaaacacaaacaagttgttggataagcaagatccgtgacattatgcttcgaattgagtaagttcaattaaatttaattaatctatgtatgcattggatacaatctatctatctatctatctatctatacctatactaattgggcactttctacgaactctcacgttaatcagaaagatctggccattgattaaatcactttctacgaactctcacgttaatcagaaagatctggccatctatacctatactaattgggcactttctacgaactctcacgttaatcagaaagatctggccattgattaaatcactttctacgaactctcacgttaatcagaaagatctggccattgattaaataaatgatattatcatccctgtagattgtaaattccatgtgtgtttaactttgtgggccacgtgtaaattaaaccaatctaacaccacctcacgaaggaacagataagagaggatatgcgagaggcaataatatttctgttgctgttgagcgttaagtacatgattagatctatctataattcacaacacaataagagaagaaaatcaacgaagcatgcaacaccttgggcgtcaatagagagacatggaaaaggaatcaaagccagcgcggcaagacgattaattcttcaggcaagccgctcacgtctatggaaagcatcgatgcagcttacgccgatgctcacatcaagtcgccactcgacgtcgatgtcgccgagtcgcctcggcttctgccgctgcaatgtccgcgcctgccaaagctgtggcatctcggtgcgagcctagggcgccgctgcttcatatgccggtgacgatgtacgctgaccacacggccatgtccttgcaggctgttgttgcaggcaaatgcatgtatgcatgattcattgtgagtaatttctccgtatccccattgattcagcgcatagaaaaacaatcatggatttgaccatgagaggctcagcgcaaggctgactatccctgccagagatgtacccttaatttgttaacaacatgctttcagttaaggccattgattatcgattaaccctgatgttatatatatgtctatcttttttttttttcagtccgtatccatcagccaagctaattgcctggctgaatcatatggacggactaagacagacacatggtgcatgtataggatcaagatgttgaaggcttaatccaacaagatttcggctctcccaacgctccggtgtatttcaagatagtcgccaaggtccctctagccgcagagcaaggcaagtcatccttgtcacttgaatatattgatcccatattgcaaatgctctatgttttcctttaagttatgcattgttttataatgttactaaatgggatgttgtacctactgttctcagccctattatttttgtaccttattcctttgtaaacttgggatgtaacatgactagatgttggattaggaattgcttagccatgcttagttcaactaccctagctgttcctggatagtggtttaatgcacgttctgcttggaattctggtttgtgaatttttggggcatggtgtgacatagaaaattatttttttctcatcaagtctatggtaactaggctgatggtctgaacagaattgagcagtccaggtagccaagccactctccaactagcagttgaggtagtcagattgccaggatcatagtttttttgggattagttttctaacttcatagactacgcagtaatacgtttagattttagtttaggcagccaatcactactctttagttatcatagattagcagtttctttcccaaaaagaaagagagccatgcatggcattttcataaccataattaaagataagaagcttagacctgggagcctttctcaaaataggtgcaaaaattgcagacataatggatggcctgcataatgcccgtagccccatgcacaattccactctcaaccgcaaaaaccacgtagtttcctattttccctgactctcccagcgaacaattgctgacttcttccactagatgtttcctgttcatggctccccgcattttttggctccatgttcgtaccccatttcatattaaaactcatagaacagtccactgcgatggatgaggaccagatgacgaaccaagaattactgtttaaagcttcataaaaacataaaggaaaagaatggtacatactttgctgaagagatggctcctttgtttctatcagcaatcctttcggccctattggtagcatcctctactcgtggtaccgtggccattgggttattccaggtgcgccgcaaattctctatcatgggcggtgggtgtaaggggagtgacataggtgcattacaaacccacgataggaaccgccatcttagtcgccttgtggctgcggacttctcacttggtggccttggtggcatcagcacatccagcacagggtatatgcttcaatgttcctttggttctatccatttcttcttggtaggttggcttattacgatctgatagagtttgacacagactatactacacggagatagggattgggacacccgcaatggaatactatgtgcaggtggacactggcagcagtgcattttgggttaactgcatcccctgcaagcaatgccctcgcaagagcgatatattgaaaaagctgacattatatgaccctaggagctcagtaagttaaaaagtggtgaaatgtgatgatatgttctgcacttcgcccgatagggatgtgcagccagaatgcaacacaagcttactttgtccattcatcgcgacctatgctgatggtggatcaacaataggcgcctttgtcactgatcttgtgcactataatcaactctctgggaatgggctgactcaatcaactaacaccagcctcacattcgggcgagttgtgtccattgaagaaatttttgtatgtgaaattttttgaattagaactgaagtgtacgattgtaaaataccgttgatagacaatagttcaacaacatgccatcttacgtgcaataatactctttcttttttgccatcacatcaggtaaacgtgaaattatgtctgtagtttttacaaaatgaccaaaatatcatttagaactcagttatactt

SEQ ID NO: 15032 - DNA, 1445 bp, Oryza sativa
  ref <308>: DATABASE ACCESSION NUMBER: AK065566
  ref <309>: DATABASE ENTRY DATE: 2001-12-06
gtagcggcagcatgctcatccggtcgcctccgcgcccttggaggaggaggctcccccagcacgttgtaatagttgatgcgagctcatcgtctcgtggcccgaaggcagcgacgggtggccggctcgagacgtcgactgacgctgcagcggtggccggggaggatggagacgtgatccggaggctgcagaacggaccggacgtgcgtggcgttgcgctggaaggggagaacggccgggccgtggacctcacgccgctggcggtcgaggtgatcgccgagagcttcggggagtggctgcgggaggagctccagcagctggagagcgggagggacggcggcgaggtgcgggtgtccgtcggaagggacccccgcctgtctggcgcgcggctcggcgcagcactgttcgcggggctggcgagggcagggtgttccgtgttcgacgtggggctcgccaccacgccggcttgcttcatgagcaccaagctcccacggttcagctatgacgcctccatcatgatgactgcatcacatctcccatacactcgcaacggcctcaagttcttcatgaagcgcggtggtctcacgtccggcgaggtggaaggggtctgcgaccgtgcggcgcggaagtacgtggccaggaagatgggccttggcggcgggcgaggcatgccgccggtggtgatgcgcgtcgacttgatgagcgcctatgcgcagcacctccgcaacataatcaaggagcgtgttgcccacccgacacactacgacacccccctaaagggcttcaaggtgatcgtgaatgccggcaacggctgcggagggttcttcacgtgggacgtcctggagaagctgggagccgacacgacggggagcctccacctggagcccgacggcaagttccctcaccacatgcccaacccggaggacacgaccgcgatgtccctcacgcgcgatgcggtcctggaccacggcgcggacctcggcgtggtgttcgacaccgacgtggaccgcagcggcgtggtggacgccacgggcgcggccatcaacggcgatcggctcatcgcgctcatgtccgccatcgtgctggacgagcaccccggcacgacggtggtcacggacgcgcggaccagcgacgggctcacccgcttcatccaggccaggggcggccaccactgcctctaccgcgtcggctaccgaaacgtcattgacaagggcgtgcagctcaacgccgacggcgtcgagacgcacctcatgatggagaccaccggccacggcgcgctcaagaagaacaactttctcgacgacggtacgcctagctacgtccatatccacacatacatacgtcatctgcttggagtcttaatagcatatataacgtcgaatttaacaagatttacaaatgttgatctcttgtactacatcctatatatatgctaattacttatccgc

SEQ ID NO: 15033 - DNA, 2066 bp, Oryza sativa
  ref <308>: DATABASE ACCESSION NUMBER: AK065567
  ref <309>: DATABASE ENTRY DATE: 2001-12-06
gatgattgaagggatcacggcctctcgcttcttacccaacacaacaaaatgcgatcaggacagctaaaagccggttgctaggtgcctcatttgagagttggaattggaccatggaagccttgccttgtttgtcctttatattctcgttgctgtcttctgtaactgccagtctttttttttttttgctacaatttcacagatcacatgaaaaaaaaaaaacccatttctcttgtagtctttcaccggagactgtactgtactggtatgctatggattgcataaatattcttatacagattagctgttgcccatgtctttataggcctactttgatggagccaagaaatttgtatagtttaatgtgcatgggtacatactttgtactttgtaggacatgtcctgaccatgaaagcattcaaagttggttcgtggtttcccttaatttagagtcggattgctttgttttcccttttcatgtagacatatgcatgtttgatctctaatcgaactggcaccatcaattttgtgttgaatataggatatctttttatgtattcggttatatttgtgtttgttgctgtcgacaacacttggcagtctaaggtgatggaaaatggataattgctccccaaatttgtacatactgtcccaatctatggggtactttaaaatgctcagtttgtgttgttaagctagtgctattgtagttctattcatttcaatttatgttggatgtaaagctacctgtagataaattatactagttctttcatatctaaaaaaatgttactccctccatcccaaaaaaagacaaaccatgggtttccgtgtccaactttgacggtccgtcttatatgaaatttttttataattcgtattttcattgttgttagatgataaaacatgattaatattttatgcgtgacttgtctttttaatttttttcataatttttttaaataagacggacggtcaaacgttgggcacggaaaccagggtttgtctttttttgggacggagggagtatgtactagtcaaattttttaagtgcacatttacaccagttgtccccatgaacaagttgcaagaacttaaattctaacgctgaatatttctggttaatgatgttgatttgggttctgatcaacaaaatgttcctttttgtgtgtgtgtttgggggggggggggatttccaggagtgaattacagtcaatgagctatgatgttttgcttgtaaaactacattctgtaaatatgcattttgttgtcttgtcacttcctttcatgtccattaggatagtaaaaccataggagcgaagttctgaatatctagtttggattatatgctaacaccatttcatgacttgacatttgcagtctggatgctgcaagccaccaacatcgtgtgcatacaactatgttaacgaaacgttctggaccgcaaaccctggcgttccgaccgtcgtgaatgatgtggactgcagcaagtggagcaatgaccagcagacgctttgcttccagtgtgactcctgcaaggcaggcgtcctcgctggcatcaagaagagctggcgtaaggttgccatcctcaacatcgtcgtgctgatcatcctcgtcatcgtgtatgttgctggctgtgccgctttccgcaacgccaggaggatcgaaaacgacgagccgtttggtatggcaaggatgaccaagactcaacctagcaggttccagttctgagatagtgaagaactgggagcctttgcccctttgcctgtacaaaaagaccacaattggtggtgctaaggctctgtctgaatctcttatatattatttactggaatgtggaatcagctacactttgggtggtgaaaaaggaaagtagttcttgtttcagaatgttcagtctggtttggttttgtgcttgctatagtgtttagggttaggtctgttgtgtactgggtacaagatgagatctgcaagaaacaagagtagttccctcatttagcaatgtattgtgctgtaccattggagattttgatttggcataatcttagatgaatatgttatcatcatgt

SEQ ID NO: 15034 - DNA, 1396 bp, Oryza sativa
  ref <308>: DATABASE ACCESSION NUMBER: AK065568
  ref <309>: DATABASE ENTRY DATE: 2001-12-06
gtactgtcgccgaagacaagaactccggtcaagctcctcggccgtgaggacgcaagcgtgtgagggtaccccttttccctcaaatttaattatgtactctgttacttagttctataattcatctgctcggttagtgtcccatcacaatcgcttggtcaggattgaatgttctgtggattggattgggagttgtttgctcaaggagcaattagggaatattttagttggttgcggctgcaaataccatcagaacaacaatggagtatttaacaagagccaacagccttttgtttcagatgaattccctctgaagtcacccgtcaattgactaatgttagacaatctaccatctagaggagatcattcctgaacccaatatggtgataagccgcctctgttgatgtgttacactcattgttacttgttctgaggtgtacaccttgcttgctatattggaagagtgaatttaattcacatggatataatattttgcaatttttgcatatgaaattatatgcatgttcttgtgatgtgagaaggttaaattcctttgtgggatgcccatttaatttctggttgctaattttactgaagaatgagagtaggttatgatgtcttgggttttgataagtagggtgtaaatttatatagtacaataaacatgcgtgctggtcattctgttatgttggattgaaacaagtgatgctggcaattcaggtgcagaccagcttttggttctgtaaattattttctcaatttaaatagatcatgtattgtggtgatgtgaatacaatattatgatgttatcatgtgttcaacagagcttaaaaaatactcacaaactggattctcgtagttatacagtttaaataagttataagcacgatttgggttttgtcttccatttgatttttggcgctcctccctcttgctccgatctggccttagtgatgccgccctgttttcgcggttgaccccggcaccagccccttcctctggccacgtgcgagttcgagattccaagtcccggtggtcggatttctcaaccccggcactggcctcgcacaggctgcgatccgctcgccaacaaggttcatgaaatcaggcgatgactacctgccacaatgcgaagacagacggtcagccgcctacacaataggctcctacactgccaccatcactgaatgcacatctggtcctcccttatttccgttggcttgtgtagagaagaaaaggtggaattgtggaaggtaatcgcggggagttttggttcattttttgaagatttctctaattggtacgtactaattaaccaattggagttttggtctcgttactcactgtaaaaacatgatggtaaaaaaacagtttaatcctattggtactcttttatccc

SEQ ID NO: 15035 - DNA, 1217 bp, Oryza sativa
  ref <308>: DATABASE ACCESSION NUMBER: AK065569
  ref <309>: DATABASE ENTRY DATE: 2001-12-06
gagtgtgtccagtctggctcccttcgtctccattccgttgctgtaccaacgacaccgccagccaccgccacctcctcttctcttcccccccgaaatcctcgtgaatctctcgctctctcgccgccgccgccgccgccgacgacgacgaccaccacgacgctgcctcggatgctcccggcctcgcacccgctgctctacgcctgcgcctaccgggacagcgccctcgtcgccgacctcgcccacgcccccccgccccacgacggcggcgccgccgaggacgacgccccggcggtcgcggccgcgctcgtcgccggggcgcccgcgcaccaccggcacgtcacccacacggcgtcggggcgggcgcacgcggtgctcctcgcgccgccgctcgtgctcgcggcggtctcgcgggccccgcagctgccctcgtcgcacctgctgctcttcctccggcggctccgatgcctacccgggaaccggatgcgggacgagatgccgcggctggcgctgcgcctgccgttccccgacgaggaggcgctcgcgcgggaggccggggaggtggccgcagcggaggccgaggccgaggaggcggagcggagggaaggtgagctcgcgcggaggacgcccaagagggagcgccgcgcccacagcggcggcgccgggtggacgtggaggcggaagctgtggctcatcgtcctcgcggatctcgtgctcctcttcgtcctcttcgctgcctggctcgcagtgtgcaagggattcagctgcattggccggtaaataggtaaaaagggtgctaggtttcaagacaaaaaaagtgtggagattatttatgcagtagtttctccttatgcatgacgcaatggaaattggaaagtgatgaccatgttatctgccaggattacaaagtaaaggcaaatgttagccttacaggcactcagcggcaactgttagggacttccctgtcatatgacatctttgaaaaatgaagcccaatggtcttgcctagacttcataagtttgaatttgttggtttggttgaggacatctgtaaacccagtagtgtaattttttcgttcatttactatacaaagcaattgttgaaattttgcctcattgatcttgtttcccccctatgttgttcaggacagacccagatatatctgaatcctactgtcattaccatacgcaatacaaagcaagtggtctctgttctgttg

SEQ ID NO: 15036 - DNA, 2009 bp, Oryza sativa
  ref <308>: DATABASE ACCESSION NUMBER: AK065570
  ref <309>: DATABASE ENTRY DATE: 2001-12-06
gggcctcgtcacttcactccactggcggcggcggcggcggcgacaggactcccgccgccgctcagctccggcgtcgccctcccggaggtcctcgtcgtctgggacatcctggtacggcttccccccaaacccctcctccgctgccgcctggtgtgccgcgcatggcgccgcctcacctccacccgcgacttcctcctcgcccaccaccgccaccagccctccctccccctcgtcaccggctgcagaaacggcgacggcatccttgtcctctggaggaagagggccatcggtgcccattccagtgtccgcttctcgatctgtaacccgaccacgcgtcagtccggtgacatcccgctgccgctgctcaccgggttcatgctcatgggcttgtactggcaccgccccaccggcgagtatcggcttctgctctggcgatttgccgaggtgcattgggtggccagaggcggaggcaaacggcgcatctgtgctgctgcatgggagcctgcattggtataagagaatcgaagatatgattttggcgtttgacattacagccgagtcgttccggtggatgcggtctccattcggcaaggcggtgtggagagcgtttcatggcctgtttgagattaattgtatgctcggcatgtactgctgtgacgatggtgcgacatttgtagatatctgggtgctggaggattatgagagagaggtctggtctctcaagtaccgggttgaattgccagttctagagatcaggagagagcttgatgtgaagcgtgatctttacagtgtgatggtttcttccgaggatggggatgtgcttgtgctggttaactgcaaacgagccatgctctacattggtactgatggcaagctgttggcgagtttgccacatgataatgacggcctcagtattactccagtgaagcttagagcaagccttgttccgcatgcattctttccatctctgctggactatgtcgtgaatgcttcgcctttcgtgtgatgcctgctgaatgagtgtaagacccatctgttatctgatgaagtcagttgggtggaactcttgtcttcagcgctacatgatgccatgaaaagcttggcgattaccacattctggagttggctgacctgatactagtcttgctggatgtagctgcttggtgttttatctttgctggagttgtacattgtgtctattagtggtggaagtggtaatgatgatggtcatcatggaagagggataaccagcagttgaagaatcaacaaattcaggtgtcaccttgtccatggtttcagatatggcttcatggattctgtaatcaaatcatctttgtcaaaacctcaaagaagacaaggccgccctcaccggcgatgtctactgtctggatgagagaagggagtctgcagtggtggcggagatgccccgatgtttctggtttctggactcgccaccttcatctaaatacctaaggtggaccatatgctggatgttgtttggcagaacaccagcaggatggcggagcactaatacccgtacttttggagtggcagtattgtcgtggttgaattgcagataccctctgtatgaaccaatgatagttcgatgtggaaactacttggaagctggaacatgcctaaaaaattgcaggtagtgtctcccaagactcattttcgttttgggtttcttgtagttgcttgctgcatagtatattcacaacaagagtagaagcaaaatggtctcttgttcttgtttattgtttcatgtaatcctgtcgttttccaggacctttgttgctctgcgtagttttgccgcttaaatcccaggtatagcagcccatgatttcagcctgtccttttagaactcggtaaccatataactccagaacatcctcagcctgataagtataagtagcatctgttatttccaatgtttgtttccttattagcttgtaatatcccatctttgtgtctcacttcttggattgtcagtagactctccttaaggc

SEQ ID NO: 15037 - DNA, 2975 bp, Oryza sativa
  ref <308>: DATABASE ACCESSION NUMBER: AK065571
  ref <309>: DATABASE ENTRY DATE: 2001-12-06
ggctcaactgcttcggtccttccgcccgcgccgcgcgagcacctcgccgccggtggagcagcgagagaggtggaggagggagggatgagatcgcagctcgacgccgccgccgtctcgtcgccgccgcgggcgcccgccgcccggcggtgcctccgccccgcgctgccactggccctcaggtttcatgcgttccccgggcaggttcgcgtttatcgcggtggtggaatcggagtcggagtccgctccgcgggccatctcccaagcaagcgaggactagtaagagtgttcgactcagcaatggggatgaatgagaaggtgactaatggtaatctagaacaaccaaccacttccacatccggaaataacccaagctttcctgctgagggaaacttcaacgtggttactgttgtaagcatcacattctgtgttctacacaaaattgttattggccagatgcagttgatgacaaaatttctcccttggatgtcacacaacattacaagtttaccattggcatgcatatcagatcctatgaaaaaacctgttcctctgaagctagatgttagttttccacaattgcctgatatccgatggagcatttcacgcttgtactacctattcaattcacagcttgaacggaacattgccttgtctatcattactttgatgattacgtgcttttcactagttgttgttgggggattcttgtttcataagttcaggaagaaccaacaaagtttagaggaatgtttttgggaagcttgggcatgtctaatttcatcatctactcacctaagacaaaagacgcgcattgagcgtgtgcttgggttctttcttgctatctggggcatattgttttattctcgtttgttaagcgcaacggcagagcagtttagaatccagatgcataaggtaagagaaggagcacagcagcaagtcattgaggatgatcatatcatcatctgtggagtcaatagtcatctgccatccatattgaatcaattgaacaagttccatgaatcatcaattaggttaggaactgctactgcaaggaagcagagaattcttcttctatctgatcttcacagaaagcaaatcgagaaacttggagatagctttgccaaagatttaaaccatattgacgtcttcaccaagagctgtagccttagcttgacaaaatcatttgagagagcagcagcaaataaggcaaaatctataatcatcctgcctgcaaagaatgaacgatatgaagtggatacagatgcatttctttccctgctggctctgcaatctcttccacaaattgcatctattcctaccattgttgaggcttctaactcaaccacatgcgatcttctgaaatcaatcacaggcttaaatgtgcagccggtggagatggctgcttctaagctgtttgtgcagtgttctaggcaaaagggtcttattaaaatctacaggcacttgcttaattatcacaaaaacgtcttcaaccttttcagctttcgggaagtagtaggcatgaagtatgtggatgtgaggcgtaggatcccagatgcagttgtttgtggtattttccgatctggaatgatgcactttcacccatgtgaggatgaagtgctgacagagaaagacaaactactacttattgctcctgtttcctggaggagaagagcacagtctacattctcaaattctccaaatggagcacaaaattcaagtcattactcagagtcaacagagggacaaagatcgtctagtatggctcttgaggtgaatgaaacacggctaaatagcatcagaaagcgcccctcaaaaacgctctccaagagcaatgattacacgctaggaccaagagagcacgtgcttattgttggttggcggccaaaagttactgatatgattcgggaatatgataattaccttggacctggcagtgtattggaaatattgtcagaaacccctattaaagagcggagcagtattgtcaaccccctcatgcagaaacaactgaaaaatattaaagttaaccatcaggtgggatgtcctatgaactatgatactctaaaggaagcaataattaaatttaagaaatccaggaagcatgaccaaaatgttccgttttcagttgtcgtaatatctgacaaagactggctaggtggagatactgcacaggttgataaacagttagcgtatactcttctccttgctgagaacatttgccagaaacatgacattaaggttgagcatcttgtatcagaaattgtagacacgggactgggaaagcaaatgtctagaataaaaccatccctctcatttattggagcagaggaagttatgagccttgtaacagcacaggttgcgggaagtagtgagttgaatgaagtatggaaggatattctgaacgctgaaggagatgagatctacatcaaggaaataggattctacatgaaagaaggggagaagatatcattttcagagctcactgaaagggcgattttgcgtcgtgaagttgcggttggctatgtcaagggcaagaagcagtatataaatcctacgaacaagttggagctactttcttttgaaatgacagatcaactcattgtgatatctgagtttgaaggtgaacagccagttgtaaggggtggagacacttccacataaaatttccagcttgatgttctgctgaaatttcagtagcttcatctattatgatgaggtcttgtatcacgttagatgttaatcattctttcccctgggttcaaagggaaataaaaaaaaagtcataaaggccatttagtaaaatatcatatatgccttaatagctgtagaaccttttgagcttttcttttatttatctgcagctaaactgcagaatcttttctgtttattgtaaacatagttgattcacatagtcaacttgtctgatgtagcaatcttgcataaagaaatggaaaggaaagttctttgatgttgcc

SEQ ID NO: 15038 - DNA, 4165 bp, Oryza sativa
  ref <308>: DATABASE ACCESSION NUMBER: AK065572
  ref <309>: DATABASE ENTRY DATE: 2001-12-06
ggggtcttcttccacctccagatccgcagcagcaaaaaccacttcggcaggagaggcagccggagatggccatcggcgccgataagatagtcatccctcagcaggtggtcgtatttccgcagtgtggtgctctccatggtgaactcgtgcggggttattccccatctctctcccaacactgcaggaacggctgcggccgtggggcaatgcagatgagcagcctgaggcctggattggggatcccagcgtgtgctggatagtgggggtgagctgcgtccgcgttgccttgctctgcaccaagggtagctgaagcggcagcagctccatcggtgacgtcatggcagggatcggagaagttgcatactaattaaagccagaagcactactcgttcagccttgatggctgtggttctggaggccttggcatccaacctgagcaatgtgcttgccaagatggcgaggaaggaggtgggcatgctgcttggtatctctgacaagatcgacagcctccgcgtcaggcttgatgggctcaaggagttcctcgccgacgcggagcggaggcgcatcaccgatctgcacgtgcagggttgggtgaaggagctcaaggatgccatgtacgatgccacggacatcctggagctgtgtcagctcaaagccatggatcaggacagtaggcgcagcaacaacccgtcgctactctccctgcggaatcccttgaacgcccaccacattggaagccgcatcatggcgctgaaccagcggcttgatggcatcaagcagcgtgccgagcaattcagcttcatcaagctcgatcgctacggtgactgcagcaggacagctcaaggccatggcttacgccggacaacaccagagcttgatcggtcaggcgttgtcgggaataagatcgagcaagatacaaggagactggtggagttgctaacgagggaggaggaagaggcaagtgcggcgagtatcagcagcaacgtcagggtcgttgccatcgtcggtgttggaggtattggtaaaactaccctcgcacagaacatcttcaaccaccaggacatcaaggagaagttcgacaaaataatatggctgagcattaaccaggaattcagtgatcctgagctggtgaggacggccatcactggtgccggtggtgagcacagtgggcatcaagaactgtccctgcttcagccaatccttcgagaagcaatatctggaaagaaaatctttttggtgatggatgatatgtggagcgtccatgcttggaacaattcattaagaatccctttagttaactcggctgctcaaggcagctgggttctcatcaccaccagagacgaaagagttgcccgagagatgaaggccatacagccgtaccaccgcgtggacatattatctcggcaagatgcctggttgttactcaagaaacagattgcttcaactttgaaagatgagtatgcgattgagaagctaaagagtactggctttagaattttagaaagatgtggtggtttaccgctagctatcaaagcgattgcagggcttttgaaccacaaagagataaatgaaattgagtggggaaaggtactaagaagtccttcatggttagtggatggaatgcctgaagagataaaccatgcaatatatttaagctacgatgacctagaccctcatttgaagcaatgccttttgtattgctcactcttccctaaatatggtaaacccaataaacatttgattgttgaagtatggattagtgaaggttttgttaatggaaaatcaaatgaaccggaagaactaggaaaggagtattacaatgagttaatcataaggaaccttttacagacaatgcccggcgacaataataattggaccatgcatgatgtggttcgctcattttgtcgacatgtggctaaagatgaagcactaccctttcatatggaacatcttagagtcactgacctcgattcaaatagatatcgttggttgtgcatacagaatgaattagattggagtgcatggcaagaacaaaactcagttagaacgttatttttttatggaagtactcatatcaagttgaaggccaatgatttatgcagcaaattctcaaacttaagggttctgagtatagtatatgcacaacttgctacttttgattctctatgccaattgaagaacttgaggcacttgtacttttcccgtactgacatacgtagcctgccagatggcatcggcaagatgaaattcttggagtacattgggattacatgctgtgaacaaatacaacaacttcctggtagcattataaaactagagcggctaagatctcttaaccttatgggcacaaacataaaaagtatacctaggggttttggtcgccttacaagtttgagaacattatactcgtttccagctcagatgggtagcagttcatcaaaagatgagtggtgtagtttggaggagctgggacctctttctcagctcagggatctccatataaagggtttggagaatgtatctgccagctcttccgctgcaaaggccatgcttggtgccaagaaacatcttgccatatggtggttagagtgcactgataggcagagagatgatggattcttgaaagaggaaggaatcatttctatagacgagcagcgacgaatcaaggaggtttttgatgagttgtgcccttcatactgcttagaacaactttacatcagaggatattttggttggcagctcccaaagtggatgacatcaaaagcatctgtgaggcttgatagattgacgagtcttaagttggatggcctgccttgctgcaccaaactccctgatggcttgtgtcagctttcctgtttgaagcttctacagatcaggcgtgccccagccattgagcgcatcgggcatgaattcctgcagatacagcaacacaatggtgattgccatccttcccgagcagcggttgcatttcctatattagagacgctagagtttacagtagtgctggagttggaggaatgggtgtgggaggaacacattcaagccatgccactcctgcatgagcttacactagacaggtgcaaattgcgacaacttcctcttggacttgctgagaacatgccagggctttgagtgttctcaaattgttcatggtccataacctcaagtctttacagaatttgccttcagttgtggagcttcacctgtataaaaaccctgacatggagagcatcagaggtgtcccaaaactgcaagtgcttagcattaattactgcccaaagctcaaactattggagggaatacctgcgctgcaaaagctctatctgctagacttcagcatgaaaacactcccaggatatctacaagatgtaaagccaaagagtttggtgctggactgtagtttgtcactgcttggtaacatatcaatgggggcctcttgctctgactgggacaagatcagccatatccagcaaatcagtggatatgcaggtgaaatgcgcatcaggagaaggtggtatgtgttttacacacgggagcccttcaaattggacacaaatatcgtctgctcttccatatctagaggcattatcgatggtttgttgaaggacaaagagaggcgcgccaaggagttgaggatggtgaagcttctgtgtgccctcctcgccgtcgttggatttgtttccattctgccacattgttatggattattgttgtaagataagacgacgttgccgccgacggatctcgccgggctgcgtaggctccttgccaccgcctcgccacagtgaggcgtagagatcagcactagaagagaagacgtacgggaacaactgtggaggccatgcagccaccgccgtggtctcccacatcgccgtttggtttctctgtagctcaccggcatgacatcttcactggctgcctcctccccacgcagcagctgttagcccaatctgcctccgatccttgtcattgtcattacctgtgattattaattgttgattgatctgatatccgcctggtctgggatatggcctctagcgttactcgcttgtcgtgcttcctgattgttgatgtaatttctgatttgtagggatgcctaattgtgaggttgatgatgttatgttatcagtgaataattcttttatgaatactcattcatcgtaac

SEQ ID NO: 15039 - DNA, 1570 bp, Oryza sativa
  ref <308>: DATABASE ACCESSION NUMBER: AK065573
  ref <309>: DATABASE ENTRY DATE: 2001-12-06
gccgatccaacaaacgactaagacggacttttgcttcgatggcggcgctcctctatctccggaggcgggccgcggcggcggcgctcgccggcgtagcgccaaagccccaatggctggccacggcagcgaggagcggtgctctagttagcggagacgacggtggagagacaggcgagaggggcaagagcccgtggttgcagctcccgcccttcgcgccgctcgacgccgccgccgctgcgagagccatctctcgaggaggtggcgaaggaggaggtggagaacagggagctaccgcgatcaagtgggtccgtcggtgctgccccgacctgccgacctcgctggtgcagaagctgttccgtctccgcaaagttaagaagaacgttgttactgctgagatctcatcggctgatgctagtgctgagcaacatcggttgagaagggtttcagcaaaagatcaattaatgcctggtgatatcctctttctgcctgttaatctcaaagaatcttcggttgctgagaagactaagaaatttgataacaggaatgagattaattttctgcgtggccttgagatttacaaggatgaagccatcatcgtggtcaacaaaccccctggaatgccggttcagggcggtgttggcattaaaaacagtatagatgtattggcctccatgtttgaagaaaattcttctgaagcacctcgtttggttcataggcttgatagagattgtagcggcatccttgttctgggtagaaatcaacttagcacttcaatgttgcatgcaatatttcgtgagaaaactgctgatgctttagctgatggtactcaacatgtactgcaaagaaaatatgttgctcttgtaattggaacacctagacatcccaagggtttattgtcagctccacttgcaaagattctattacaagatggtaagtctgagcgtctgactattagggccagttcaaatgctgcttctgttcaggatgctttgacagagtacagagtgattgaatcttgcccccaagggtacacttggctagaactatttcctcgtactggaagaaagcatcagaggttcttggaaccccaattgttggggattacaagtatggacggcaagcgcatcagaagtggatgcctcttcccctgccacggacaattgatgaggaactgctcaggaaaaggaagcttccctttgggcttgttgtgggtggcggaagcatcgctgaggagcaacctcagcttcatttacactgcaagcaaatggttcttcctgatgtctcagtggctcttcataggctgcagtcttcagacgttaatcctgatttctcagatcttgagaagctcaactttgttgctccactgccgttgcatatgcggttgagttgggagattttgaagtctgtgaagatttaagaaatttttttaaaaaaaatattgtctctctctctctctgtatgttctgcatatttaccacaatgtctgcctcttcttttcaaggtggctttttctttgtggtagctactaataccattctcctaggaaagattcaaagagaggtcctgcttt

SEQ ID NO: 15040 - DNA, 2157 bp, Oryza sativa
  ref <308>: DATABASE ACCESSION NUMBER: AK065574
  ref <309>: DATABASE ENTRY DATE: 2001-12-06
agattccgcccccgagcgcacgatgagtccgccgcaccaatctccgccccctcctccgctcctcgcatcctccctcctctcatctcatccacgcgaatccccgccgcctcactcgctccaccctattccccgctgccgccagaccagccgccccctcctcctcagccgagcgaggaatccccgccgcctcgctccgcctgattccccaatgccgctgcagtccactgccggaccagccaccccctcctcgctcctcctccctcctcctctcagccgtgtgaatgcccgtcgcagtccatcgttggaccagcgccgccgctaccgcgcctccaccgccggaccacctcaatcgctgcgcgcctcctcgtgagtccccgccgcacgccaccgcatcgtgtgcccctgcaggcgccgtggtggttccccttccctaacccgtcgaagttcaccggagaagcccggccccttctctcaaactcgctcaccggagacagagaagatgaataagcgcgtggagaggagaggaggaagagggtgagtcgcatgctgcctgctccgattcccctccgtgtgcgcgagttctggcatcacggcatgaactacctcttcggccccagggatctcatgcctgttgtgaatgtggttgtctgcatcggttgtgatccgttcacggactggcttcttggtcctttctgaactctgtttcttgaatagaatccacattctctgattttttttttttggtcttgtatctatgtaggacagcacgagagagatgctgcagtccaccgctgccaccgacggagccggccgtggcagagccgatgttgtccccagtcgctgccgaagctgaggtcatccccttccgccgccgcactccaccactgaccccgctggagccgaggtctgccagagccgtgctcttccccatccgccgccggagccgatagcgatacatgggagaatggctctgccagccaacattgttgacaaggacaggtaaatcagattcactatgttgcaacttcaatccaaaaatattatattgcacacacaattcacatatggtaaatcaaattcccttgccgccgccgaactccaccgctgccacaggttttgcctcggaggtgttcgactgaatgccactcaaccaatatggtttctatttattcctaaccattgcctcatatattttattgttcataggtctatctatctccttacagtggagggatacatcgttgggctaggactaacagcttgcagcttgttcaccattcagctttaagaaaatattgtacatggtttatccagttgacgatgatacatgttggttggttttcatactactttagttgttgctctattaacctccagggaagatcaaggaggttgttcctacgaatacaaatcatgctcagacgctattaaatcagccactgattcacatattcacaaagcttattttacatgggtacatactctctagcattattcagcaaactatcttttggttgaacagagactattgatgaggctcttcaagacctggatgattgcctaacaattgtgattttgtttacaactactaggaggtgatggtgtgtgaattgagaatccttaattgtcatcggttcagcgctataaactcccctataaaacttaccatgaggcatattttcaagaattaatcatgagtttaactctcaattgttcgcaatgctagcacaggtgcagtaatgacatatgacaatgaagatttgattcggcaatggaggcaaatgcagtccttttcccttcccgtacctaattcatatgctttctatttaatccttgcaattgcctcagaagttgaatgaatctaatcttgttttcttcctaggctcctcggttatcttattggtttgttgtttgcttgttaggactgagttgacgacaaatcgaactgaagaagaatttgtgggcgaaaagtgctactggtactgttattaagtgttttcagtcgtttttcaccgatcgatacctattcagtcattgatttcaatcttgatggttttccacatgtacttttagcatattgtttcttgcatgtgaccttctttatgattgtattgcacaactacattcttcttgtgagcattcatttatccaattctc

SEQ ID NO: 15041 - DNA, 2872 bp, Oryza sativa
  ref <308>: DATABASE ACCESSION NUMBER: AK065575
  ref <309>: DATABASE ENTRY DATE: 2001-12-06
ggtgcttcggttacttcgccggcggagtggtggttggcggcggtggggggcggtgagccggcgacggtcggcaccgcacgtcgaagcgcccggcgtccgcggtctgccgctcccggtggagctcggcgaggtggcggaggcgttgcagcctaggagaggaagcgctcggttgaggcggtggacggcggagtagcggcggccgtgggggcaggtgccggcgccaccgccaccgcagccggcttaggcggaagagacggcgggcctaacctgctactgtcccgtccccttacgcggtcacaagccattgacgccaagctggttccccttggcccttgccacttccacgccggcagcaacatccctgctacttgaggccagaaatgtacacctcagatgttagtgttatggcatggagcataacttggaaagttaagtgttcatataactacatttttttataggaactctcatataatatcatgagcattgccactatctgaaaacgaggcgacagtgtgaaattttgcttaccaggaggctcagcaaggcggaggtacaggttctcaccaaggctggccttcttctctgagtcgacaagctcccctgtccaaaccaagcatcttgacgggtcagccatggtgccgccactgctcaagttggcgtaagcatatgccttgcaagagcagttgctgctgcactcggccgcgcactggtcgaagctcctgttccggatctgcaagaacttgtcggggaccttcatgtcaggcaatgacacgaagcggtgaccgccctctccgcatctcagctcttcctttctccggcatcctgattgcgagatgctgggatctacaggctcgaacccatcgaggcaccggcacgccgggacggcccccgtgaagtcgcagtagccaaacgggccgcacgagccatagacctcgcagctgccggcggcggggcgctggaagatcaacatccatgacgacgagctgttgtcccagctcaggaacatcatcgtgcccgtgctgtcaagtgtgaggcgtgtgtagatggagctgtcggagacagtgtatgagtagtagagcttgttccctgagtcgatgagtgtttgatacatgaataagctgctgttactcggatactgggcgccggacaccgtcacgctggttctgacgccgttacggcagtatggcttggtcccgttccaggtcatgccctggaggtccgagctggggtcgaggctgaaggagaaatctccagtggatgggtcatcatggctcctccacgcagtgaggcgtccgatgatctcggacttgtagctcatcaagaacatcgtgcctgcgaggatggtatcagtcgggtgatcgaagctttgccatatgtcggtgccgtttggcaaccggagaacgaagttccccgtgtcgagcagcacggcggaggctccggtgacgctgatcttggttgtccaaagaatgtggccttgggagtccgacagcaccatgcctgagctgttggtgatggcaagggtcgctgacgaaggggtggtgattgggttgtcgcggttggcaacccacacaacggtgcgctgggggatgttgtggaaccagactccaacatagaggctattgctgaagttggccggggggaagaagccgagggcaaagatgccgcccttggagatgagcatctcgctgggaaagattggctttcccagtgtcagctggtcatcggttttgcatagaggaatcgagagcagcaggaggaacatgaggaaatagaccatattgcctgttagactttctgcttcgtttgcttgtcatgggtcaagttatatctttcattcataatgcagatatggactggtgtagttggagttcaattcccttgctgtcacctcatctgaagatcaggagaaatgtgagatggctaagtcctgattcagactcatggacagagacagtaaaggaccctgtctgaattctgatgaccaggtcacctggtcatgatactccaagtcgtgtgacaatgctgcacgaaaacgaaagaatgctgctgccatggactttggagtgataggctagtgcaggcaaaagcgaaacctcacgtgcgttccatggctccacgtggtgtcacaggcccttgatgctgccactctccatttgaagaagtacaataggggaagaaatggtgagcataccaggagagtcggctaaccggaggtataggttgtcaccaaggcttgccctcgccatgtcagcaagatccccagtccagagcaagcaccttgactgatcggacatggtgtcggctttggtcaagttgccataagcataatcgtaggccatgcatgagcagttgtggctgcacttggccatgcactcctcgaagcttctgttctggacttgcaagaacttgtcagggagcttcattccagacatggtcacgaaatggttcctacctccgcatcccaactgttgctttcttcgacatcctctcgaagagttgaaatcacttggctcgaatccatcaaggcactggcatctggggatggccaatgtgaagtcgcagtagccgaatgggccacatgaggcgtagagattgcagtcaccagcggccgctggctgttgagagatgactgtccaggacgatgagctcccgttccaactcaggaacctcatgttgcccatgtagtcaagcttgattcgtgtgtatggggagccatcagaggttgtgtacataatgtacaactcatccctagtgttcacaagtgatttgtacatcaaagtggcaatgttgctcccgtatgcttcaccggacactaacactctattaagtgaaagtgcaatgaaacggtaatatggcttggtcccgtgcc

SEQ ID NO: 15042 - DNA, 1705 bp, Oryza sativa
  ref <308>: DATABASE ACCESSION NUMBER: AK065576
  ref <309>: DATABASE ENTRY DATE: 2001-12-06
gagccgccctctcgagctcgtgcaaacctaccccagaggagttaattatagatagttaactcgtgctgcttgctagctgatcatcagttgatgccggcgatggggttgtgggagagcgtgaggagcttgttcggggagggaggcaacggctgcctacctcggattgggaagaaagagtccgaggatctttactcttatccagtggatcatgataaacggaaaggagcggaccgtgcggccgcggaggaggtggtgacagtggaggtgccggaggtgcccgtgcgcgagctgaacgagatcaccaactccttctcgaacgagaacctcatcgggcagggctcctacgcgaaggtgtacagggtcctcatgcgcggcgcgaggcccgccgtcgtcaagaagctcgagaagccgtccaagcacgcgtccaacgtcgtcttcctcaagcaggtgcgtagctcttctcggtgctttttaccaatgctcactctgctactacttaccatatatatctgcagctgtcggtggcgtcgcggctgaagcacgagaacttcgtcaggctgttggggtacacgatcagcggcgacctccgcgtgctggtctacgagtacgccgccatgggcaccctccacgacgtcctgcacgggccgagggacggacaggggtggggcggggaggcgaaggcggtggtgagctgggagcagcgggtgcggatcgcgctggacgcggcgcgcgggctggagtacctgcacgagaaggtgcagccggcggtgacgcacaaggacgtgcgttccaccaacgtgctgctgttcgaggggttcagggccaagatcgccgactacaacatgttcagccaggccgccgacatggctcgcctcaaccgctccactcacaccctcggctccttcggataccaggcgccggagtatgccatgactggtcagatgaacgataagagcgacgtttacagttttgggattgttctgctagagctcttgacggggaggaagccgctggaccggacgttgccgcagggtcagagaagcctggttaactgggcaactccaattttgactgaagacagggtccaggactgcatcgaccccaatcttggcgacaagtatcctcctaccggagctctcaagctggggagaatcgcggtgcagtgcctgcagtacgaccctacgttccggccatcgatgggcaccgttgcccgcgtcatcaactacgccgtcgtgcgagaccagcaaggcgtggtctgatgatccacgaggattttttttttttttttgcacttgttcattttgatttgttcgtgtgaatcaaccgtgtatatgccttgcgttgtgcaggctagttagacatgcaagagatacaattcttgcagtaatagttgaagagagactatatccaaaaagcctctggttgatataaactggtaccggtaaaactttcccaaagcttaggagtccatagggggaaaaaaacagaacagaaggccttattaaggccatgtgtgcaagctagttagacgtgcaagagtatgctagtagtacagtaaatcgctcaattttggatggagttgtttctcttctttttttttctcctgaagatgcatcatctaaggaaaaaaaatgtactgagcagaacactgagcttgttaggaaaaaaacagttcagtagtataaatggtacgaatgttcagtac

SEQ ID NO: 15043 - DNA, 1255 bp, Oryza sativa
  ref <308>: DATABASE ACCESSION NUMBER: AK065577
  ref <309>: DATABASE ENTRY DATE: 2001-12-06
ggtatgcaactgtcaagctcgctaggccagcaagctgaggcaccagcccaaccatggacgccgttgccggggcaagcgtgagctcctcttcggcgcggctccgcccgtgcccacgcccccgccgcatcggcaacgtcgcaccggccaccgtgcgccgccgtagccggagacgtgctgtgacctgcgcggccgccgcggacgccgacgtcgtcggcctcttcgacgccgccaagctcacggtggacaggtttgtggagagcggcatggtggtcgggctcggctccggcccggcgtccggcctcgccatccagtacctcggcactcgcctccggcgagggtctctcactggcatccttggaataccctcgtccacgatcagtgcaagtgaggcagtgaaagcagggatacaggtcagcagctacgaggaaggcacccaaaggacacaatgaccgctgtcattggccgtcggaaaacggagagcggagagccttctttcatggtggagaagggtattgttaaatcagctgataaacttgccttcatcattggccatgaaaaatatgtgaaaggcatcgaaggttcaattccagtcttggtgaaaagtgcaaattggatcgacactgctgaagagattgatgacttgttcctaggagacgcagaggtatggaggcggccatcgattggaaccgctggtccattaggaggtgacttcccattggttaccaaggagggccatcatgtacttgatgttatcttcacaactcccatcccggatcttggtaaggtagcagaaagcttggagaaaattgccggtgtcgtggaccatgggatagtttccagcattccatcatatgtcgtagttgcattgaacggggaagtgcaggtcttggatgagaagtcatcggtgataccatagcaccgaaaatacaaattcaccaagttttacagaagaatctattgcagataggctgaaaaatgccagtgagttaatcgtgtggcagtattttttttcaccatacgacattgttgtcgttcggtttatgacaaccaccacacgaccggagaattttacaacccgagatctacagttactgtgaagaatcgtgtgaatttttctgttttttttttttgtgaatcacgtctatattaagttttcagagaccatggattaaaagtttgagccgagtcataaaagaaagttggccagcgaccatgtaatatgtatgaccaattggcaaaatattcttctcgaagc

SEQ ID NO: 15044 - DNA, 1438 bp, Oryza sativa
  ref <308>: DATABASE ACCESSION NUMBER: AK065578
  ref <309>: DATABASE ENTRY DATE: 2001-12-06
ggcgcagaaaggcagcgccgtgactgagaacaagagaggccggcacagagagacgctctcggctagggcacggatcgtcgcgacgaaggaagatgtcgtactccagaggatcaagatatgagtccgactcatattctacatcgcccagacggagcagccgttcaaggtataggagtcgttctagaagtgtggactcaagtgatgttgaaaaccctgggaacaacctgtatgttactggcttatctgctcgtgtgacagatcgagatctggagaaacacttttctgctgagggagaggttattgatgctagcatagtacttgatccatggacaagggaattccggggatttggatttgttaccatggctactgttaaggaggctgatctttgcatcaaatatctagaccgctcagtgttggaaggtcgtgtgataactgtagagaagcttttgttgacagcagcagggtagatgtccgttgctgctctacgtcaaattcaaaagatttacaacctaacagccaaacatgctacctcaaccaaagggccaagagaagacgtggtcgaacaccaacgcccggaaggtatctaggcacaaaatcatcatgtgtgacaccagcacggaggtattccccaagctactcgcctgttgaaagagaccgctacagttcacgctactcacctgagcgagaacggtcttattctccttatggtagaaggcgatcatattctccatacaacaggcgaagatcatactccccctatgagaggcgtagatcctactctccacatgaaaggagacagtcctactctccgtatggcagatccccttctccttatggtagacggcgatcatactctccctatgacacacgtggttcacggcgtcggtcatactcatcttaccgtggttcccgctaccgttcaagatctccataccgttacagaagagagaggtcatgttcctatgaccattctgtttcaccatactatagaaggtgctattctccaagtgctagaggacggagctattctcgcagtgtatcacctcagaggagctactcccatagctgttccccggattctcagaggtcagggagctattctccaaggaaaagatacagtgaaaggaaaccgtcgcgcagcaggtcgtcgggtaagaggcattctagggagagctactctcacagccgcagttcctactcaaggtctgtctccagggagcgctcagaatgaattgaagcttgatgttctagagatcaataaagctctctatgcctaagtgtatgtctgtatctcgtgaagcttactttgcacctgtttccaacttagaaaccgtgtaccataatatttgtgtcgtattgtatcggatacttctatatgtttatgcttactttcgtaggcagatattattggtggttcgttatggtgtccagatct

SEQ ID NO: 15045 - DNA, 1561 bp, Oryza sativa
  ref <308>: DATABASE ACCESSION NUMBER: AK065579
  ref <309>: DATABASE ENTRY DATE: 2001-12-06
gggtttccctccccccgagtcgaggcgagctgagacgaagcgcggcggcggtggagctgtctatgagcggcggcgcgctgcggacgttcacgcggtgcgtcacctgcctcgcgcgcgtcggctccgacctcgtcctccaggcccaccccgccaagcttgagctgcacacgctcaacagctcgcgatcggcgtacgcgtccatctcgctggcgcgggacttcttcgacgagttcagcctctccgccgccgccgccgccgactcggcgccgtcgtcgacgccgctccagtgcagcgtcctcctcaagtccgcctccctccccaaccccgacgcgcccaagctccagctcaccctccactgcctcaacggggtgaagaagacgtactggatcgcgtgcagcgcggagtccgaggtgcagacgctggcgctcgaccgcagcaacttctccagccgcctcgccatccggccgcgggacctggcgcgcctgctctccaatttccagtcctcgctgcaggagctcacggttattgccaccggtcctgctgctgggctctccaacgtcggcgtggatggtgagattgaggggaaggctgtcgagctcagaagctacattgacccgacgaaagatgactgcgatacgaggctgcacacgcagctgtggattgacccaacagaggagttagtggagtatgtacattccggtgattcagtggatgtcacattcggggtgaaagaactcaaggctttcttaacattttgtgaaggatgtgaagttgatatcctcctattctttcagaaggctggcgagcctgtccttttggttcccaaatttgggcttgacgatggatcaagttctgattttgatgcaacactagttcttgccactatgcttgtatcacaacttactgacagcagtgttgcccaacagccaactacttctgcacagcgagcagaagaaccaagggttgctgctacaccaccaccagtccctgaaaatgtctcaaaccatactaaaatatggtcggagctatcaggtagtgctcccaaaagttttgaagttaacagagaaaaatacacccagaaggagagaaatgccaattctaatgcactgaatgacacatcaatgctgcatagtgtaaatgctcgctacaagccaccagtcgctgataatgcaaacgatacaatgcagcctatgcaaatggatcacttggaagagcctcctgatgttgtcagtgataatcctcgatcacagcatcacccaagcaattgggtaggtgctgatgaagatgacgatgatgacgaagatgaggagcttttcgtccaaacaacaccgcactacatggactagggatcgatgctgatccttatactttaggtacatatcaggctatcagcccgatgcaaagagaatggactagaaactagttaagtacctttctctttgctcttagttctttcaggcctgaagttaacacagaatatgttaatctttttaacaatgtgacttgtttgtatccgatgtggctatggcatttctcatagtgcagagattttttttatggc

SEQ ID NO: 15046 - DNA, 3052 bp, Oryza sativa
  ref <308>: DATABASE ACCESSION NUMBER: AK065580
  ref <309>: DATABASE ENTRY DATE: 2001-12-06
aaaaaaaatccccaaatcgatccgcctctctctctctccccccttctcgccggcggccggcgcggcgcggcgaggcggattcggcggcgatttccttcctagggtttggtcttcctcctcccctccggcctcctctcgcaccgacggcatcgccccctcccttctagatccgcctcgccatcgaaaaccctagacgaccacgagccgccatgaccgtcccccttcccaccacccgccgccgatggcggcatcgacgattacaacctgcgattaccgtcatgtcgtgcggttcgttcgtctccccctccgcggcgacgcctcgagcaggtaatccacggggttggggtacctagggttagcgtttgttcggtgaacggggggcgtccgttgcacggcacgacccgaccactggctcccgcatccatggcgatgacggcgatatctcccgtcagttgcatggtccccttgcacaaacgcccagaccaagttgatctcggaacctaatttacatcagatatcgttgccttgcactgattttagggattagggtaaagtaaaggccttataaatgtatgttcccatgaagtctaaccggacctgttgtttcccattcatgccgttgattgtagggcttgcttgtttaggttaggtgataaaaattagaaaatgcttaaagtaaagcagtagtgatgtatttctttttttttcttttttccaatctggatgttttagagatggattgttttctatttggtttaggttgggtttccttgtattctcttagattcgttgggtttcttatcaacaatgttgtctgttgactgtgttgtttgtgagggatatgggtttcattgttttgttccttgtgggattaaacatactttagataagtaaattgggctgtatttgtacaattggtagcatctgccctttggccttttatttgctactcagtattgtcggcatcatccggtttgtttggaatttattggataagattaatggggtttctgttaggatgcaagtatgtaactgggcttggtcagccaacccacacactgatcattcagttgctttaccctaatatctggctttgttcataaagatgccgtacgatagctataggccatgtgcagagattgagtaggtgggtcatccatcccacttgcatacgtactactaatatgtgtaagagtttcttgtatgatgttactaatagatggctctgaaaatgtacttttttttgtccatatttaatttttcagtgtccttaccagaaatatctctggcctatctctagagctgtattgtctgtggtggtggtcccttcaaagttttgtgcaatcggagcatagctatcttcttttacctctaggttgtgttttagcagctgaacaagtgctgtaatcctttctctacttctttctgcccccccccccaaaaaaaaaaaagagagagagagaaagaaaagggaatgtcctatcttgctatgtttctttaagttggttctgttttccttccttccaaatgaaattggttcttgtgaatcaatgtagcgtccctttacacagtattgttttctcccagttgtcttgtctttttatttgacttttcatatatgtaagggaaagaagaaggccttagagaaaaaaacagtagaaaaaggaaaagaagataggggcaagctcatcctagaaccctagttggcttgcagtcaccttcttcctcaccgcaatggctggtgccttatctgctcgtcatggaggctggtgcctggtggagtacgatgcctcttagggcacagaagtatagaacacgtgggtatgaagacctatgttgggctttggtgggctggctgcctggcttagtgggccttttaccaaataccccctttcttcttcctaatttctctaccatgttctccactaatcacgcctcaaccatctcatatggcaaagcaacgccttatgcctcagcgctatggcgctaaggcagtggtgggtcgcgttaaactgccttaacaacactggtttcatatatgtaaattgggttgtacttgcactgaccttttcttttgcaccctgttgccttgcataaatttgttggtacatggctgatgttttactcactgttttgttaagattttacagtttgtttggaattttgttaattggtgggatttttgttgggatgcaaccgggcttggtctaccaacccagataccaatcctttgcttgctttaccactaatattgagtattgttcagaaaggcgctgtgtgagctgggtttctgcctaggagctaggttacctgttaatacttgtgcagcaggcgggaggatgccgcctagcgcctaccattgccctagtatgctgggtggaaccttgtcactggttataggtccatgtgcagaaagtgcggtaggtgggtcagtctacttgcatacctactttgcctcgtatgtttgtaagagtttcttggatgttctatcttgcttatctgtactgcatatagtctgccccgaaaaagaagatttttctgttgatatttgttatcctccataattaacttctcagtgcccttatcatagaattatctccagggaatgccctacgttgtttgctcttgtagttggttttgtttgcctcccttcatatgaaaattggttgttgtgaaccaatgtaaccctttacatccagacgtcttttttgtttgttttcccgtggtgctgactttttgtttttagttctatgaagctgagttatcttgttcctatttggtgtattagaataacgctcttttcacatgtttggtggacaggtggagtttatgttattcatacatgcaagttatgtcaatgacacctaactggtttagtttagatccttgtgtctcattgtctcctttgcaagacagaagttctatttgattaaagcaatgctgcaatgtatgttgattgtgaggcaatgactgaaaaggatgattatgagagcaatactgaatcacctgtctgtttgtattagtatgtgagtgtgacaataatattaatggc

SEQ ID NO: 15047 - DNA, 1730 bp, Oryza sativa
  ref <308>: DATABASE ACCESSION NUMBER: AK065581
  ref <309>: DATABASE ENTRY DATE: 2001-12-06
ggctagctccccaagtcgaaacgtcgtcgcccctcatcatctcctcctcgttgtcgcacccccaaccgcacgctgccgccgctcgcttcctcctctcctcgtctcactccagaaagccaagctgcaaagcactatggcacatcccatagcaatggcagcatggacacacagccatcggagcctgaccgtggtaaaagctttcatcgcggtgcctgatatatcgacgccgacatcgagcacgccccaactccatatgtatttgcaggctatagatgagctgaaagatctcctttcttttcaagcaagaacaaagttaagcaagggaagatccaagaacaagaacaccaatggctgacgagtcatggagggcgccggcgatagtgcaagagctggcggcagccggcgtcgaggagccgccgagccgatacctgctacgggagaaagaccgttctgacgtcaagctggtcgccgccgagctgccggagcccctccccgtcgttgatctcagccggctagatggtgccgaggaggccaccaagctcagggtggctctgcagaattggggcttcttcctgcttaccaaccatggagtagaagcctctctgatggacagcgtgatgaacttgtcgagagagtttttcaaccaaccaatcgaacggaagcaaaaattcagcaacttgatcgatggcaagaacttccagattcaagggtatggaactgaccgggtggttacccaagatcagatcctggactggtctgatcggttgcatctcagagttgaacccaaggaggagcaagatcttgccttctggcctgaccatcctgaatctttcagggatgttctgaacaagtatgcatcaggaaccaaaagaattagagacgatatcattcaggctatggccaagcttcttgagcttgatgaggattacttcttggaccgactcaacgaagctcctgcatttgcaagattcaactactaccctccctgtccaaggcctgaccttgtgttcggcatcaggcctcactccgacggcaccctcttgacgattcttctcgtcgacaaagatgtcagtggcctgcaagttcagagggatggcaagtggtccaacgttgaggcaactcctcacacattgctgatcaacttaggtgacaccatggaggtaatgtgcaatggcatcttcaggagcccggtgcacagggtggtgacaaacgccgagaaggagaggatctccctggccatgttatacagcgtgaacgatgagaaagacattgagccggcggctggtttgctggatgagaatcggcctgcaagatacaggaaagtgagcgtcgaagagttcagggccgggatctttgataaattctctcgaggagagaggtacatcgactccctgaggatctgatctcgaagagagcatgattgttgcaagctcagcagctttcagtagcaagtatttccttgggaaaacaaacatttttccccccttaagggaattgctgaaaacatgtcgcaagttctcgtaaagaaaaacttttaaatttaactatggtataattgtaatataattacatatgtaataacccctccgtttcatattataagactttctagcattgtccacatttatatagatgtgggcaatgccataaagtcttacaatatgaaaacggaggaagtcttgtaactacggtactgcattcttttcaaattacaaattacttgtcatccg

SEQ ID NO: 15048 - DNA, 1789 bp, Oryza sativa
  ref <308>: DATABASE ACCESSION NUMBER: AK065582
  ref <309>: DATABASE ENTRY DATE: 2001-12-06
gagtgttgcttgagaggtactcactctgtgcaggtgccagtggactcagggcatttagctagccagccaaagccaattgccatgtggagtgctctcttctcccatctgagagaggttcacaagattttttttgttaaggaggagaagttgataatgaagtcgccagcagcagcaggtgaggccgccggctgccacaagccgcaggcgactgccaccaacaagatgacggtgctgcagtccccgctggggctcaggaccatcctcacctccctcgtcgccttcttcatcgtcgtcagctccgtctccctcctcttcgaccgcagccaggatgctcaggcgcagctcgccgtcgcgcagcatcagcaccaagaagtccagctcaagcagaagccggcatcagcagcagtgggcgagcagaaatcagtattcgtagatcagtcgtcgctgaggagccaggaggcgcaggtgcagtggacatctgagctgcaggacgtggccacggacagcggcgacggcggcgtcgacggcgaggaggagtgcaactggtcgttgggacggtgggtgtacgacaactcgtcgcggccactttactccggcttgaagtgctcctttatcttcgacgaggtagcctgcgacaagtatggaaggaatgacaccaagtaccagcactggagatggcagcctcacggttgcaaccttccaagattcaatgccacaaagtttcttgaaaagcttaggaacaagagactagtttttgtgggcgattcagtaaacagaaatcaatgggtgtcgatggtgtgcatggtggagcacttcatccctgatggccgcaagatgcgcgtttacaacggctcccttatctccttcaaagcatttgagtacaatgcgacgatagatttctactggtcaccactgctattggaatcaaacagcgacaaccccataattcacagagtggagtatcggatcataagggcagacaggattgagaaacacgccaatgtctggaaggacgctgatttcatcgtcttcaactcctacctttggtggaggaagcagagggatggtatgacgatgaaagtcatgtatggttcatttgaggatggggatgcaaagttagatgaggtggaaatggttgatggttatgagatagctctcaagaaactaactgaatatcttggagccaatatcaacaagaacaagactagaatcttctttgcaggctcatcacctgcccattcctgggctagcaactggggaggagatgacaacaacaagtgtctaaacgaaacagaaccaattcagatagaagattataggagtgcaaccacagactacggcatgatggacaaggcgaaggagatctttggaacattggaaccaaagggcatacatgttcagatactgaacatcacccagctttctgagtaccgcaaggacgcccatccaacgatattcaggagacagtacgttcctctgacgaaagagcagattgcaaacccgagcatctacgcagactgcacgcattggtgcctccctggagttcctgatgtctggaacgagttcttgtatgcgtacctcatgcacaaatgatatatgtataataatgtaaccttaatttggccaaatttcttctttgttaacttgtgggtgtctaagtaggtataagtgcacagtacttggcccccatcaattttttctgtttttgacatttacatcattacatgtaaagagaaagggaagaacataatcgcagaaatgaaaaggaagaagataagttgatttgccc

SEQ ID NO: 15049 - DNA, 1505 bp, Oryza sativa
  ref <308>: DATABASE ACCESSION NUMBER: AK065583
  ref <309>: DATABASE ENTRY DATE: 2001-12-06
gaccactgtttgctgaaaacttgtgcagacaagacaaggtcgacatggccagcagcagaagctctctggtggtcgcaatggcggtggtgatcctgcaccggtggtgctgcgccgctgctccggcggccgcggcggcgaaccggacacggacgccggcgctgttcgtgttcggggactccatcgtggacgccggcaacaacaacgccatcacgacgctgatccggtgcaactttgcgccctacggcaaggacttccccggccacaacgccaccggccggttcagcaacggcaaggtccccggcgacatcctcgcgacgcagatgggcatcaaacagtacttgccggcgtacctcggcgcggagctcagcgacttcgacctcctcaccggcgtcaccttcgcctccggcggctgcggcttcgacccgctcaccgccgagctcgtgtcggttctgaccatggacaaccagctggacctgttcaaggagtacaaggagaagctccggcgcgtcgccggcgacgcgcgcgccggcgagatcgtgtcggagagcctgtacatggtggtcaccggcaccgacgacctcgccaacacctacttcaccacgccgttccggcgagactacgacctcgactcctacatcgatttcgtcgtccggtgcgcctcgggcttcgtccggaagctgctcggcatgggcgcgcggcgcgtgaacgtcgccggcgcgccgccgatcgggtgcgtgccgtcgcagcggaccaacgccggcgggctcgaccgggactgcgttgcgctgtacaaccaggccgccgtcgtgtacaacgcccggctcgagaaggagatcgagcggctaaacgtcacggcggcgccgccgggcaccgtgctcaagtacatcgacctctacacgccgctgctcgacatgatccagcgccccgccgcctacggattcgaggtgacgaaccgaggttgctgcgggacgggggtgttcgaggtgacgctgacgtgcaacaggtacacggcggatgtgtgcagagacgtcgacaaattcctcttctgggacacctaccatctcacggagagaggctacaacatcctgctctcccagataataaccaaatacggcttctgaacttcttaattctgatatagcagaatcttcagagaagaaaacgaggaaactttgatttcgtagtatcatctttcatcagtgcttcagcagcagctacagcattccaaacttcagtgctgaaatatgtggtactaatactgaagatctgatgggcatgatcctggaaaggttcattccataagctgcagtgtggcagcttaggtttcagtttgccagttaagtatcttgctgtgatgctgaaccctacactgagaaatggtgaccagaattttcatgtcaaaaatatgtggaaaatacagtttcatctttcatgtaaaggacaaacattcagcctaacaagcagcatcaagagtgggcatcacagaacctcgtaatctgttcggc

SEQ ID NO: 15050 - DNA, 1769 bp, Oryza sativa
  ref <308>: DATABASE ACCESSION NUMBER: AK065584
  ref <309>: DATABASE ENTRY DATE: 2001-12-06
gaattttctcatggccgccgcggccgtggtggattggttgactggagggagctgttcgtctttgacgccttgacgggttcccgcgggtaaggagaagtaggggccaagaaaccctaggtttccagttgattggagggtttgactgctttgcagcgagtacaaaaactgggctcgacggcggccatgtcgcagcactctttccgcctccaaaccactggagcagccgcagcaagcaacctcttcttcttgttctttcgccgcctcacaaatcacaatccccccgggtgtaaatgaactaaggggaaggaagggttctagactggagattgcattctggtcatataccaaggaaaagagaaaatgtcatctagttatgatgaagggaaaagttttgctcggagggaccttttgcttaagatccaatctgaagtgcaaaaatgttgggaagagaacaaggttttcgaagcaaaggctggtgatacacctccaagccctggtgaaaaattctttgggaatttcacatacccatacatgaatggcatgctacatttaggccatgccttcacactatcgaagcttgagtttgctgcagcataccacagactccatggctcaaatgtccttttaccctttgctttccactgtactggaatgccaatcaagccatcagctgataagcttggtaaagagatacaacagtatggaaatcctccagtgctcccacctgccaacaaaaactcaaaatttgagttgacaaatgatagaatttatggccagaccactgctagtgcccaagataagtacaggagcaagagatctaagtcagtagcaaaatctggctcatacaaatcccagtgggagatcatgaggagctttggcattgctgatggagagattgtggaatttcaaaatcttcatcattggttaagctactttcctccgctggccatggaagatctcgaggattttgggctaagttgtgattggaggcgttcatttataaccactgatatgaatccattttatgatgcttttgtccaatggcagatgagaaagttgaagaaaatgcacaggattgtcaaaggcaagcagtacatgatctactccccattagatcgccaaccttgtcttggccatgatcgggcatcaggtgaagaggtcgagccacaggaatatgtactgattaagatgaaggttattccgccatttccacccaagttgatggtcctggaaggcagaaatgtgtatttggccgcagcaacactcagacctgagacaatatatggtcaaaccgggggcgaagctacaggtaatcatcggggtcagtagaccccaacgatgttttgctaatgtccagtacccctcttattttaccagctatgcccccaatgaagagctaaactagaccccagtgacatccttgattgttccatcaaagagcaattctatactagtggtacctcatggtacctcctcaagaaccgtaaaattgctctccatcaaagctcaactggttactataggaacgagatactagcgagcagcaaatagaaaatgaactagcagttatgattatacaatggcccaatatgcatatacgattgatatttgagcccataaataagatcggaagacactactccacaaattccctggttgcatcatcatattcctcgttgtattgcatcggcatcgcacgtcctgacatcatatttatcatattttattttatttccagcataatggaaggcaaataattagtggttttg

SEQ ID NO: 15051 - DNA, 1821 bp, Oryza sativa
  ref <308>: DATABASE ACCESSION NUMBER: AK065585
  ref <309>: DATABASE ENTRY DATE: 2001-12-06
gaggcaggggaacgcaaggcatatcgtcgtcaattcgtcatcttccccaatccaacccaaccccccctgaactgcacggctcgcaatcgcaagccgaaaagaggtcagcgagctgcgtatcagcgtatggcccgcatctgaggggagaggaggaggaggaggaggaggaggagggatggggcgggcgttcgtgcacgtgatcctcggcggcggcgtggccgccggctacgcggcgctcgagttcgcccgccgcggcggctactcccgcggcgagctctgcatcatctccgaagagacggttgctccttatgaacgtccggcactaagcaaaggctatttactcccagaaggtgccgctcgtcttccaggatttcatacctgcgttggtgccaatgatgaattactgacggcaaaatggtacaaagaaaatggtattgaacttgttcttggaacaaaagtgataaccgctgatgtaaggatgaagacattgcttacagccactggagaaactatcagctataagaatcttatcattgcgaccggtgctcgggctttgaagctggaagagtttggaatcagtggatcagatgcttcgaacatatgttatttgcgcaatcttgatgatgcggataagttagtgaatgtgatgaaatcatgtcctggtggaaatgctgtcgtcattggtggtggctatataggaatggagtgcgcagcagcattggttactaataggataaaagtaaccatggtcttccctgaaagccactgcatggcccgtctatttacaccaaaaattgcagaatattatgagaactattacacttcaaaaggtgttacctttgtcaaaggaactgtgcttacatcctttgaaaaagattcgacagggaaggtgacttcagtaatcctgaaagatggtaaacaccttcctgccgatatggttgtggttggtattggcatccgtgcaagcactggtctttttgaaggtcagctgttgatggagcaaggtgggataaaggtaaacggacaaatgttaacaagcgatggttctgtatatgccgttggcgatgttgctgccttccctatcaagctctttgatggtgttatacgacggcttgagcatgttgactcagctcgcagaacagcgagacatgctgttgcagccatcctggagccttcaaaaactaaggacatcgattacctgccattcttctactccagggtcttcacattatcctggcaattctatgggaacaataccggagaagtggttcactttggagacttcacaaacagcagcccaaggtttggtgcctattgggttgataaaagccggattaggggtgcatttcttgaaggtggaagtcgagaagaatacgaggcgatatcgaatgttgttcggcgtaaagctaaggttataaacattgctgaacttgaaaagcaaggtctgatgtttgccattcaagaaagccagaaggacttgcctgatggtgggcttgctcttggtgaaaagcctacatatgtatggcatgcaacggctggtgtcattgcagctgcgtccattgctgcatttggttattggtacggcaggaaacgccgtaggtggtgaaaaatctgggagcgactcattccttttgcaaattcatcgtctcctgtgcctacataactgatggactaaagttactcagagaaaagtcctgtataacctgtatcagagaaaaaaatcatgtacaatctgtatgaaagtatcatctttgtaccaaatgtaaacaaatacacagatcccataatatatattgtttaatgaaatggtatgctgttacg

SEQ ID NO: 15052 - DNA, 3418 bp, Oryza sativa
  ref <308>: DATABASE ACCESSION NUMBER: AK065586
  ref <309>: DATABASE ENTRY DATE: 2001-12-06
gattcgaaaaccaagacccccctcctccccatcaaaacccagccacaatcacccggttccaccccccgatccagccctcctcgccgcgatccactctcccgggcgtcttctcctcgctcccacgatcccgccggtggatcgggccgccgtgattggtgccggttcgaggcgccgtgattggtgccggttcgaggcgatgatggccgcggcggtcgaggaggaggagatggtggagaggatgcacgggtgggcgagggacatggacgtggcgtcacgcagggccgaggaggaagcaatgagacggtatgatgcggcaagttggttgcgaagcacggttggggtagtgtgtgcaagagacctgccagatgaaccgtctgaggaggaattccggcttgggctgagaaatgggattgttctttgcaatgcactgaataagatccagcctggtgccatacctaaggttgtacaagcccagtcagatgctgctggccccacggatggctcagctctgtgtgcatatcagtactttgagaatctgcggaacttccttgttgttgtagaagatttaaggcttcctacatttgaggtgtccgatttagaaaagggtggcaaaggtgttcgggttgtggattgtgttcttgctttgaagtcattcagtgaaagtaataaaacagggagacaagcttcgtgtaaatatggcggcctttcaaaacctttgacagccagaaagtattttatactcaagaatactgatgcttttatgaataagataatgaaagggcactcagcagaggcaatccagagtgaattttcagaggggcaaagcatagttactgatttttctatagagtctaatgagatgactacttcagactcccttagcattcttttgcgtaaagttctcttagataagaaaccagaggaagtcccattgattgttgagtcgatcctaagcaaagttattcaggaatatgagcatcgaattgcaatccagaacaagatggatgaggaggagcaaaatctcttgaatatcacggaacaggtcaaccatgtagttgtaaatggtgatggtgaagttaaacagttccaactagaggcacagacaaattttgatgtgcaacaaaaacagatccaggaattgaagggtgctctttcttttgtcaagtctggcatggaacaactgagattacagtactctgaagaatttgctaaacttgggaaacatttctacactctctccaatgcggcttccagctaccataaagttcttgaggaaaaccgcaaattatacaaccaaatacaggaccttaaaggaaatattagagtatactgtcgagtgaggcctttcctacctggacatagaagtttatcaagcagtgttgctgacacggaagaaagaacaatcacaataatcactcccacaaaatatgggaaagatgggtgcaaatcattcagttttaacagggtctttggtccagcatctactcaagaagaggtcttttcagacatgcagcctttgatccgttcagtccttgatggtttcaatgtctgcatatttgcatatggccaaactggatcaggaaagacttttaccatgagtggaccgaaagttttgacagaggaaagcctcggtgttaactatagagcactaaatgacttatttaatattaaagcacagagaaaggggacaatcgattatgaaatttctgtgcagatgattgagatctacaatgagcaagtgagggatctccttcaggatggtggaaacaggagattagaaataagaaatactccacagaaagggcttgctgttccggatgcaagcatagttcctgtcacatctacggccgatgttgttgaattgatgaatcaaggccagaagaatcgtgcagtgggttcaacagccatcaacgatcgaagtagccgctctcatagctgcttgtctgttcatgtccaaggaaaatatttaacatctggggcaatgttgagaggttgcatgcatcttgtggatctagctggtagtgaaagagttgataagtctgaggttgtaggagacaggctgaaggaagcacagtacataaacaagtcactttcagcattaggagatgtgattgcatctcttgcacagaaaaattcgcatgtcccttaccgaaacagcaagcttacccagcttttgcaagattctctaggaggacaagcaaaaacgctgatgtttgttcacgtaagcccggaactagatgctgtcggtgagacaataagcacattgaaatttgctgaaagggttgcttcagttgagcttggtgcagcaaaagcaaacaaagaaggcagtgaggttagagagctcaaagaacagattgctaccctcaaggcggcattggctaaaaaggaaggagaaccagaaaacattcaaagcacacagtcaagccctgacatgtatagaattaaaagaggcaatgcaatacctgccttccctaaaaatagacagccaatggaagaagttggaaacttagaggtccggaacaatgccactccaatgcaaaagaaggccagctttcaattttctggtgtcctcagtgagaacaactcatccgacttggctgaaaaattgcaatggcattcagaagaccgatagaatggctgtcggtaataatcaatttgagaatggaaattccattctagagctggagcctggcgcaactcagcttccaacatttttctaccaaagatatgatcccgacaagcaaaggcgtagggctgaaccagtagaaactgatgactcagatagctttgatgctgctactagctcgccttccgaccaagaaatgttgttgtccaccagtggcctcaaagctgatggtattgccagcagaggtgcctttattataaagaaacctcaaacaaagaatacgaaaattacagcaacgaagattccaaatcttgcaatgaagtcgccaatgtcagagaaaaggctgcaaaccccaatcaggaacagcaagcagctacctttcagcactacgggtggaagaagaactcgaaatggcaaaattaacactccaaaataatcgactagtgcgaaggtggatcccactatgccaaggtgagatcaataggaaactgaaagaaggatgtttctaaaaccctgtataaggatcagtggattgttcagtctgatggaaaaattggttttgagacatcaaagatagagataaacagataagacctccaacaggacagagaaattgtaaacccagaaggaatttttcaaatttgagatcagtacatagctcacacgcagaagttacggttgtattgtatgtacattagcctggaatagatgcccgccatgtgccattacaacaaagagaagttcaatgacaagtttgtacgcttcatcatgttaaattgtcaaatttaggcc

SEQ ID NO: 15053 - DNA, 1606 bp, Oryza sativa
  ref <308>: DATABASE ACCESSION NUMBER: AK065587
  ref <309>: DATABASE ENTRY DATE: 2001-12-06
ggttggccggccgtgcggcccgtgcctcctgctatagtgctatccaaactgcggtcccgccggagccacgggccacggctacccctcgaccgcatcgcctcctctcctcgcgccctccgccgccgccgtagccttctcccctcccctgtgcggaatcctccacgcgcgcacggccggcgaccagggaacttcagcatgcaacaaatggccgtatctgcattcactgcaaacccatcctcatcacatggcaataccttatcggggttgtgctcccgtcggcctgagatatggcacaggagacgcatcggcagcagaattcgggcgcaggcgcagtcgcagatgcagtatcggaagctgggagattcagaccttgtcatcagtgaggtcactcttggaacaatgacatttggagagcaaaacacggagaaggaagcgcacgatattctttcttattctttcgatcaaggtgtcaatatccttgacacagcagaaatgtatccagtgccacccagaaaagagactcaaggaagaactgatctatatataggcagttggatgcaatcaaagccacgagataagattattctagccacaaaagtttcaggttactcagagcgatctacttttctccgggacaatgcgaaagtagttcgtgttgatgctgccaatatcaaggaaagtgtcgaaaagagtctttcccgcttatctacagactacattgatttactccagatacactggccagataggtatgttccactatttggtgaatactgttacaacccaaccaaatggaggccaagtgttccatttgaggaacagttgaaagctttccaagagctaattgatgaaggaaaggttcgctatattggtgtttccaatgaaacttcatatggagtgatggagtttgtacatgctgcaaaggttcaaggacttccaaagattgtgagcatccagaacagttatagtctaattgtgagatgtcactttgaagttgaccttgttgaagtgtgccacccaaataactgtaatgttgggttgcttgcctactctccattggctggaggtgttctcactgggaagtatattgatactaaccctgacatatcaaagaagagcaggctaaatctcttccctggatacatggagcgctacaatgcatcgttggctaaagaagcaacgaatgaatatgtcaagcttgccaagaagcacggcctaactccagtccagcttgcactgggctttgtgcgtgaccgtcgattcacagctagcacaatcatcggagcaacgaccatggatcagttgaaggagaacattgatgcatttaccagtgctccacggcctttggcaccggaagttcttgatgacatcgaatccctcttcaagagataccgagacccaacactttcgtaggtgaggataaagaaaaaagaacgctttcgtaaaaaaaaattcatctttttttcctatgaatgtgccttccacagacaaaagcccagaaactagttgtgcttttgtggtttcaccgtatcatccatgccaacaagacatggatttgtctattctgttgattttatgattaatggcaccacaaattttttttccc

SEQ ID NO: 15054 - DNA, 1787 bp, Oryza sativa
  ref <308>: DATABASE ACCESSION NUMBER: AK065588
  ref <309>: DATABASE ENTRY DATE: 2001-12-06
gttcattcctctccccccccccccctgaacccggccaactccggcgagagagacatagatagcgtgtgagacagtataaagatagagagggagaggtagttttttgttgccggcttgcggatttattgtaggagatcaggtcagtttcgttttcttgccggcgcggcgggcgtttgttgggtgcggcgggcggggaggagctcgtgaatggtgaacggagaggcggaggcggagtgcacgcgggcgtcgctgctggggaggtatgagatcgggcgcacgctcggggagggcaacttcggcaaggtcaagtacgcgcgccacctcgccaccggcgcccacttcgccatcaagatcctcgaccgcaacaagatcctctccctccgcttcgacgaccagataaggagggagattgggacgctcaagctgctcaagcaccccaacgtcgtccgcctgcacgaggtggctgctagcaaaactaagatttacatggtgcttgaatatgtcaatggaggcgagctctttgacaagattgccgtaaaaggaaaactctctgaacatgaaggaaggagacttttccagcagttaatcgatgctgtgagctattgccatgataaaggtgtctaccacagagaccttaagcccgaaaatgttcttgtggatcgaagaggcaatatcaagatctctgactttggcctaagtgctttgcctcaacatcttgggaatgatggattgctgcacacaacatgtggcagccccaattatattgctcctgaggttttgcagaaccgaggttacgatggctcattgtcagatatctggtcttgtggagtaattctctatgtaatgctcgtcggataccttccctttgatgaccgaaatcttgttgtcctgtaccagaagattttcaagggggacactcaaatcccaaagtggctttcacctagtgcacgggatcttcttcgaaggattcttgaaccgaacccgatgaagaggatcaacatagcagggatcaaagagcatgagtggtttcagaaggattacactcctgttgttccatatgacgacgatgatgacaattatcttgactcagttcttccaatcaaagagcaaattgatgaagcaaagcaggaaaagcctactcatatcaatgcttttcagttgattggaatggcttctgcccttgatctttcaggtttctttgaggaagaggatgcgtctcaaagaaagataaggttcacatcaacacattcaccaaaagatttattcgacaagattgagaatgttgtgacggagatgggattccaagtccagaggggtaatagcaagctaaaggtcatgaaaaatggcaggggttcaaagaacctcaggaatccatcatcattcttggtctgtactgaggtagtcgagctcgggccatccttatatgttgtcgaattgaagaaatcccatggagatcctatattgtatagacagctatgtgagaggctatcagatgagctaggagtgtgcaagacagagcagattcagaggacggagtcgctggaggatgatctagagagcttcgacagcggatcttctctgcctggtttttgaagaattgccgccctggatcattttggttagagttagaggaacatgctctgttcttcatacaagcgtaggttaggatgttgtatagtgtacaaagtgagtggtgcaagttagccaccgatgtttaatataaggattgctctcttcttgcccgtctgttggcccaattctttcccataatgaaatgaaatcatcag

SEQ ID NO: 15055 - DNA, 1923 bp, Oryza sativa
  ref <308>: DATABASE ACCESSION NUMBER: AK065589
  ref <309>: DATABASE ENTRY DATE: 2001-12-06
gacaaacacctggcctatttttaggcatcctcttccatctccagagaagtgagccccagcctcatgtcacaagggaagcactagccaccatagaactctctctctttttctccttcctcctaggagggtcccaaatacaccaatcgtgtcttggattttcccaaacacagcgcgcactctcgcccttcacctctcctccccctcacccttccattacatggatcagggagggaggaaggaggcctgaagtggcgcagagtaggcgcttgtaaacaaatccccccatttgcttcttttgcactgaagaatccctgaagaatccagcaggatggagaagaaggcgtccatcctcatgaaccggtatgagctcggccgcatgctcgggcaaggcaccttcgccaaggtgtaccatgcacggaaccttgcatccaaccagagcgtcgccatcaaggtcattgacaaggaaaaggtattgcgtgtcggcatgattgaccagatcaagcgagagatctccatcatgcgcctcgttcgccaccccaacatcgtccagctgcacgaggtcatggccagcaagagcaagatatactttgcaatggagtatgtccggggtggtgagctcttcagcagggtagccagggggcgactcaaggaggatgctgcgaggaagtacttccagcagttgataggggctgtggacttctgtcacagccgcggtgtctaccaccgagacctcaagccagagaacctcctcgtcgacgagaatggcaacctcaaagtgtcggactttgggctgagcgccttcaaggagtgtcagaagcaggacgggctgctccacacgacgtgtggcacacctgcatatgttgcaccagagataatcaataagaggggctatgatggagcaaaagcagacatatggtcttgcggtgtcatactctttgttctgcttgctggctacctcccattccatgactcaaatctaatggagatgtaccggaagataagcaaaggtgatgtcaagttcccacagtggttcactactgatgtccgaaggcttctgtccaggctgcttgatccaaatccaaacattaggatcaccgttgagaagctagttgagcatccatggttcaagaaggggtacaaaccagcagtgatgctatcacagccaaatgaatcaaacaacctcaaggatgtccatactgctttcagtgctgatcacaaggacaatgaaggcaaggcaaaagaaccagcaagctctttgaagccagtgagcttgaatgcatttgacatcatctccctctccaaaggatttgatctgtcaggcctgtttgagaacgacaaagagcagaaggcagactcacggttcatgacacaaaaaccagcatcagcaatagtgtcaaagctagagcagattgctgagacagagagcttcaaggtgaagaagcaggatggactggtgaagctccagggatccaaagaagggaggaaagggcagctcgcgatcgatgcagagatctttgaagtgacaccatccttctttgttgttgaggtgaagaagtctgcaggggacacgttggagtacgaaaaattctgtaacaagggcctaagaccttctctcagggacatctgctgggatggtcagtcagagcatccatcactggcacagtcatcaactctgactcagtcctctaagtcaatctcgagacatgccatttaagtgcaacctcataagagatgcagtaacaatccattttcctctctccttttccctttcatcaaagtgctgagcctgagagtattctcacttgagcatcaggcttagggctctttgatgataatttttgccagttttccttgtatagtagcagtttgtctacatggatctcctgttctttcaccaatagaaacagggagattgacaacagc

SEQ ID NO: 15056 - DNA, 2453 bp, Oryza sativa
  ref <308>: DATABASE ACCESSION NUMBER: AK065590
  ref <309>: DATABASE ENTRY DATE: 2001-12-06
ggcaaaaccacccattctccttgaatcttgcctccaaaaactcttgccacttagcattcacaatgctcaccacatcatcacatagcaggcaccaccatgcatttgagaggagccccaaccacagcatgatgaagaacatagcagacaggaacaagcatgatcttcttcagagtgccatgaaccatgcagcaagcaagtacatgcagaggatctaccctctggggatccagaggagcagctccaacctcacactctcatcactctccctgtcacagaactccaatgattcttcactcagcagctcaaactctagctgggagcccaaggtgcccctgctgtatggtggcacatttagcccctggggtgatgtgcttgtgtccctggagaggaggagggaagaagatgatgacaaggttagtgatcatgatgttgaggggggagaagaggattttgattgcagtgagcctgggagcttgcataggtgcagctggatcaccaagaacagtggtaagaaatggttattactactacttgctatatgtttttctttcttctgtgctaattttcatgcagtcatgcagatatgttttttggttttgtatttcatttggtggacagattctgatgaacaatcatctcagcctacttaacaacagtaggcagttaaaaagaatatgtacttgtcacctaaggcaagcatcagtttattgttaggaaaagtgaaggatgtcggataagtgaacatgcaagataaaaaaaacaaattagttaattagtgttggaccaacttatgagtgcaattagtaattaagtatgattcttcttttaaaaaaaagtaggtaacattaccctcagcagaacacaagtttgggactttggatatagcaaaagtcgacatcgacatcactggctgatgaagctctgattttgactaagtttcagtcatcacttgatgatgccttcacgaaaaatattcagttgacaatttcatcagaaagggacttctctccatattcttgtagtagcttttctttttggcacctgcttgcagtttgttgagcaaacataaatccaaaaggggagaaaagaagtacaagagctgaaaactgatcactaactgaaagtctgaaacccgtcaattgtgcagatgaggcgtacgttcagtttcacgacgagtgctggggtgtcccagtgtacaacgacaaccgtctgttcgagctgcttgcgttgtcaggcatgctcatcgaccacaactggactgagatactcaagagaagagacatgtacagggaagcgttcgcggacttcgatcccagcacggtggcgaagatggacgagaacgacgtcgcggagatcagcggcaacaaggagctcaagctggccgagtgcagggtccggtgcatcatcgagaacgccaaatgcattcagaaggcgagtacagcatggccacgatgaatcgttcataaaacttgccaagttttacttcaaaacattaaagaaaatgttaaaacaaatatgacatatattaaacaagggagaacaaacactccatcaatctcgaagaatcaatttcctataaagacatttgtctagatttgtaactaaaaatatgtcttttgggatagaattaattttctatagcctgcaattgatcttcttggatagatggtgtatgtcacaagattttaaagtttttgaaaatggactctaaaaatattaagcatacgcggatgagtataggtggcgaaggagtttgggtcgttcagcggatacatatgggggcacgtgaaccaccggccgacggtggggaggtacaagcaccacaagtacatcccgttccggacgcccaagtcagaggcggtgagcaaggacctcgtccgccgcggcttccgcctcgttggccccgtcatcgtctactccttcatgcaggcctccggcatcgtcatcgaccacctcgtcgactgcttccgcttccctgaatgcctccacctcgccgaccgctcctggggcattaccaacgtcgctgcctaatgacaaaaaaaaaaaaaaaaaccttgaacttttctgccgctcgcgagctcgacagtgttgcaaatagcttagctgtgttcattgcatgttgcagcggccagcaaagctgctacactatactaaaatattgggcgaggcgggtgcaccgtagatgcagtagtgcagttgaacaagccgaagacttttggtgtggcaaatcaaacctcaaattcaaattcccccacttgaaaatttctttttgtttggtttttcactctggggattggcgatgcttggatgtattgtgtagtagggtagggctaagttttttttttttggttgctcactcccacttggaaagtggtgtagtgagttgttagtggatggtttgtaagaataagttaagatttccttctgtttgggcttaactggggtgttgcatg

SEQ ID NO: 15057 - DNA, 1665 bp, Oryza sativa
  ref <308>: DATABASE ACCESSION NUMBER: AK065591
  ref <309>: DATABASE ENTRY DATE: 2001-12-06
ggccgatccatggccgccgccgccgccgccaccttcctcccccacacgcccaccccgcgccgccgcctcgccgtcgctgtccactcaccgacccgccgccgtctctccctcgtgttctccggccctcccgacggcgccctgtcggtggcggcggcggaggagaaggccgacgccggtgaggaggcggcggcggcggtgtcggccccgcggggcagcggaggaggaggagggaaggagcggcgccgcgtggtgcggaaagcgtgggagaagctcgtccggtggtcccggtcctggcggcggcgcaaccggagcgacgtggtcgagacgacgcgcaaggtggtggtgctcggagggggctcgttcgggacggccatggcggcgcaggtggcggccaagaaggccgacctcgaggtctccatgctgctccgggacgacctcgtctgccgatccatcaaccacagccacatcaactgtaaatatttacgagaccacaggttaccagaaaatatcactgcaacaactagtgctagtgatgctttagcaggagcagatttctgcttccatgctgtcccagttcagttcatcatttctcgagggtatttcaacacatgttgatccgaagttgccgttcatatcgcttagcaaagggcttgaacttaacacccttcggacaatgtctcaaatcatccctcaagcgctggggaatccccgccaaccgtttattgttctgtcaggaccttcttttgcaatcgaactgatgaacaaattgccaacagctatggtggtggcatccaaggacaaaaagttggcagctgctgttcagcagctgttggcctcaccgaatttgaggataagcacatcaaatgatgttacaggtgtagaaattgctggcgcacttaagaatgttcttgcaatagcagcaggtatagtagaaggcatgcatcttggaaataactgtatggcggcccttgttgctcaaggctgttcagaaatacgctggttagcaacaaagatgggagcaaagccaacaaccctttctggtttatctggctcaggtgacatcatgcttacatgttttgtcaatctttcacgaaatagaaatgtgggactgcgtcttggttctggtgaaaaacttgacgaaatcatgaattctatgaatcaggttgctgaaggtgtatcaactgctggggctgtcatcgcattggctcagaagtaccatgtaaaaatgccagtcttgacagcagtcgcacggataattgacaatgaactaaccccaaagaaggctgttatggagttaatgaatcttccacaggttgaggaagtataacagcaatctaatggaatgatttaactgactctgccggccgcctgctgcactcaaattaaactaataatatgctccaaaatgggcttctccgtgtttgattatctacatattcagaagatgttctcttctctctcttaatccacttgagctttcagatatgaaaatgttatttttacacgagaaaacgaaggcgtgtgtacgctcgtatgcacagatagagagaggatatagtttatagcaccagaaagaaataggacaaggtcgttgtccgaaagaagaccacagttttgtttctgatctttttagaatcatttgatctataaatatgattctttctc

SEQ ID NO: 15058 - DNA, 1973 bp, Oryza sativa
  ref <308>: DATABASE ACCESSION NUMBER: AK065592
  ref <309>: DATABASE ENTRY DATE: 2001-12-06
gagtagtctccgtcttcgtcctcttccttcttgtttaataatccctgcattaactgatcaacacaaccgagatgtttgacaaagagagaagaatacaagggaatgcagtgaaccaagagttttacccattcctcctgtatccagtttagtcgttgcagaaaaatctcccccttttttttttctttatctgaagatttgctcctggttcttcaactactaccaagaatcgagctcctgttgcttcctctagcctctgtctagtctgaagcctgaacccttgcatgctccagtttctgcactgtgtgagcagaattatttctgaagtctgaacagcagccaagcaaaaggtgaatttggctgatgattctgcccctgtgttctgatttattcaagacactagcaactgaatcatcaggtgttggtcgcgaatatcccagtgatggattcatcgagttctttcgtgctcgtggtgctgattctccaagctgtcgtgatcggttgctcctcactggacgagctacccgttcagcttagcaaccggaggctacttcatgacagaaatcacgctgctctactctacaaagatcatttcccaacagttggaaacatgacgtttccaacatctcatcaactgcaaaatgatccaaattacaagcctctagatagttcatcccaccctgccgaggcttctgcaaataaaggatcaagcaaaggattcaagaagtggctgtatatagttgtgattccagtggctggtttgattatgcttgctggcatggcatggatgttcttgccatgccgcaagaaatccgttgcgactattggcccttggaggactggactcagtggccagctgcagaaggcatttgtgtcaggagtgccccaattacagcgtccagaactggagcgtgcttgtgagggcttcagtaatattgtggcaagtcatccatactacactgtctacaagggaaccttatcatccggtgttgagatcgccgttgtatcgacaacgattaaatccagcaaagattggtcaaagcactgtgaagattgtttcaggaaaaagatagagtcgctctcacgaataaatcataagaatttcatcaatctgctggggttttgtgaggaggaagaacctttcacgagggtgatggtgttcgaatacgcaccaaatgggacgctttatgagaatctccatgatgaggcctttgatcacatcgactggagaagtagaatgagaataatcatgggaatagcttactgtattcagcacatgcatgagctcaaccctgccaacgtgcaccctgatctgcattcaagtgcagtatttctttctgaagattgtgctgcaaagattgcagacttgagtgtttggcaggaagtggtttccgacggcaaaaagtcgacagcgaataatgatcatcatgaaccaatatctgctagactggcagggaacgtttacagttttggcatactgcttcttgaaatcatctcagggaaacccccttactctgaaaacgagggctccctggcgaatctggctttggggtgcattatcaaaggtcggagtatagcctccatgcttgattcagtactagagtcacacaaagaaaatgagctagatgtgatctgtcagataatcatggaatgcatccagagtgacccaacgaagagaccaggcatgagggagatcaccacaaggctgagagagaccatagccatttcgccggatgcagcaacgcccagattgtctccgctctggtgggctgaagtggaggtcctctcaccagtggagccaaggtagaaacaatgataaatgtgcttctgaaaaaccaacatcctgcaggatgacgatcttgctgtgcatactgctgttcgtgcaacctttaccttgtgcaactccctgcccatgtttgatactgcccttgtgcaactctgctgcaaatgtcaaagatgagtactttctgtgtgtc

SEQ ID NO: 15059 - DNA, 1457 bp, Oryza sativa
  ref <308>: DATABASE ACCESSION NUMBER: AK065593
  ref <309>: DATABASE ENTRY DATE: 2001-12-06
caggccgcgactttctctctcctcctcctcaccgtcgtccggcggcgccgcctctcctctccgcccctcccgtccaatggaggctctcgccggcaccgccgccgcctccctgccggccttgccttcccaccagccgcggtcccgcctggccccgcggtcactcgcccttcccggcggccgctcgtgctgcgggcccctccgcgccgccgcagccggtggcggaggcggcgccaaggacgacgcgcaggctggcgtcacgcccaacgggtctcccgttatcaagccgaagagtgactcggctctttcgagtcagaatggagttcttggatcaaccaaaactgacaagccacacacgaccttatcaacgcatactaccactgactcgagtggatccagagctggcttgtttagaacacctatatctggtggtgtgcagagtgcgacttttgcccatggtctacctccgccggcattggctgttcgcaacttgatggaacaggcgcggtttgctcatctgtgcactgtcatgtctggcatgcatcatcggcgtactggatacccatttggttcgcttgttgatttttctaatgactcgatgggccatccaatattttcactatcaccgttagcaatacacacaaggaacttgctctctgacccaagatgcacacttgttgtccaggtacctggatggagtggactgtcaaatgcacgtgtcacaatatttggtgatgtatatcctttgccagaagatcaacaggagtgggcacataagcagtatgttgcaaaacatcaacaatgggcatctcaacagtggggaaatttttactattacaggatgcagaacataagcgacatatacttcattggaggctttggcactgttgcatgggtagatgtcaaggagtatgaagctattcaacccgacaagatagcagttgatggtggtgaacaaagcttaaaggagctgaatgcaattttctcgaagccacttagagagttcttgtcatcagaaggggaggttgatgatgctgcacttatatcagtagacagcaaagggatagatataagggttcgccagggtgcacagttcaacattcagaggctggcatttgatgtacctcacaaggtggagacactagaggaagccaagagagcactccacaagataatcaagacaaccagcaaataaagtcttcaaaagaaaagtgagattgcaaatgctggcaatttccactctcctgcaactgttttgtgacccgataaaaagtattttaagcatcatgtaatgtagcaataagtgatgtttatcagtttaataatgacttacttgagaattaacatcctgtggttagaattctaggtgtttgcaagaatgtgtatgctctcatgctgctagagcagcaatggccttgaggcttttttgtggaagctagatgctttgtatcggtggacct

SEQ ID NO: 15060 - DNA, 3358 bp, Oryza sativa
  ref <308>: DATABASE ACCESSION NUMBER: AK065594
  ref <309>: DATABASE ENTRY DATE: 2001-12-06
gggcttaccaagaagctggtctgctggtgatggcacctgaattatcattagtgtatgttcattcatctgtgctcaggtacatattatgctttgccttgaagcgcagaagtaggtaaaaaaaatcctagtttttttttttgaacggaaaaaatatcctagttagagcgataggctgattgtcagggcatacactacttggttcttgactcttttttttttctttgatgaatcctagttttgcttttatttttaagccaaaatttcacatctgtaacggctccatgttctaagctgcaacagatgggtctccacatttgtaactgtgggttgtaacgactgctctaaccattatagatgtagggttctgtgctagtgttcacttgcaatacaattgcaattgcattcctgaaatcatattttctttttagagaatgaaatgaaattcatttcagcttttgttttaaggaaactacaaccaattattgaagaggttgcaggttgaaggactccgaattcccgtaatcagctaaaattcaaaaaatatgggcatccaaatcagtcataggattatttgaaccaggtgggtaattggaatgttcctttattgttcttctatcctcatgctttttcccgaatgtggactaggcagaataacacagtatctaacctaaccgatttgatactgatctactgtccatggagaaggaatgtaaggcataggtgcacttacttttgatggttctgaattttcgtccagtccaggcataagtactatttttgctggtcatagttggtcaatacctggaataggtttggaaatttcaggttttcaaataataattagattatcaagtagctttgcagacgatttccggtcatataaacaacttgttaaattttatttatcagttaaaaaacaaatatgggtttgaattcacgaaagcaatacaaacttctcacccattcccaaacggtcagattaggttgtccaacaaactctaattctgtccactgatttttttttcagtttatgtctcagtctaatgttttatcagcagctgacatccttgatgtaatcctctctatttgaaacagagttgcacctccacttcctattttctaaatgaaaaatctttctatgattggtcaagtgctgttgctatttctctgctgataaacatcagtgatgaatcttgatactgactcttatttatttttttcaagaaacatccagaaaataaatatatgtgccctgcttctcactgttccattatcatcctagaataatcataccctctctctttctccaaatgatggtcactttgataaaaaaaacaggccccatatttaacacatgcttaacctatagcaacctgattgatttacaagttttttttcggtcaatttgtacgaaatacacgttaccaaggagcatatcctgttacaatcatctgactctctgtgattgaaaccttgtctctgaaatgcttgagggcacagcaataagtattgaacaaatgtgtgattcatggatacatacggtgtactgaaagtgacaccaagcaagaattagtatcatgggctccaaagacacctgtgctcattctgttggttctctacacatgttttagaataaataaataaaattaggccatatttgcactgaaatgtctgccatagggaggtgatgccaagatgtccatttcattcagacaggagtgctagatgatttcccaagtagcccctaccacattttattgccctctttattaagccctctagctagctataacaccttacacacaccaagattaattatctatccacagggacagagaagaagaagaagaagaagaagactatcatcttgagcttattcttccatttgctccatcttgaaatcatcagtaaccatggctaggaagtgctctagctgtgggaacaatggccacaactccaggacttgcagtggccaaagagttcttgatcacagcatcagcagcagcaacagtggtagtactactgctgctgctgctactgcctgtggtggcttgaggttgtttggggtgcagctgcaggtaggaggaggctcatctcctctgaagaagtgcctcagcatggagtgcttggcatcaccagcatactatggagcttctgcctcgccgtcggtttcgtcgtcgtcatcttcgcttgtttcgattgaggagaacactgagagggtctccaatgggtacctctctgatgggctcatgggaagggttcaggagaggaagaaaggagttccatggactgaggaagaacaccagatgttcctcgccggccttgacaagctcggaaaaggcgactggcggggcatttctcggcacttcgtcactacccggactccaacgcaggtcgccagccatgcccagaagtacttcctgaggcagaacagtatgacacagaagaagaggaggtccagcctctttgatgtggttgaaggtatcaagagggcagcagcaatgcccatttcaggatctgcatctgaactgcagatccccggcatgtcgatcggtgtcggcgtggtgaaggaggaggttgtcctgcctccatgtctgaacctgatgagtaacagttcatcagcatcacagcactcaccttccctgacattgctggcaaatcctcaggtgcagctccagatgcctgacctggagctaaagatgtccacatcccggttatctgaccaatccggtccgtcgccgagcacgcctttcttcgggaccatcagagttacctgatcttcatcttcagtgctcctcataaaagtggaggagttcagaaaagggtgttttggagatcatgtacctcaatcagaaagttaggtgttactgtaatgttagaatgacaatcagtgatcagcccatgcacaaaataagataagaaaagcaaagaagaaatggtttttatcatatcataccatacttttgcaatcaccttatagctttatgttgacacaaaggcatggcaagggtggttgctggtttggattttcagagcctggagaaggtgaaagatgagctcacaatattcagtttgcagtgggcaatgacaaggacaggcaaaaacctcagctaccaaaaatttcttctttccttttattcactgcatacacacacatgatcatctccttgtacagcacatgaggttaattagctatgcatgcatgcatggaaccaattacaaaaatgtctaaattaattggtttttctagtacaagttaatttcttttctctttttctgaaagtgaggttcttgtacaggttgtgatcgatgtttacctgtcgtttggtgtgctgccaataaagatctattaatcatt

SEQ ID NO: 15061 - DNA, 1397 bp, Oryza sativa
  ref <308>: DATABASE ACCESSION NUMBER: AK065595
  ref <309>: DATABASE ENTRY DATE: 2001-12-06
gaatcatgcgccgccgccgtcatactcatatcatatcttcttcttcttctccaaaaaaatactagtgtaatgtgtgatttgtgagagatgatggagctgtgtaggattcgaaccttccagaagagcctactgaggcccctcctcctcctccagcatgccccttgtagaaccctccaaaccctagggcggtccccttcgccctcggtgttccggccccccccgccgccgccccccgctcctcctcctcctcctccgctcctccttcgcctccgtctctccgggtccggcccccgggagcgggacaggcgaatgccccccgcccccgcccgcgcccttgccgcccgacgagctcgcctccgacgacgacgcctactaccacgagcacattctcgaggccacgcaggaggaccaaagtcgcctcgttccagtcaaggcctacttcccctgcaccagcatcaacctcaagagcctccagtcccagaattccttcaatgtcatcccccccacttcgcgtgctaccaactacgtcgtcctcaggtactacgatgtcaagggagacccagagggttttaaggctggcatcatagatgaaagtcattgccactatatggtggtgttccaatatgggtccattgtgctgtttaatgtttctgatcatgaagcggatggatacctgaaaattgttgagaagcatgcatcaggcttacttccagagatgagaaaagatgattatgctgttgttgagaagcctaccttggaggcatggatgcagggtggacttgacttcatcatactcagggacctaagtatcgatgggattcgtacaattggaagtgtccttggtcagagtattgcccttgactattatatccggcaagtagatggaatggtagctgagttcacggatataaatcgtggaatggaaaagactggtaccttcactatggaaaggaaaaagcttttccagttggtaggaaaggctaactctaacctggcagatgttattctcaagcttgggctttttgaaaggtcagacattgcttggaagaacgcaaactatgctcagatttgggaataccttcgagatgaatatgagttaacccaaagattttggaaccttgattttaagttgaaatttgttgagcacaacattcgttttcttcaagagatccttcagaacaggaagtctgattttctggaatggcttatcataattttgattagtgtggagatcctgatatctgtttacaacattgttcaggagcaaatgtagctgactattgtgggaatccttgctggggctgaaacctcgtcagaaccactgtggcacgaaccacgaatgacacgttctgtcttgtggatttttcaatggatcaagtaagagccttgtatatgcc

SEQ ID NO: 15062 - DNA, 3472 bp, Oryza sativa
  ref <308>: DATABASE ACCESSION NUMBER: AK065596
  ref <309>: DATABASE ENTRY DATE: 2001-12-06
ggtgcggggggggcaaagaagaggaatttaattataagaggaagagggagaagaagagcttaggtacaggctccagtacaagagatcgatcgagagacagaggatcggagaggaggaagaaggagaatccaagtactgggaggcaattaatttgagttgagatcgacttgagagctagcagaggctcatctcatctaggccagcagaggctcttcgctcgcttatttcatccatggcttccaaaggcacagaaggaggccatggtggcgtggagagaaaggagcagcagcagcagaggggttaccagctgccccgtgactcccggggatcacttgaggtgttcaacccctcatccgcttcctccttccgcactgctgctgccgcccccaagtccgcctcccccttccttgctattcccgacagggaagaggataatgtggtggcacagcagcgggcagcagagtggggcctcgtcctccagaccgaccaccacacaggcctcccccagggcgtctccgcacgaccctcctctggctctgcacgcaccagctctgaggacaacccacagcaacagcagagcgccgccgccatcccacgggtgtcggaggagctacgggcggcactatcagcgttccaacagacgtttgtggtgtctgatgccacccaccccaaccaccccatcatgtacgccagcgctggcttcttcaacatgaccggctatacctccaaggaggttgtcggcaggaactgccgcttccttcaaggctctggcaccgacccccatgagattgacaagatcaggcaatccctcgcaaatggctccaactattgtggccgcatcctcaactacaagaaggacggcacgccattctggaacctcttaaccattgcccctatcaaggatgaggacggcaggctcctcaagttcatcgggatgcaagtggaagttagtaaatacactgaagggaaaaaggatactgttgttcgtccaaatggactttcagaatcactcatcaaatacgatgctcgacagaaggatcacgcccgtagctcagtgtctgagctcttgttggctctcaaaaatccacgctcattgtcagaatcaagcaataacaccttaaaaagaaaatcacaagaatccctaagcatgtcaatgaccgaagttcctagtaagagaagctctgaaagtggatctcgccgaaattctcgtagcggaacaaggagctcgcttcagaagatcaatgaagtacctgatcaagggaatagaactagaaaatctggtctgcgtgcatttatgggttttcttggtatgggccatggaagtgtagagaagaacatgctgaaacctagagatgaagatccactgatcgatagtgatgatgaaagacctgagagctttgaagatgagtttaggaggaaagaaatgaggaggggtatagacttggctactacacttgaacgtattgagaagaattttgtcatcacagatccaaggttgcctgataatcccattatatttgcatccgatagctttctgcaattgacagaatacaaccgtgaagaaatattagggagaaactgcaggtttcttcaaggccctgaaactgatcgtgcaacagttaggaagataagagatgccatagataaccaggcagaggtcacagttcagctcataaattatacaaaaagtggtaaaaagttttggaacctctttcacttgcaaccaatgcgtgatcaaaagggtgatgttcagtactttattggggttcaattggatggaactgagcatgttcaggatgatgctgcaaaagagggagtcgtgctggttaagaaaaccgcagataatatcgatgaggctgcaaaggaactcccggatgctaatttgagaccggaagatctatgggctaaccactcaaaagtagtcctgccaaatccacatatgaaggatactgcatcatggagagccatccaaaaggttctcgagagtggtgaaagtattggtttaaaacattttaggccagtaaaaccattaggatctggtgacactggaaggtaatcatttcatggtttggttaaattggataaacattgaattgttgccttttattgctaatacatttgactcattttacaattgttgtttcaacaatgtgtattatgattggaattgaagtgtacacttggtagagttgttgaatacaggagaatactttgccatgaaagctatggataaaagcatcatgcttaaccgcaataaggttcacagagctactgctgaacgccaaatccttgatctattagatcacccattccttccaacattatatgcatcatttcagacaaaaacgcatatatgcctcattactgactactgcccgggtggtgagctctttgtgcttctagataatcaacctctgaaggttctacatgaagatgcagtcaggttctatgctgccgaagtggttgttgcactagaatacctacattgccaaggtataatataccgagacttaaaaccagagaatatcttacttcatagagatgggcacatctcccttacagacttcgatttgtcttgtctaacatcttgcagaccgcaggtctttcttcccgaagatgctgatgagaaaaaagggagaaaaaacgggagttaccccatattttttgctgaacctatgcgagcatccaattcatttgttggcacggaggagtacattgcgcctgagattattacaggagctggccatacaagcgctgttgattggtgggctctagggattcttctatatgaaatgttgtatggttatacaccttttagaggaaaaacgaggcaacggacatttgctaatatcttgcacaaggatatcagatttcctgctagtatatcggtcagcctagcggcgaggcagctaatgtataggttgctacatagggatcctgccaacaggctagggtcctacgagggagccaatgagataaaaggacatccctttttccgtggtataaattggcctcttatacgcgccacggcgcctccaaagttggagatcccactattttccaaggatgacatggagaagaagggactagtaacaaataaccgcacggatatgttctgaagaccctgatgatgatcttcaataaaagagagggacatatattgttgcttgctttgcgtgcgtaggccaagattaagattatgtcatgtaaatatgtaatgtatcgtacagaccttgttgtgtttgaacctagtatgcgatccatcatcttaataagatgcaatgcagcgcaatgtgtgccagtgaacagtaatgagcttgacttgagtttatagtagtctagtatagtgagtagaggaaaaaaagagtaaattgtattgacggtacgtaaacttgtcaagtgggtgcaatttagtatacgaacttgtaaaacactcatttggatgtatgaatttgtttgatgtgtgtgaacc

SEQ ID NO: 15063 - DNA, 2879 bp, Oryza sativa
  ref <308>: DATABASE ACCESSION NUMBER: AK065597
  ref <309>: DATABASE ENTRY DATE: 2001-12-06
gaccgtttccttctctccgctgctgcagccgcgctggttccgcgctcctgttcttcttggcttctcgccatggggaggaaagagggtcggaggagagagattgacagggatctgcgggtttcttgcgtcggttccggggcttgatgcgtgagaggagcttctgaagtcgcaggaaaaaatgaatgtcttgtgtgaagtgtgtggagatgttggttgggaagaacttatcttgcactgcaacaaatgcaagaatgcaactaggcaccaatactgttttgatccagttatttatgatggatcattagtagagtggttatgtgatgattgcctaccaaatggcaatgaagtgggcaacttattagatatatctaatcaaaagaaatcaagtcaaactgaacttggtttctctataactaaggaaacaaatgtgaagaagatgaaactaacaaagggattatggtcatggggacatcatcgaaatagatcattcaaggcaagatgtgatggtagtgattcaaagactaagcatttcgcaagtggaaatgcatttagttcttccgaagtggtcaccggggaaatatccaaaataaatgattgtgagatggaagggagaggtaaagatgaatattcaagccattcagctttggaccatgcttcaagagttgaacaacacatcaatatacaaaatccaatgggcattataaaacctagtttgaactctattaagagattaaacctctcgaatgaaaaggatgaccgcttttcttcatccgaccatgttgagggatccattccccaagttaatcatgttgagcgagcccatctaatgattgaggatggttctaatcctacatttacatgtgtggaacatatggatttggtgcacaaaaagcaattattgcaaccttcctctctagaaagaaattctataggcacatcaataccatgttcggagaatatggatgtgttgcacaagatgcaactcttgaaaccttcccctctagacaaaaaatatgtggacagatccataccgaactcagaaaatatggatgtggtgctgatgagaaggagctgtacattgaataattcaatgggcagttgtgaaaaacaagtcgtaaccaaggtggatccgatcgagccatcaaggcaatttgatcgggcttgcttggaggtctcttcaaatgcacatgagatacatgaggctgatgacggttctaaaggcgctcaaagtatcaagaatggcaagccgaagaaacaaagacgacttattttaccatatgaggaagataaagatgccgagcccatccaagtagatgacatgaatcgccaatcttgtgggattaatggacaagtgaagaagcctgtggaaattgttgcatctcttggggatataaatgctggatgcggtcagaatgtttgttcacagttagcattaccaactatagctgtcaagggccaatgtggcctatccagtacaccattcatacccagatatttttgtgtgcaacccattgatgaacctaattggactggaatcatgaagataggtacaaactacattccagtgggtgcacacttctcaaacaaagcatgcaagaaggtgtgtgaactatctatgtcgttgccacaaataatgaaagtgacagagctccctaagttgaaagcctggcctaagagttgggggaaggcatcagtacctagtgctgagagtattggcttatttttcttttcacagaatacgaggtcaaataaagaatttgatgacctagtgaagcatgtcattgattatgatattgttctagaaactgatgttagttttgccaagctgctagtcttcccttctgttgtacttccagctgaatatcgggtattccaaggaaaacactatttgtggggagtgttcaaacgcagtaaagatatggctgaaagagatgccttagtggaacagaattgtacgacatgtctggcagatgaagatgtcccagaacagaatgccttagatattgtgccatgtaaagccctggatcaagaaatggcgcttgttgtgagcgatatacatcatgataatcaaccatcgctaaccacaagccaagtggtagaaagcgaggcttcatctgacaaaggcccatcccatcctgtgattaactcccctgaaagacccatgtacctgattttggatacaagttgcaaggtcctaaagaaatggagctgcgaaaggatggatacgaagttatcgatgctttagttaccctccaaaaagaaaaaaaatccatcctacatgcagtcctccctgttccattttagaagattcagcatccgagccgtttgccttcatcattccacagacagcatcgatccaaggagcttattcaagagactgaaaatgaagatggactgttgttttttgcacactgggttggcgaaaccttggcctaggaggcactgataatggtgtaggacaagaacttggtcatgatgatcgatcgtgtcgtggttactgtttctagttatggtgcagcacattgacccctctcctggggtaaaagcgcaagctatgaagtggtcctaaaactttttaccatggagcgagttcattgcgcctttggtggctatgtgctgttttacatgaatctctagttaaacctcctttttttgatgaccgagctgtggactgtagttgtccctggctgttcaggatgtatcatcctactcaatcagagttgaattgcccccaaagtttcactgcactctctggtgattgtcatcagtaaaacttgcagcatgaatttgtacatgattcttaagcaacctcacctagaactgtcatgcatgaagtgccatcactactctgcaagtctatttgaaaaaaagttggttcc

SEQ ID NO: 15064 - DNA, 3108 bp, Oryza sativa
  ref <308>: DATABASE ACCESSION NUMBER: AK065598
  ref <309>: DATABASE ENTRY DATE: 2001-12-06
gttacgtgctcactgctctcctccaatcactcaaacacacatagtaagcctgtgcaccccatgaaatcatgaatcccaccggcaagccgttgctcctcctcctcctgggccttctcctgctagcaaccaccactttgtcccgagcaatccatgcgataccgtaccgaaactcggctctggtgccaccaccgtcgcttgcgtgccacgggaacgggacgcccttctggccttcaagcgagacatcactagcgaccacttaggacttctcacctcgtggaggcaagatgaccatgactgctaccggtggagaggcataacctgtagcaacctcaccggccatgtcctcaagcttcacctcagtggcatatacactaatgagcatacaggtatggaaggtttggtcggccagataagtccccagctgctctacctggatcatttagaacatcttgatctcagcattaactatttggaggggccaagcggtcaaatcccagagttcataggctctatgaagagcttgagatatctaaagctctctggcattccgttctctggtacggtgccttctcaacttggcaatctttcaaagttgcaacatctcgacctttccgacctggagggaaaggaaggtatgcacttagcggatatgtcatgggtatctcgtctaggatcattacggtaccttgatttatcctttataaatctcagcgcggcttctgattgggctcatgccgtgaacatgatcccttccattagagtactttgtttatctttatgccaacttcaaggtgcgaaccattcactcgcacactacaaccttacaaaactcgagaagcttgatctgtcctcgaactattttgaccacccgtatgcatcttgttggttctggaactcaacaatcctcaaataccttgatatttcatcgaacaatttgtatgatcagcttccaaatgcgataggacacatggcatccctcagagtcattaatttttctgataacgctcacatgggcattgtggaaccagagttgatgacgaacctatgtagtttggagaatctaaacctccaagggagcctctcctatgggaacatgacagttgctcgatagtctgtcaaattgctccaacaaattaagtgagctgaatttagcagacaataatatcagtggaactctgccacctgggatattccaacaatttgcagacttagtcactcttgacgctagcaacaatcagctcgctgggcctctgcccgttgagattggtatgctcacaggtttaaatcacctggacctgagttacaataacctggcaggtgacatcaccgaagaacactttgctaacctaaggagcttaaaatacatagacttatcgtctaatgatcccttgaatattgtggtagaccctacatggatagccccatttagattagaacgtgcatcttttccagcttgcatgatgggtcctcaatttcctacttggctccagtggtcggtggatatttggttattagaaatctcaaatactggtataaaggataagcttcctgattggttctggaccacattttcaaagctcgaagaattggacatgtctaacaaccaaataagtggtgtcttgccaacaaatatggaaaccatggcattgagttatctctatcttggttcaaaccaaataagtgagtggtcaattacctcctttaccgagaaaaattgtaaaattggacgtctccaataactctctgtctgggtctctgccatctaactttggagctcaaaatcaacaaatggttacgctgattctttccttcaacaacctatctggccatattccggaatccttttgcagaatggaacagttggccgccttggacttagcaaacaatctttttgagggagaattgcctcaatgtttcgggatgacaggtatggcaatcgttcttttacaaaacaatagattctctggctcgttcccagttttcctagaacgctccacaaagctacaactcgtagatctatcaaggaacaatttctccggcaaattaccaacgtggattggtgacaagaaggaattagtgcttttgctactaagccacaatgttttctctgggattattccgatcaatatcacaaatctttcaaatcttcgtcaattgaacctggcaggcaatagtctatcaggtaacataccttggcgtttgtcaaatttagaggcaatgaaggaagacaactacatttttaaccttgacatacctgatgatagcagttataataatttatccgtattcacaaagcggacagaacttttttatggtccaaatattttcagcgcggtgaacattgacttgtcatcaaactatttagttggtcaaattccagaggaaatagcttctcttgcacttctaaaaaatctgaatttgtcaaggaattacctgagtggaaaaatcccacaaaaaattgggtcgttatggtcactggaatcactagatctctcaaggaacaagctttcgggggagatccctcctagcctgtcaaatttatcatatttgagtgatttggatttatcacacaacaatctatcgggaagaataccatcgggatcacagcttgacaccctctattttgaacatcctgatatgtatagcagtaacgatggtcttttcggatttcctcttcaaagaaattactcggaaggaattgcaccaaagcagggctatcacgatcatagtaaaacccgacatgtagctgagccaatgttcttttaccttgggcttgtgtcaggatttgttgttggcctatgggtggtgttttgcaccatactcttcaagaagacatggaggattgcctatttctctctttttgacaaggcgtgtgacaaaatatacgtgtttactgttgttacttgggcaagagtatctcaaaagacgaatgtacaataagctaattggaaaatttgattagaacgacgtgcgtatgttggtgctgggtcacactaaaagcatctaatactctaatgtggtgtggtgtggcacagtgatgcttgtttatttaattagttctgtgtgttgtatcttaatagggattatacgatattatccttactttcc

SEQ ID NO: 15065 - DNA, 1374 bp, Oryza sativa
  ref <308>: DATABASE ACCESSION NUMBER: AK065599
  ref <309>: DATABASE ENTRY DATE: 2001-12-06
gatagttaggaccttcactgctgacaagtgaaatgagtcatgggtgctgaggagagatttgtgaaagcttcgtcccatactgtgcccttgcaaatatatggaggttccaagtgttcatgacctgtaaccgaaggggagggaaaatgcaaggcaagcagctggaacatgagttgcaagctttcagggatggctactgatttatttggccttcatagaatcctctcttcattgttggagatagagggaacaagaaccactagagagataaaaagtaaagattctattcagaaactagccaaagtattgctgaaagctaattggcaaaaggatttacaccacatcttggtagagccaatggagaaatccaaacaagacagcagggaatcagttcggagaacaatcatggagcatgatgaagtcttcagacagcaggtgcatgaactgcatcgactatatcgtgtacaaaaatcattgatggctgaactaggaggtgagaagcacaggtttcaatcaaggacaggagaaactcaagaaatgatgcaagggcccctgtcaaacctcaagaatagcccctctacatcagagacaacccaatctgctcatcttggtagcacacaacactgtgctccagagcaagttcctgagcattcaattcttcaagaatacaaaccagcaacatgcctaaacttcttcactgaagaaacctcaagaacacaagaatttagacgagaaggtggtagatcaactggaggtgaaaattggagtgcttctgacccttccgtagagaatgatcttgacctcaaactaacaattggccccagtttgcatgcaacaaaagcaccacactggctcttctcaggaagcagggaaagaaatccttctggtcagcatcgatgacaaaaagctggcattgtagaacagttagttggatgacaaaaaaagagaggaagcagaagcctcctagtcctagcaatggaaggcaacacttccaagatatatcatcaatgcaacctagcctccaaattttgatcagagttaagcctcgatcatgagtgatctgtgtgcaaaccatagagtgtagcagaactaggatttgctaggagcacattattgtaatgtcatgatgagctttaccaacgatttggctcttgtttgtcctctcttcaattcagacaggaagagaacaaacattactgaggaagtatcaaatttgaaaagagcaaaatagttcctgacttcagtcttcctgatgcagttgttatatcagtcgtcatatcggtcttccatgattggttatttcttatttacatttctttgtctgcatatccatgtactcaggtaattcttcaatatgaatatgactttttggcgacc

SEQ ID NO: 15066 - DNA, 2415 bp, Oryza sativa
  ref <308>: DATABASE ACCESSION NUMBER: AK065600
  ref <309>: DATABASE ENTRY DATE: 2001-12-06
gtcttctcttcttccttcccttttttttttctcttcccctcctctcgtagcccacgacggatgcggttgcgggtagcaggggatggagggcagatgaaacccgcgagttcttgattcttgggagaatcaccccgtgctcctcctcgcattgatcgcgagaaaagttgttcttttcttggtttcttcgttctgtttgggattgtgggggtttggttcttggcgacgcgtcgccatgaggcggcatgggtggcagcttccctatcaccctctccaggtggtggccgtgtccgtgttcttggcgctggcgttcgcgttctacgtgttcttcgccccgttcgtcgggaagaaggtgttccaggacgtggccgtggggctctacacgcctctggtttcatttgtcttcttcatgtacatctggtgtgctgcaacagacccagctgacccaggtgtcttgaaatcaaagaagtacctaagattgtatggaagcggcaaacacaagcatccgaaggaattcagacatggcatttcagattcagggttgcaagtagagggaactggagaaaagcaagaacatgagtttgcagctgctagtgaaaagtcaacaactcgctacaaagacaataacccatcttgctgcagttcaacttcctctgtttttctcattattttctaccctctctatcttgttttttcctgctgccaaccacgggaatggtctgagcagcaagccagtgaggaaggaatgtttttctgcagcctctgtgaagttgaggtattgaagtacagtaagcactgcagagtttgtgacaaatgtgttgatggttttgatcatcactgcaggtggctcaacaattgcattggaaaaagaaactatatgaggttttttattctgatgacttcttccctattcttggtctacatgatttgtgcactttgggccagcttatcctacaatcagcagttggagtattggtgctagtgttctgctttgttgagcgaaaggaattctccattcaaattgtgtcaaagcttggaagcagcttctctgtggtgccttatgttattgtggtggcatcttgtaccattctagccatagttgctttgctgccaattgcgcaacttctcttttttcacattcttctaatcaagaagggaattagtacatatgactacatcatcgccataagagagcaagaacaagaagaggttggtgggcagcagagtccacagatgtctcgtgtaagctcctacactggacttagcagtacaagttcctttggtggacgacgtcgtggttcatggtgtactcctccaagattatttcttgaagatcagttcgatgttattccgtcagaggctggttcatcgcataattctacttccaagaggaaagaagatgaagtaaggaggaagaagggttcaggtggtataaaaattagcccatgggcactcgctcgtcttaacgcggaggaagtttcaagagttgctgcagaggcacgaaagaagtccaaagttctactgcccatcagaaaagatgagtatgcagttggccatgaaacggacagtagctatggaggcacaagcagcagtaggattgatctaggccctgataacaagaggagaacaagcagaagagcaagacctcacaatgatttctctcttaaacctgttgccaagatttccgcagatgctcttgatagtcatggcagtgagttggttcctgaaacattatccagtttagcaccattgcagcttgaggcgcgaagcgcttttcatccaagtagagctgcatcctctgctaatggtggtggttcatcaccagacagcagcttggactcccctgatcttcatctgtaccgagtctcggctgtctcctcatctgcagctgaagacctgcagctgacaactcttacagccccaggaagcactccacagcaagggattgagctgtcaagatccaccagcgacgggtatgaagcatcaggaggcgaagacagtgatcgcatcccatcgcggatagttcatcgatcttcgaactgggcaagcatcatcctcagttctgatcaaagtgtggcttcatctggcatcctcgtgccgaagaacaggttgtcttgactccaaatcaattccatcctcagcttctttcagatgaatgaaaaattgtaaatggtccgtgtagattgtctcgttttccatcggtttctggtcctccatagtttcaaatcttgtctcagagatggttggatgctgcgtgaattctgaattggttggatgtttttggtgaactctgaattgttaggtagggaaagagagttgattcattcgtggtgcatccaaaatggttgtaattttgctctcagatgacaatggaatcaatcagaggttgatatatcttcagcctcctgggttaatgcc

SEQ ID NO: 15067 - DNA, 2050 bp, Oryza sativa
  ref <308>: DATABASE ACCESSION NUMBER: AK065601
  ref <309>: DATABASE ENTRY DATE: 2001-12-06
gcttttcttttcccatgtccagattcttgtgtccattgtagatttttcctgaaatttcatctgttttctttttctcctgaaatgcaggtggacgagaagggggctttgcgaattgcaattttgcaatgcttcttgcttgtgattgtgacgacgatgcacaaaccgcagagaatggcaacgccccgatgctcagcaactaccgcgcccagcctgcgccaccgctcgccgagcccctcctcctcgacaagccacagcgcgcgcactggctcaggcagctcaaaccgtggcgccgcaatgccgccgacgaccacctctccgccggaatcgccatcaactggagctctgtgcgttcggcgaccaaggactggatcaccaaccccatgaacatcgccatgctcctctggcttctctgcgtcgccgtctccggcgccatgctcgtcctgctcctcctcggcctgctcgacggggcgttccccacgccggcggcgaggaaccactggatcgagatcaataaccaggttctcaacgcgctcttcacgctcatgagcctctaccagcaccccgtcctctgccaccacctcttcctgctctgccgctggcgccccgccgacgccgccgacctccgcgccgcctacttcaaggacggcgccggcccgcgccacggcgagcgcgcccacatggccgtcgtggtcgcgctgctccacctcaccgtcgcctgccagtacgtgctctgcggcctgtactgggggtacaccaagaagacgcggccggagctcgtggagaatgggttcttcgtgctcggcgtcgtcgcgccggtcgtcgccgtcgtgtacaccgtgtgcagcccgctcggaaaagacaactacggcgagctcgcgtgccccaacgccttcgactcggtgagccaacacaaatgcacgggacacgccgtggtcgagccggagtgggccggcggcatgttcgactgcggcggcgacgcgacggcgtggtggctctccctgtcgtgcaccttctgcgccttcgggtggaacatggagcggctcggattcggcagcatgttcgtgcacaccgccacgttcgtgcttctgtgcttcgcgccgctgtgggtgatgggcgtgtcggcgctccacatccacgacgtggtcatcggcgacatggtcggcggcgccggggccctgctctgcgtgtgcggcctgctctacggcggctactggaggatccagatgagagaacgcttcgggcttccggcgagcacggcgtgctgcggctcgccgtcggtgacggactacgcccggtggctcttctgctggccgtgtgcgctggcgcaggaggtgcgcacggagagcctctaccacatcgattgcgagacgttctacaagaagcttcctgttgtcgatgacgttgaagacgagaagaggctaccgttgctggcgtcacaccatgtccaattccatgaaccaccggacacgatgatcatggcagcatcagagggatcaaatgatcatgtggtgattgttcatgaggagatggttccaccggctgtacaggttgcggtggagcaagtcgtcgttgaaggtgataaatctgaagaagaatgcagtgcagttcatgatgagaagatcatgggttcgcctcttccggaatcggtggtgattgtggatgatgatgagataccggccagtttgtcggatggaagctggacggtggagaaggtgaagagactgataaatgttgtcactttggtttctttgctcattcttctctacaccaggggattcattcgttagtgaggcacagaaaatgcatacaaaaggctacagattcaatagctacttagctagatgactgaattctctcatctttctccatttctttttgttggttgtgatcgagaggaagttcattctttggagtttgggtgtacataggcatactgctggcataaagatgccacaggattttgaagggattgtatatttgtaatccgttcccagctgcaattgcaccttggaaatagtgaatctctaatgcaattatatctcattatttc

SEQ ID NO: 15068 - DNA, 1713 bp, Oryza sativa
  ref <308>: DATABASE ACCESSION NUMBER: AK065602
  ref <309>: DATABASE ENTRY DATE: 2001-12-06
gacacacccacctccatttccctcccatttctttccttctccgcagatattccccaagaatctcctcctcctcctcggattcccctctctctctcctcctacagagtagtagcttgtgcttgctttgctccgattctctctcttccctgtctctcctagctgcaatataccactagcagcagggcgcccagttgcgcgatcgatcgatcgagctccgtggtgccaagaacgccctgtacggcgcgccggtatgtgcgtggaggagtcggagggcgcggagaggctggattttggggagcccgccgccgccgccgccgacgccgggaagagcaagagcaagagccccgacgaactcccctcgcctcggatggaaagagtttgtgagaacactacagctgctgatttcaagcaaaataagtctggtaattttgtcccaaatattcgatctggggattggtcggatattggaggtcgtcaatacatggaagatacccatgtgtgtattactgacctagctaagaactttggttatcaatcggtggataatgaagctatttccttttatggggtctttgatgggcatggtggaaaagatgctgcccattttgttcgtgataatttaccaaggatcattgtggaagatgctgattttcctcttgagcttgagaaagtagtaagaagatcctttgttcatgcagataatcagtttgcaaagacaacactgtcttctggcacaacagcacttacagcaatgattttcggaaggactcttctgattgcaaatgctggagattgtagggcggttctttcacggtgcggcactgcaattgaaatgtcagtggaccacaggccttgcagcctcagcgaaaaactgcgtgtagaatcacttggtggctatgtcgacgatggttacctcaacggtttgttaggagtcactagagcactcggtgactggcatcttgagggcatgaaagaagctggcaatccaggaggtccacttagtgctgaaccagagctaaagatgatcacactgacaaaggacgacgagttcttgataattggcagcgacgggatctgggacgtcttctcaaaccaaaacgtggtggactttgcacggaggcgcctccaagaacacaacgatgtgaagtcctgctgcagggagatcgttgaggaggcaataaagcgaggcgccaccgacaacttaaccgcggtgttggtctccttccacctggaggctcctccccaggtcagagtgagccgacccggtagggtggcgcgcagcatttcggctgaggggctgaacagcttgaggacactcctgagaaaccaatgatggccatcttctttgcattcttgctgcaatttctctagtatgttgcattgccgagtgttaattgtatgtagtgatctcggcacctcattgttgttagatgttaccaccattgttgtgatgacaccagctattattcttgttggtaattaagccaacgaacatgagttttgagctctcaaattgtgagaaattttaagcggctgtaacaagttgagctctgtgaagaaagaagtgagtgcccaagctcacagtgtcatatttttctcctattcttgtctgtaaataaaaatgtcagctactcagctcctgggtaattgaacgttgaccatgtaaaagatacccccattgagtgaaattgccgccaattggctcatcttttc

SEQ ID NO: 15069 - DNA, 1344 bp, Oryza sativa
  ref <308>: DATABASE ACCESSION NUMBER: AK065603
  ref <309>: DATABASE ENTRY DATE: 2001-12-06
ggtatgcatttcatcgaacaccttgcgatcaccctctcaccaccgctagagatcaccattgtgaggctccccggccggagcaggaggttagagggagtggaggaagagccgtgctgccgccgtcgccatgggggaagccgggtagccgctggacatcaagaaacgccgtcgagcaccttacgtcgctgccgtttgcccctgtcctgcaccgcgtcgagctccacttcgctgcgtttcgccatctcgccatctcgcgaaattgtgtatcgattagtggtgaggcaacgtatgcagcttccaggaggtgaaggttgatcaagattataccaagaataagaactatcctgagcaggacgtgacaccgaaccccctggtttggctgaaccatgggctggcccaaaccagcccatcttcggttggcgacttcctctattgcttcactttgtagacttgtgaattttggcccaattcatcgtgtcaattctgagttcttggcccattcatacataagtctggttctcgacatcgtccgattgatttatcgtctatgttgatgtcgattctcctccactttagtgtcattctctacaaaaagatatattgatgtcgaggatgtccagcagcacgggcagcccgatatgccggtgatcgttccggcgctcacactcgagccgttcgtgctgtgggaggaaattagtcagggcccgtccgcggaggcaaacatggcgatgacgttgctagatttcaagaacatgttggctgaccgagctcgtcgaatccgatattggaagacgaaactcgaggtggtggaactcaaaaaaatcatggtgcaggtgaagaaggaccaggccatggaagctctccgggggtcacgaggtgtggttcaactcgtacctcaggagctgttgcacgtcgatggcgagggtttgcatggagctctgagttccccgcgaagatcccgaggagtcggcggctggttatatctcgtggttgaatgaggcttgcgcacagctcgaagggattggccagcgcatcgacgatgccctgaagcaggagtgtcgtcgagcgagccgctatgccagaggacatgtgctagcctgcatccgagatcatcgttcgcagctgcatctcgagttccttcgcgaagggttctcgcgttctcggaggacacctgcggagatcgacggtcctgcggagatccgctccatggattggcgttggccgtctggtagtttttgtattatgtagaaaaatatctcaaggaagcatgtaatatactttgaagtatttatgacttgtaagaaatacttgtaaaatagaaaaggaatctatctaagttttctt

SEQ ID NO: 15070 - DNA, 1323 bp, Oryza sativa
  ref <308>: DATABASE ACCESSION NUMBER: AK065604
  ref <309>: DATABASE ENTRY DATE: 2001-12-06
gttagctctcgctctcgcagctcaaccactagcagcagcggcaggaaggcgagaggaggaatcggaggtagctggacggcggcgaggcgacgacgagccggggtggtgcagcaagaacggcgcggcgagcggcggggaggagagattggatcgacgccgggtagttaggaagggagcttggagagatggcggcttccgcgaggcccgtcggcgtcggcggggagagggcgacgagcttcgccatggcgtgcagcctgctcagccgctacgtccgccagaacggcgccgccgccgccgagctcggcctcggcatcagaggtgagggtgaggctccgagggcggcgccggcgacgatgagcttgctgcccggggaggcggagaggaagaaggagaccatggagctcttcccgcagagcgccggctttggccagcaggatgccatcaccgccgattctgctgctgatgctagggaacaagagcctgagaggcgtcagctgaccatcttctatggtgggaaggtgctcgtgttcaacgacttcccagccgacaaggcaaagggcttgatgcagctggctagcaagggcagcccggtggctcctcagaatgccgcggcacctgcaccagcagctgttacagacaacaccaaggcccctatggccgtgccggccccggtcagtagcttgcctacagctcaggccgatgctcagaagcctgctcgcgcgaatgcttctgatatgcctattgctaggaaggcatcactccacaggttccttgagaagagaaaggatcgtcttaatgcaaagacgccataccaggcttctccttcagatgcaaccccagtcaagaaggagcctgagagccaaccatggctcggactagggccgaacgccgtcgtgaagcccatagaacgcggccaatgaggttgcatggaaacttcaccaaagctcttcaaaaatatatgaaatgcgcttgccgttagagtaccaaatcatatatgttctctcataccccatgttttagtgttttttctttagttcgtgcttctatgttgttcacttgtcacatagttctgaatgtaaaggaaaaaggtagtagcattgacgaccagtgccgagagcctgagagaagttttggcatgttaacacatggtgactctgaaaatggccatgctaaggtaaaaagttattgcaaaggaaacatatatgtatcttctgaaattctgatcatctggctttgtccttggctctagccttgctctatgcaaagcaaagtgattgtaatggattcagaatataattcatattcctattgttgatttctgtt

SEQ ID NO: 15071 - DNA, 1955 bp, Oryza sativa
  ref <308>: DATABASE ACCESSION NUMBER: AK065605
  ref <309>: DATABASE ENTRY DATE: 2001-12-06
gacccttctcagccagcttcgcctcgctcgctagctatccatctcttcctcctcttcttctcccttcccttgtttgcttggaaggagagggggaagaaaagtaggaggacgcggttgcgggttggtccagatctagggcaaggcggtggccggagtttgagctgggcccgccggcggcgagatgaagcagtcgatgcggagccggcaggagccgcggcgggtgagcaacggcgtcatcatcgccgccatgctgctctccctctgcgtcctcagcatcgtcaaggccagatactgctccacccccttcgttaagcccgacgaccagctacaggagcagatgaactccagcatcaggatggagaccgacgagccggcgaccatggcggcgggagagcaagaggaggacgaggaggaggagagctctggcggtggcggcgctgagcctgaggtcagcgccacccctgccgtcgtggtcaccgccgcagccggcggcggcggcggcaagaggaagccgacctgccgcatgacgagcaagcggtcggagcggtgcgaggcgagaggggacattcgtgtggaggggaacgcgtccaccatctacatcggcgggatcgacaaggagtggaagacgaagccgtacgcgcggtaccacgaccccgtcgccatggccgtcgtccgcgagttcaccctcaagccggtcaccgagtcgtcgccggcgtgcaccaggaaccactcggtcccggccttcgtcttctccaacggcggcttctccggcaacctgtaccacgactacaccgacgtgctcgtgccgctgttcctcagcacccaccagttcaagggccaggtgcagttcttgctcagtgggctcaagccatggtgggtgaacaagttcaacctcttcttcaggcagctcaccaagtacgacatcctcgacatcgacaacgacaaggacgtgcactgcttcccccggatcgtggtcggcgccaccttccacaaggacatgggcgtggaccccaagcgctcgccggggcacgtctcggtggtggacttcaagcgcgcgctccgccgcgccttcgggctggagcgcgtcgcggcgtcccgaggcggcgccacggggaacggcaagccacggttgctaatcatttcccgcaagaactcgcggcggttcctcaatgagcgggagatggcgcaggccgctgccgctgtgggcttcgaggtgcgcattgccgagcccgatcagcacaccgacatgtccacattcgcccagctcgtcaattccgccgatgtcatgatcggtgtccatggtgctgggctcaccaacatggtgttcctcccccgcggcgccgtcctcatccaggtggtgccattcggcggcctagagtggctcaccactgtcaccttcaagaatccggcgaaagacatggaggtcacctacatggattacaatgtgcagctggaggagagctcgctgatcgatcagtacccgcgcaatcaccaggtgctcactgatccctacgccgtgcacaagcaaggctgggacgcgctcaagacggcgtacctggacaagcagaacatcaagatggacatggacaggttcaagaagacattgcaggaggcgctcgacaggttgccgccagcatgagagcttgatgaactgatgaaagctcaagcccacgaggtggtggtggtggtggtggtagatagataggttggtgtatctatctgtgccttctcttgcttaacttatttttccttttgaaattctttttacgccttcttcttcctttagcaacattcatttgatctgttgttttggaaaaggaaaaaagaggatgaacaagaacatcatgttacatatgcctagctgatgagtaatttataccctttgtgattattaattggttgtttatttacaagtaaatgtcaagatacaaaattgtggattactagtaagtatc

SEQ ID NO: 15072 - DNA, 1750 bp, Oryza sativa
  ref <308>: DATABASE ACCESSION NUMBER: AK065606
  ref <309>: DATABASE ENTRY DATE: 2001-12-06
gactcccgcctcgcctcctctccgccccgctccgctcgccggcgagccgccgccgccgccccagccccacaccctcgtcggcgcgtcgcctaccggtggccatcttcgcccactcccgctccatgtcctgtagccgaagtgcggcaatgattgactgcccgcggctgctcctggcggccgcgcgcgcctctccgtaccccagctccgccgctcaccggagggtctgcaccgccggagtccctcccgtacccgtatattgccgtgtcagccaccgccgcaggtcctccgttcctgtgcaatctgcatcctctgggtcaggaagccaatcaagcgttgcagaaagttcggaggctaccgaatgggccatgcaggatttctacgctttgcggaaggatgtcgagctggctgtagcgcgcgtcagtgaagtcaggcagtctgctggtttggatcagcttgaggaggaaatcgcttcgctcgagaagaaatctgcagatagttccttgtgggatgatccttccaaggcacaggaggtacttgttgctctgacagaggtcaaagacagagtcaagcttctcaacgatttgaagttgcaggttgaagaagctgagaccattgtaaagcttactgaggagttagattccatagatactggccttcttgaagaagcctcaaagatcataaaggcattaaacaaagcactagataactttgagatgacacagcttctttctggaccttatgacaaggaaggtgctgtgattaatattactgcaggtgctggtggcaccgatgcccaggattgggctgacatgttactgaggatgtatgttaggtggggagagaagcagcggtacaagacaagagtggttgagaaatcccctggtgaagaagctggaataaaatcagctaccattgaattagaaggaagatatgcctatgggtatctctctggggagaaagggacacacagaattgttcgtcagtccccattcaatgctaaagggcttaggcagacaagctttgctggtgttgaagtaatgcctctactgccagaagagtccatggatgtagaaatacccgaagaggatctggagataagcttcactagagcaggcggcaaaggaggccagaatgtgaacaaggtggagacggctgttcgcatggtccatatacccacgggcatcgctgttcgttgcacagaggagaggagccagttggccaacaagataaaggccctgagccggctgaaggcgaagctgctggtgatcgccgaggagcagcgggcgtcggagatcaagcagatccgcggcgacgcggtgaaggcggagtgggggcagcagatccgcaactacgtcttccacccctacaagctcgtcaaggacgtccgcaccgcctgcgagacgtcggacatcaccggcgtcatggatcggcgagctggacaccttcatcagagcctacctcaagtacaagctctctgccgctgctgaggagcaaagcgtcaagtgacagatttgcatccagtgtccgatgcaacaaccgtgcttgtgctataggcgcagaattttgatgcagagcaagaaccccatcacgtagtaagcttgtaagaatagcctgaaattaaccgtgcagaattcggtttgcttggctctactaagcacccaaattttattttggggcttcatgtattagtggatatattaatttcatttctacccaatatatataagcctctcacctgcctgacgctctc

SEQ ID NO: 15073 - DNA, 3295 bp, Oryza sativa
  ref <308>: DATABASE ACCESSION NUMBER: AK065607
  ref <309>: DATABASE ENTRY DATE: 2001-12-06
cggccgagtgggagcggcggcgctgcctgtggtctgtggagctggtggtgggcctggcgacgttccgtgccgtgcgcgaggaggggcgcggcagggcggaatccctggcgtagagcggcgaacgcgcgggtcggcggggcagcagcgcggcggcgcgacgcgggggcagcagcacggcgcagcaaccggcactggctaaatagcgccgggagcaaggcagagacagccaccaacagggactgaaggcaggcagaggcaggcaacaagctatagaggagaggaagaggagattaggaatgttgtggtatttttgagtttctcttctatttacccttttggcaactggatgatgaattgtgatcttatgactagtgcttgttgctatgtttaatgtagacataatgggataatgttgcttttttttcccttcttgttctgttctaattctcacgctagttcatgtgccacacctattttttttttcggtcgtccaattatttcagtgtacttttgataaatttaagccttgtttgtatttgtctgcatgaagacatgtagaatttgctcttggtatctgtttgggctctggttgtgccactacttgatgctcttaggttctgtccatcttcacctctcctattccatatcatcaacttgttcttttgctagtagaatcactaattcagtattgttagtatcttctatgggcaatatatgtactgtcagaagaaataaatcctttaggatgaaatgtctgaatagattcaatgcagaaagtttatgttgttatgcttcaactgttattcattattatttaatttaattcaggaattttgttgaataatggatgctaggtctgaagcaaattacgtgatctgtggtgataacatgctctcgatctgagacagcattcaaataagcatcgtcgaaggtgtcctactgggttacacaaacttctttcagaagcgagaagaagatggccaccaaaccccagccatagattcccatttccaagcctgcctcactccaccagcatgatgaaacatcacctacgtcgatgtggtgctgctgctttcaccatggtccgatgtttctgccactttccgcatgctgtatccacgtcacctccaattggatggaagtgcccttctcctcggctatactccaccaatgagatgaaccagcagcttcctgcgaacctggtgggggtcatggagcagagaatgaaattgatcgagcagaggagtgcgtacctccaggagcaaattaaccagacagccagatgcctcgcctgaagaatactcaagggccaacaaggagctccacaaattggagagtactatggatatgatcgaggagctgcggtccaaacaggaggtaatgatcacatgaatttgtgtaatgttcacatcccatggtatggtagactgggagtaggccaaactatttgagtatttgcaggaaattgagggtttgaaatccttgatgacaaactctgttgaagagaaggacttccgcgagatggcagctcaggagctccttcaggctctggaggaggagaaacaactgcagcacaagctgtttcgatcattacttccaaaagatgaagctgacgagagggattgcatattgggggtccgtgcaggtactggaggagaagaggcgtctttgtttgcaatggacatatttaaaatgtacgagaagtactcccaaaagaatggttggaaattcgatgctattgatatcatggagtctgcattaaaaggatacaaggaagctagtgggactatatcaggtcctggggcatacgggaaactcaagtttgagagtggcatccatagagttcagcgagtaccagtaacggagaaatctggacgggtgcacactagtgctgtatctgttgctattcttcctcaagctgatgaggttgatgtacaattgcgcaatgaagacttgagaatcgatacctacagatcaggtggttctggaggtcagtctgtcaatacgactgatagcgctgttagaataacccatgttccaaccggaacagttgttgcgatacaggatgagaggtctcagcatcaggttgccatacacacacaatcattcctttgctgtagttttctcctttaaatcaggaaacaagtagtgcttaggtcctgtttgtttcagcttaagattattgtaatctagattattgaggcacattaagctggattataataagccgacatagaataagttgttagctgtatgtttctctggattattagatgtttgttagttgttagccacccaataataaaaaaaacacctttagagtggattaccagattgtagtaatctggcttatagattgtaataatctatcgtaataagctatctctttgtttcaacttactcctaataatccagattataataatcctaagctgaatcaaacagggcctttgatacctcattttcgtatttctgttcctatgttatgcccttcatttatatatttttagtctcatatttattttctgattctttaatagttttattgatcttagcattatcttaacacttatttgttgtcttcacttttgatgcaccaagtggaaatcaatcatatccatttgtagaattgttcatttatctacttattatattaatgttatatgcaactctttttagaataaggccaaagccctcaaagttctccgagcaagactatatgaaattgaaaggcatcgactccatatggaccggtcaaagcttcgatcagagcagattggaagcggtgacaggtccgaacgtatccgaacatacaactttccacaagggcgtgttaccgatcatcgtgttgggatcacgcaccactccatagaagatgttatggagggggagagcttggatatcttcattgatgcgctcctcctgcgttatgaaatggacgcaatcgcttcatttgcttcttaagtcatactggttttgtggtttcttttagcatcaactacatcgggaccaaacagagaaggaaccatgtatacatcgcactgaaccggcagagacaacgtcaagaatcttgagttctcaagttttccttattctcaatgtataagcatgtagcttaggatcatagctgtatcgcccattattctgaaagcagtagcagccaaacagtttttcttcatattttttatcgcgccgcaagttatttgtgggcaactgaatcacgagtggctgccacatcggtgttcagtcaaatgggattacaattttgacagagataaatgggattacaaatttg

SEQ ID NO: 15074 - DNA, 3188 bp, Oryza sativa
  ref <308>: DATABASE ACCESSION NUMBER: AK065608
  ref <309>: DATABASE ENTRY DATE: 2001-12-06
ttggtgttttgaccgtcatgacactgggaatgttctatgccgcttttgcaaaaactgcttttaagggtgacagtcagcaaagcttgcatcatttctgggaaatggttgcttatatagcaaacacacttatatttatactgagtggggttgttattgcagatggagtactagaaaataatgtccatttcgagaggcacggtatttatctccatgtaccttttgaaatttaccttttatgtttccaataaagaaaccacaaaagcctagttcaagtctgtggtcagatgaccagagccttccacgactattgataaatgcaggataaccaggagaatggctagaatgcgctgcttccttttagaggagggagagaccgcagacttgaaagataccttgcaattgctgacatggacattctggaatagaacattgtttctgaatttcttatttatgcttgcatttttttaattactgtttcaggtgcttcatggggcttccttcttctgctctatgtatttgtgcaaatttctcggatattagttgttgttattttgtatccattgttgcgccactttgggtatggtttggacttgaaagaagccacaattcttgtttgggcgggactgcgaggggctgttgctctgtctctatcattatctgttaagcgtgctagtgatgcagttcagacccatctgaaaccagttgacggaacaatgtttgtgttcttcactggtggcatcgtgtttttgacattgatttttaatggttctactacacaatttttgttgcatctacttggaatggacagattagcagcaacaaagcttcgcatattgaattatacaaaatatgaaatgctaaacaaggcattggaggcttttggtgatcttagggatgatgaggaacttggtcctcctgctgattgggttactgtaaagaaatatatcacatgcttgaacgacttggacgatgagcctgtgcatcctcatgctgtttctgacagaaatgatcgcatgcataccatgaacttaagggacatccgtgtgcggcttctaaatggtgtccaagctgcttactggggaatgcttgaagaaggacgaataactcaaaccactgcaaatattttaatgagatcggttgatgaagctatggatcttgttcctacccaagaattatgtgactggaagggtttgcggtccaatgtccattttccaaattactataggttccttcaaatgagcaggttgccacgaaggcttatcacttacttcacagtagaaagactggagtcaggatgttacatctgtgctgcatttctccgtgctcatagaatcgcaagacggcagctacatgactttcttggtgatagtgaggttgccagaattgttattgatgaaagtaatgctgagggagaggaggctagaaaattcttggaagatgttcgtgttacattccctcaggtgcttcgtgtgctgaagactcgacaagtaacatattcggtattgacccacttgagtgagtatattcaaaatctccagaagactgggttgctggaagaaaaggaaatggcccatctagatgatgctttgcagacagacttgaagaagttcaagaggaatccaccattggtaaaaatgccaagagtcagtgatcttttgaacactcatccgttagttggtgcactgcctgctgcgatgcgtgatcctttattaagtagcacaaaagaaacagtaaaaggacatggcacaatcctttatagagagggctcaaggccaactggtatatggcttgtttcgattggagtagtaaagtggacaagtcagagattaagcagcaggcattcattggatccaattttatcacatggcagcactttgggcctgtatgaggtgctgattggaaaaccttatatctgtgacatgattacagattctgtggtgcactgcttcttcattgaagctgaaaagatagagcaattgcgtcaatcagatccttctattgagatttttctgtggcaggaaagtgctctagtcgttgccaggcttttgctccctatgatgtttgagaaaatggcaacacatgagctcagggttctcatcactgaaagatctactatgaacatctacattaagggcgaagaaattgaacttgagcagaatttcattggcatcttactggaaggatttttgaagaccaagaaccaaactttgatcacacctccagggttactgctaccaccaaatgccgacttgaacttatttggtctcgagtcatcagctataaaccgcattgactactgttatacagcacccagctatcaggtggaggctagagcaaggattttgttcgttgagatagggaggcccgaaatagaggcggatctgcaaaggagtgcgtcattgatatctcaaacccttgaactgcctcggacacaaagcaaggagcacagcggtttgctcagctggccggaaagcttcagaaaatccaggggagctcagaatggtgccagcttaactgaaatcagagaccatccagcaagcttctctgcaagagcattgcagctgagcatgtacgggagcatgatcaatgacatgaagtccggtcagggtcagggtcagaggaggcagaggcatcgtcacacgaaagcaagctctaataaagcgcacagctcgtcgtacccaagagtgccttcgaggtcgtccaacacgcagaggcccctgctgtctgtgcagtccgagggtgccaacatgacgacggcaaggcaggctgctgctgctggtgcttctctgccgccggagccggaggaggcaggacggcggcggcggcgacaacgcaaggcaatagaagaggacgaggacaactcgagcgatgagtcggccggggaagaggtgattgtcagagtcgattctcccagcatgctcaccttccgtcagccctccagcgctgctgatcgatgatcaacgtcgcaacccaagtaattgttggaccagccaatggaaatactcctcttatatttaatactaatatttgcaatgcatttgctcatttcattctgttctagcgtatacatatgcatcttatatttgcatgcttggctcgtgcgtttacctctagtacagtaataaagaagaatccctgttcgttccgatgttgagctacatgattatttatatagatatatatttttg

SEQ ID NO: 15075 - DNA, 1464 bp, Oryza sativa
  ref <308>: DATABASE ACCESSION NUMBER: AK065609
  ref <309>: DATABASE ENTRY DATE: 2001-12-06
gcctttcccattctgtttctcttctgttggctcatcgttggtttcgcccatattcctcttcttgaaggggatcgctgatcagcaaggtactctctcttcgatccccttcccccccctctctctctctctctctctctctctctctccgcgcgcggcctgtcgcggctgttgggctctgcctcgcgtgccgctcgccgtgctccgtgattacttctgtgctcgtcaggcttccttcgccgtcgtcatcctcgcgctcgcgcgacagaatatctcatgatcgatccgtggtgacgttccgacacgcggtcggtgggtcgttcccccgtttccccaccgtggggtgtgcgttggcacggcttttgcgcttggggacttttagcgtttgtgcccggccatcgtagcgatgcgggggaagttgtcggcgatctgctgatgcggctctgatcactgcatatctgatcagttacgtgtccgatccgttccatccctggttggcggtgaaattggcgtgcgtattcgcgtaactacatatctacatgtgctgtttgatcaatctcacgtttcggttatgtgcggtgatgaactgatgatgtagcttatctgaattctcatagcaatgggctttgttcgctatcaagcaagcgttaattctcagtacagtgctttgctttagatgttcagttagtataaagctattgcaggttctgaggtgctcctgacctgcttccacaatgcaagctaaagaatccaaaaagtcaagggacaggggccgggaccgtgtgaaatggaatgaagaaaatttgaatgacattgagtcgaccaagccagtaagagaaaaaatcaccgagcctaagacgccatatcactcaatgattgatgaagatgatgggactgtttctccaaaaagaactattgaagaatcagtggataagtccactcatgctgatgcgattaagactgctttgatggaagctgtttcaagtggaaaattatcagcaagagaacatttggaatcctgtagtaatgaagaagaagaagaagaagaagaagaagaagaagaagaagaagaagaagaagaagaagaagaagaacaagaagaagaagaagaagaagaagaagaagaagaagaagaagaagaagaagaagaggtggccatcaaacaaggcacagatttcgaagagcaacggaaggctcactatgatgaattccgcaagatgaaggaactgcgtcggaggggaacgccgtcacaagagggtgatgaatgatgactctggcaccgtcgcacaactcggaagcatatgatcagcgaatcctcggcatgttaaatattggcagtggcaggaatgttttacagatatcctactaaaccttaaaaagctcatgtgactatctgttctcttgcttaattattagtactggtcctaggacagtaccaggtaaaattttggctcttattatggaggt

SEQ ID NO: 15076 - DNA, 1808 bp, Oryza sativa
  ref <308>: DATABASE ACCESSION NUMBER: AK065610
  ref <309>: DATABASE ENTRY DATE: 2001-12-06
gctccaccgccaccgccaccgcgaggaagacgcggtcgccgtagcagccacgtctcctccaccacctcgtctccctctcgagagagacaccgcgcgtctcgtctcgtctcatggcgccgccgcctcgggctcgcttggtgcagatcgggacccgccgccgccgctgccggggccggatcccgccttgcaccaagtgaatcggagccggcgtagcgccctccttccgccgatccgccgccgatgctgcgctgcttggttgtttttattgtctctccttcgtttctgggtcggtatcgggacggggttagcgatgaatcggatcgaattgctgatcctcctcgtgttcgtgttcgtaggtgtggggcgtacgcgtttgtattagatttaatttttttttcagatctagatctggtgcctaattctcgattacttattctatctatgattcgtgtcggcgttatcaagttggaatttcccctaatttttggtggctatcctgagtttggtactcgtatcagtatcaggagtatggtttcaggggaggccacctagaattagcgggaaaaagatctgaatctcattgtctttttgggtagatgaggtttatttgcgatctatgctttgattgaactgtgggtatcatttattgatatggatgttgttaatctgaatctaccactgctagtacgggtctatcatggttgctaattaagatgaaggttgaaattatggtgaattcattttggtataatgatctgtgaccatgagttcatgctgaatcctgtatatgcttaatttagcacatctgctgtagtctgcatagtggtcttcatggcatatgctaattctggtagtgccaccaataaggtgtggccttgcccttgctctgttcagttgtggaaattaagaactttgattctaaatgcatgctatttgttagaggctgtgtgtggctacaagtttctacatgcccttttggcctaacagaggcatatgcttatcgctaatatagaccttagccatggtcaaacaaacaggttactagttgcaagtttgcctttctcgtattttaagatctaattccgaggataaagctaatagaccggagataattagtgatgcgaaaaaagacttagtgtttcaaacaactttgggacttatctagtttatctactgacctaggtaagtgaattattgtgctatatagctgagtaatttaattaatagtgcaataaaactacttgtctctagtttatcgatgttatgaaaatgactaattcaatttatgttgtaattgtaaattgttttgaggtaaactttcaaacttactttcttaagtttacaggtttaactcttttctttaatggcctgtcgaagtatttaattcatggattgattcaacggcgggaagatagatttactacatcaaaaagcagctggctttccttttgaaaaaaaagcatcgatctgttttgccgggccaaaatgcattaatcttgttctggagataattttaaattccttcacagtgtacaactttgaaccaatgggcttctttgatgctcaacggttttgcatccatgctagtactagtatatttgcatatgtatctatttgtagggatgtgcttttcctctggattgatgctggctgcgctgcctgaaatagtaaacacagtacaaatcattgataaattaaacaagacctagtcttagttcaaatgtcaggccattgattggtctagttttgtgggtatcttgatagatccagctttcaccataaactaacaatggtttctattcagcttt

SEQ ID NO: 15077 - DNA, 2957 bp, Oryza sativa
  ref <308>: DATABASE ACCESSION NUMBER: AK065611
  ref <309>: DATABASE ENTRY DATE: 2001-12-06
tgtctgaactctgaactctctctctctctctctctcctcctcttcccggcggagtcccccacctcgcctcccctccctgcgcgcggcaccaccggcgggaaggtctccggagtgcgcggcggtgtggacgtcttcctaccctccccgtcccaaccccgcggccgcttcgttcttggtcgtcctcgaagatcaaccgtctggccgggagcctagagttgttaactacggtgtttcagagtttttttgttatctcttctgctgttgtgctgacttctaatgggatggggaaacaccttaaccaggcgcctcaaagtcttttccatggccttgtttatatacttcgactataaggcagttcagaagagagttaaatgggttggcgctggtaaaaaggatgctatatggacaaaaacacacgagcgaaatgctcgtcgtgttctcaacctgatgatagagttagaaggtttatgggtgaaaatgggacaatatttatccacaagagcagatgtgcttcctgaaccctacataaatgtcctcaagcagttgcaggactcgcttcctcctcgccctcttgaagaggttcgtggaaccatagagaaagaacttgggaaacccatgaatgatctgtttgctaattttgtgctggatcctctagcaactgcatcaatagcacaggttcatcgtgcaactcttgtagatggcagagaagtagttgtgaaaatccaacatgatggtatcaaagatatcatattagaggatttgaagaatgcaaaatcattagttgaatggattgcatgggcagagcctcaatataattttaacccgatgatagatgaatggtgcaaggaggcaccaaaggaacttgatttcaaccatgaggcagagaacacaaaggctgtctccagtaatcttagtcgaaaaaccaattgcgagagtggtgctgtctctagtgctgttgacgtactgattccagaagttattcagtcaactgataaggttctaattttgcaatatatggatggaattcgtttgaatgacaatgattcgttagaagcatatggtgttgataagcaaagacttgtggaggagataacccgtgcatatgctcatcaaatatacgttgatggcttctttaacggcgatcctcaccctggcaattttcttgttagcaaggaacctccacacaagccgattctccttgattttgggcttactaaacgcatatctcaatcaatgaggcaggcactagcaaagatgttttgtcatgcgctgagggagaccatgtggcactgctgtcagcctttgcggagatggggcttaagctgcgggttgacatgcctgagcaggctatggagatcgctacagtattttttcggcagtccactacagcaaatgaagcaaaggagaacataaagacattgaatgaccaaagagaacgaaatgtcaaggcacttcaagaaaagatgaaaatgaataaaaaggaggttcaacgtttcaatccagttgatgctttccctggtgatgcaattatattcatgagggttttgaatcttcttagagggctatcagcatcactaaatgttaggatagtttatctagacatcatgaggccatttgctgaatcaactttgctagggagtatgacacgtgggcccacagctaacagtcagtggatttatgactcacctgttaactcagaggtggagtctaaactgcggaaccttctgcttgagttgggaagcaacaaaattttaggaatacaagtttgtgcttataaagatggaaaggtcataatagataccgctgctggtacgttagggaagtatgatccacgtcctgttcaacctgattctctctttccagttttttcagtgacaaagggtatcactgctggcatggtgcattggcttgttgacaaagggaagttgaagtatgaggagactgttgccaatatatggccaaaattcggaactaacaaaaaagagctaataaaggttcatcatcttctgaatcatacatctggctcgatactacgccgcgctgggggcaggcggcgccattcctccgccgcactccggtggtggctccaagccgccactcggcagccatgtccacacccccaagttccccaccatgccgtccaagaagaagaagaagggaggttcgaagaatgatgtcggcgtcgctgacaaggacgggtacacccagctccgcaccagcgacggcagcgacgaggggtcgacggtgtcagcggtggtggccgggaacggcagtggcagcggcagcagcatgttcgtcgacggcggcaccaagatgctcgacgcgttcatgggcgtcggcgacttctccggcatgatccacccgaacggcaagttcgggctcgggttcaggaggtacggctatggcgccgtcgctggcgagaaggtggcgacgacgacgttcgggcactccgggatgggcgggtcgacggggttctgcgacgtggagcacgggctggccatggccgtgacggtgaacaagatgtcgctgggcggcgtgacgcggcgcgtggtccggctggtgtgcgaggagctgggcgtgccggtgcccgacgagttctccgtcgccggcgacaagggccccgacatggtgctcaacctcgcgccgccggagtagcaccaacctgccaggccactactactgacatttcatcatacactttgatacatatacacatgtagctaggtaagagtaaactcatgatgatataacaaaatgaggggaaaaattaatgttctttccgggtatacatattagtacaatatagtagtacaaatttatgccatttggatgtggcttcgtcatatatactccaaattatacatgtatacaagatttttgtttcatttttcctgtttacatttgcaactgtgaggtgccaagtgatgccatgttggaaaattcgaatatgctgttgt

SEQ ID NO: 15078 - DNA, 1571 bp, Oryza sativa
  ref <308>: DATABASE ACCESSION NUMBER: AK065612
  ref <309>: DATABASE ENTRY DATE: 2001-12-06
gcactagctcagtcgctcgcctccgctgctggtgtcgagccgcttccgatccccccccctcccgacgcgaggccgaaaccctaccgccgatgacgtcatccggcgctcccccgccggcggcgatggccgtggacgacgcggaggacgaccagctcgcctccatgtccacggaggacatcgtccgtgcctcccgcctactcgacaacgagatccgcgtcctcaaggatgagctgcagcggaccaacttggagctggaatcgttcaaggagaagattaaggagaaccaggagaagattaagctcaacaagcagcttccctacctcgtcggcaacatcgttgagattctggaaatgaaccctgaggatgaagctgaggaggatggtgctaatattgatttagactcacaaaggaaaggaaaatgtgttgttctgaagacttccacaagacaaactatattccttcctgtggttgggctagttgaccctgataaactcaagcctggtgatttggttggagtaaacaaagacagctaccttatactggacacactgccatcagagtatgattcacgagtaaaggcaatggaggtggatgaaaaacccacagaggactacaatgatattggaggtcttgaaaagcagattcaagagcttgtggaggcaattgttttgccaatgacacacaaagatcggttccaaaagttgggcattcgcccccccaaaggagttcttttgtatggaccacctggaactgggaagacattgatggctcgtgcatgtgctgcacagacaaatgcgacgttcctgaaattagctggtccacaattagtccagatgtttatcggtgatggagcaaagctggttcgggatgcttttcagcttgctaaggagaaagctccctgcatcattttcattgatgagattgatgccattgggactaagaggtttgacagtgaggttagtggtgacagagaagttcagaggactatgttggaattgctgaaccaactcgatggatttagtagtgacgagcggataaaggtcatagcggcaacgaatcgtgctgacattcttgatcctgctttgatgcgatctggtcgtttggaccgaaagattgagtttcctcatccatctgaagaagcaagagctagaatcttgcaaattcactcaagaaaaatgaatgtaaacccagatgtgaattttgaagagctggctcgctcaacagatgacttcaatggagcgcaactgagagctgtttgtgtcgaagctggtatgcttgcactgcggcgagatgctacagaggtgactcatgaggacttcaacgaaggcataatacaggtgcaggctaagaagaagtctagcctaaattattacgcttaacaagctatgctagaatcatcagggctctggagttgtttgtaaccatagtgtttggataatcgaaaatatggcttcacgtttcatttgaggtataacttttttacactataaagtcatcacttgcttcttatgtgatggaaagttggaaactggaaagcttcttatgtgatggaaactggaaagtttttgttt

SEQ ID NO: 15079 - DNA, 1810 bp, Oryza sativa
  ref <308>: DATABASE ACCESSION NUMBER: AK065613
  ref <309>: DATABASE ENTRY DATE: 2001-12-06
gattgctcttctttccccttcctcctcggcctcggcgggcggcctccgataccgatacgccgtcggagtcgattccgattgcgattgaaggtctgttcttctatttattatagtatatatagatccagtcggctgctgcgttgaaaaccaggagaggatcagatcatggcgcaaatgggcgtcatggacgcttccctgtgtcctcctttccacggccggtccgtcgacaaggggacgcggcgcaggccaagatgggtactcctcgacaagctcgcctacttcgccggcgccgacgtccgcaacgccaccactgctacttccaaaacaagggagggccatgaaatccaggtgaccctgtgcaccgccgcccagccgcagctcgtctcctacgtgtgcgtccactctcccaccctcaatcctgcatccgatgactacgccatggagccccagatcatcgccgcacacgatgacctcctcctcatccgcctcatcctcggcagaggtaacaggtttactgtatccctcgccgactacttcgtttaccaggcctccattgctgatgatatcccgccgtctctcacgcgcatcacccatcccggccctatgatcaccttcactaaccacgaggtcgccatcctgcactacatccctgaggacacccaccaccacccgtataggccaccaggggaatacaagctccatctctaccactcccacactcagcaatggaccaccacccacttcaaccttgcggcaacaatgccagatctctctcccttccaccatcgcacaaccaacgtcatcaacctcactcaccaatctcctggtctcatggctttcgtcgacctctggcagggcctcttgctcatcaatgtgcttgacaaggtacagcctgccgcacctcgctacatcccattgccaccaccgctcaagcagggtaaagtcatttccggcagagtcgacccaacagatgttcgtgacattgccgtcgacgcaaaaggtcacatcaactttgttgagctggaggtcgatgctattcaacacgagtcggatagaaccggttacatctctcagggctggacggttgccaaatggagctgcagtaatactgaatccgacgattgctgctggcacatggactgcaagctcaacgcttctgacatctctcatctgatgcctcctgagctacccaactactgtcacccaaccccaaccttggagagactccacataggtcatcccttgctcagtttggacaacaatggcgatgttgtttacttcatggccaaggtcgaccaccgtgattacaaggcatgggtcattcctgttgacatgaggaaaaggctcatacatgaaccagctgtttttgagggtgctccgcgtactcttggcataggttccaccttcatacaaaccaccatctccaactatccacaacctgctccaggtaaaaagagaaaacagaaacagcctgggatgttgctgggatcctcaagcaaaaggaagtccgaaactccctatttgacaaatgtggtgctgccactgccaacgaggcacggtgtgcaaaaacaaccggatgcggaggaggtagcatggaagctgaattttcagataatatgttattataataagctgggatatgagtaatagtggtaattatcatattttattgatatagtgtgatcccgtatcaagactatgatccctcggttattctctcctatgtcgtgcttgtatgtgtaagggacgacctgaatgaactcagttcagacatttttctgtcctatctatgtggtacacttgttttatc

SEQ ID NO: 15080 - DNA, 1586 bp, Oryza sativa
  ref <308>: DATABASE ACCESSION NUMBER: AK065614
  ref <309>: DATABASE ENTRY DATE: 2001-12-06
gaaagcagctgagcccatgcagcagtgaagaaggcctcctcattcatctctgttgcttccgagctgagaacagctcgttcatacagcctcatgcagtgacttttgttgttgttctctgttgccctttttggagagcttgattttttgttcatttcttgggttcagacttcagggttcactgaattcttcaaggggaatatagtttttttttgcatatagatatagtcatcaagggctcaaagttgcagctgctgcttggttcttcaggattgcaagatgcatactaccatggttgcactctacattacaatctgctctatcctgttcatcgtgtccaagatgctcatctccttcctgctctacaagaagtgggctcgcaagaaacggatcatcgagaacagcctgacaggtggcaagatggtgatgttcaggtcggcggcgatgcagtcgctgagccccaagtcgttcctgaccatgatcatggggctctcgaacaaggacatcatcggctccggcgggtacggcacggtgtacaggctaagcgtcggcgagaaggcggcgttcgcggtgaagaagctgagccgcggcagcgccgagatggaccgggggttcgagcgcgagctggacaccatgggcgacatcaagcaccgcaacatcgtcccgctctgcggctactacgccgccccgcacttcaacctcctcatctacgagctcatgcccaacggcagcctcgacaccatcctccacgggaaggaggagacgaggagggcgctggggtgggaggcgaggcacaagatcgcggcgggggtggcgagggggctcgcgtacctgcaccacgactgcatcccgcacgtgatccaccgcgacatcaagtccagcaacatcctcctcgaccacaacatggaggccagggtctccgacttcggcctcgccacgctcatgaagcccaaccatagccacgtcaccaccgtcgtcgccggcaccttcggctacctcgccccagagtacttcgagaccgggagggcgacgacgaagggcgacgtgtacagctacggcgtggtgctgctggagctcctcaccgggatgaggccgacggacgagtcgtttcttgagaacggcacgaggctagtgacctgggtgaaggagacgatggaggagaagagggaggagcacgcggtcgacagcgcgctggagtcgtcgttcccggcggaggaggtgaagctggtgttcaaagtggcagacaagtgcctcgagtctgagccctgcaacaggccaaccatggctgaagttgtcaagctgctggagcaagccaagaacactactgcatgatcggttgattagcacgtgtatacgtacagaatatcatgtactgtatacatgtgttcatacagtatatacatagtaggtccttagtttagttagttgaagacttttttttttcactcaagtgttgtttttgcgcaatccagttctcagatcgatgtttaaggcgattgttttctggcgatcgagctaccaaagattgtataagtacaggaagcaaactttgctagctgccatgatagtgagcagattatttgtgtacc

SEQ ID NO: 15081 - DNA, 3549 bp, Oryza sativa
  ref <308>: DATABASE ACCESSION NUMBER: AK065615
  ref <309>: DATABASE ENTRY DATE: 2001-12-06
gagttgtcattaaactctacaacgtacgtatctctcctctcctcctgctcccgagcattccgtccccatggctgttgacgatctaaaccaccacctcatcgccgtcggagtcggagaagaagccgccaccgcccattgtgggctgcgcaccatggcgcatgcagcttgtgcggaatatggcgcagctggtggtgtcgctgggcatattggtcgccgccgacaagttggtggagcaggccttcgcagccgcctccatcaagttccccagcgccctcttcgccatgttctgcgtcttcgccctcctcctcttcctacctccttcgctcgccaacggattcatggctttcttcgaccccgccaccgtcttcatccacaggtggctgcccctcttcttcgtcccctccctcgtcgtcctgccgcttgccgtcagggacgtctcgcctgcttctgccctcaagatcctcttcatcacatgtaataattaactactgtaactaacactactcttcttaatttataattcgttccacgtacgtacagatgatcgacatgactctgctctgctcatgaattttcttcttttaatattaataatttactagttggtggctggtttgcttcactggtggtggctggttacacggcgctgagtgtgagaaggatagtgaagacacagcttataccagctgagcccatgaagagaccgtctcctttcgggccgcttgaattctgggcctgggctgctgtctttgttgcttcctttgctgttgcgtatgtttcccccactgcgcttggtaccaccgcaacaacatgccttcctttcttgcttgcttccactgttttcggttacatccttggttcccggtactactccattttatatttactctctctttattcttgactttaaacataaccttttgttcattaacctcatctcaaaatttagtgcaaatatatgagtcatacataaagtacctataataattaataaaacattgcaccgtgtttctaaattaaaaataaaaaaaaacttctatatctatcttgatagcgattaaaatcccgcactattgaaaaagaaaactactactacctactactacttgagaaaacttcaacatcaactctaagatcaaaattttaaaattcaaattttagcgtgcaacctagtttactccattatattaatttctctaacgttcaatataattctcacaggttaccatctggtgtcaagaaagtgctacacccaatcatctgttgtgcactttctgcagatttggcggcagtagcatatgggtatctctcccggtctggagtggatgcagtgctaggttctaggcttaacccccaaccctgatcgatactcctataatcaaattgcatcaatcgcaaagtcgtgctccctgatcagttttatcctatatatataatgctctcaaatatatatgtatgtatggttgtccaggtgattacctcacagagtctccgtcaaatccaggagctggtgacatcctcatgggatttcttgggtctgtcatcatatcgtttgcattttcaatgttcaatcagagaaaggtaggtacccttctctcagttagtagtattactagtagttagcatatggttatatatgttgtgacatgatcatattcgaagctctctgtttaatttgttgcgagacgagtgtgcctagctgttggctagctaattaaccatgcacccaaccaaggagtaattaattaatgtttttgtgttggataatataatatttcagcttgtaaggaggcatgcagcggaaattttcacatcaatcgctgtggcatcaacattctcgttatattcaactgccatcctaggacgagtggtagagctagagccaatattgaccatatcaatattgcccaggtgtataaccgtggcattagctttgagggtagtttctctctttgaaggtttgtccctcctcgatctgtattagctcctccgtccttgcttcttttgtcactatgaaatgaaatcatcgatatttcaaccattattaacttttagacgatttatctatgattaatgaaaactatatagttgtatttatatcgtaacatgcattactaatatggtgtctgtactttaagtatgtatatatatgtgtgtatttttttttaaaaaaaagacatattatcaaagttaaaaagtgaatagctagtatccaacgacagattaataatgaaatgcatatagattaatattcatctataataatggtgtgttgggtgggcaggtgtaaatacttcagtaaccgcagcggtggttgtcctcacggggctgatcggcgcaaattttgcgcaagcagtgatggacaagcttcgcctcaaagaccccatcgcacgaggaatagggacagcttccaggtaggatcacaatataagagcaacggtaataatacagccgatttattggctataagctcagcgtacccatataatagttagctctttacaattaatatatggctcacttatctttctcatagaattttttggttcttatgttcgaaccggctgtaagtttatagcccgtttctcctctcttctctcctccacctcagcatttagccagcttatagcttactattatacttgctctaaatgtgggttttcacgtccaacatttgacgtgcctcaaagtagtatggagtggattacatggctactacgaccaaatatacgaagatctggtaaaaggagaaattgctaggcgtgtgtttgctttgtgtgacgatggatgtttattgtttaattgcataatacctctctgtttcaggctataagacgttttgattttgatcaaagttaaactgttttaaatttaactaagtttatagacaaatatagtaatatttataacactaaattagttttatcaaattaataattgaatatatttttataataaaattgtcttgggttaaaaatgttgttactttttttttataaacttggtcaaatttaaataagtttgactttaaccaaatttaaaatgtcttgtaacatgaaacagagggaaacggagggagcagtaattgataaataagagggtgatgttaggcgtgcaatctgatccatacatacatgcagtgcccatggactgggaacggcagcggtgtcagccaaggagcctgaagcgttgcccttctgcgccatcgcctacgccctaacgggggtcgtcgcctcgttattttgctctcttccggcgatcaggcacagcttagtcttcatagctggcgatgcctctgcctcacaaacacaacacttttcttactagtattatttggatatatatttgtttgtctgtcactattcatgaaaaacagacccagtacagattgatattgtgattaataatcctacgaccgaataaatactgtatatacagagacacgtatatatggtaggagtaacatggaagggagaactatttgtatatgtaattaatttttgtaagggaggacctggacttggtggaatgaagcagctgattgcagtt

SEQ ID NO: 15082 - DNA, 1975 bp, Oryza sativa
  ref <308>: DATABASE ACCESSION NUMBER: AK065616
  ref <309>: DATABASE ENTRY DATE: 2001-12-06
gaccaatcccacaaaccactctccagccctctctgcctcctcgccgccgccgccgccaccgccgccgctcgccggcgcggcgccagccatgctccccttcgtccgctcactccgtaggctcggccctgccgcggccgatgggcgcctccttctccccctcgctccgctctcctcgaaggcggccgcgccgccgccggagtacgagatgccgtcggtgacgtggggcgtgatccaggggaggaaggagcggctcgtctcccgcgtgctcgcgctcgacttcctccgctccgccggcgtctccgaccccgccggcgagctcgaggccgtcgagctcccctcctccctcgaggtgctccaggagcggctcgacttcctcctccgcctcggcctctccaccgacgacctctccgcctacccgctcctcctcgcctgctccctccgcaagaacgccatccccgtcctctcctacctcgagaagctcggcgtcacgcgcgcgcgcctcgccgccttcgtccgcgcctacccggcctgcctccacgcctccgtcgccgtcgacctcacccccgtcgtcaagtccctccgcggcctcgacgtcgaccgccaggacctcccccgcgtcctcgagaggtaccctgacatcctcggcctcaagcccgatggcaccatcagcacctccgtcgcgtacctcgtcggcatcgtcggcgtggcgccgcgcgacatcggccccatggtgacgcacttccctttcttcctcggcatgcgcgtgggcaccaccatcaagcctctgtgcgagtacatcacttctctcgggctgccaatgcggatcctcgcgaggattctcgagaagcggccatacattcttggctatgatcttgaggagacggtcaagccaaatgtggaggcattgcttagctttggcattcgaaaggagatgttgccgctggtgattgcgcagtatccgcctattcttggattaccgctgaaaacgaagttagcagcccagcagtacttcttcaacttgaagctccaaattgaccctgatgcgtttgcctgtgctattgagaaattgccgcagcttgtaagtttgcatcagaatatcatactgaagctggtggagtttctccgtgggcgagggattagtaatgaggatgttgcgcggatggtggttcgatgccctcagattttgttgcttcggatggagctcatgaagaacagtctttacttcttcaagagcgagatgaagcgcccaataagtgaattgttagattaccctgagtattttacttacagtttggagtcaaggatcaagcctaggtacatgagagtttcaactaaggggattagatgcagcttggattggttcctaaactgcagtgatcagagatttgaggaaagaatgagaggggattttattgaaggcgatgcaccaggaccctcctttacaatgggagggaagcttcagatgccaggcagccagttagtgtcggatgatgataatgcggaaagtgacgatgaggtgctatatagacgaacagtcatgctctaatttggtggaggataatcccaaagatctttcgtgatgtgctcctgacagcatcatgcacgcaagcatcctcaactgcaagatgaaaaaggctttggcgttaatggaacattctcacaccaacagaggtcattggagtgctggcctaagcaacagctcgaagggattaacaaaggtagcagatgtactccgtgacagcctctggctttggttatgtgcgacttgaggcgaaagctggagattcgtagaccagttttggtaggagatcaaagagtagctgtggtagagtggagataatgtgccagtgatgaaaaatcctgttcactgaaattttactctaggacaccatatgatcccaacataggattcagatttttgtagcctgtagactatttactgtctgtaattcaactgctgagaaaagtattgcct

SEQ ID NO: 15083 - DNA, 1599 bp, Oryza sativa
  ref <308>: DATABASE ACCESSION NUMBER: AK065617
  ref <309>: DATABASE ENTRY DATE: 2001-12-06
aaaaaaaagtagtcgatcgatcgatcgagaggtttaatctgtcctccctctcgccggtcgccgccctcgtccccgccgccgccgccgccgttagattgaagcagagctacaggcaggaggggtttctcctcgcgcgccgccatggtgcttggcaacgtcgccatcctcgtcggctccggaattcttggatcagttcttgtaggtggtgatgccaaactccctagtgccggggaggtactttctggtgctgccaagtttgtcaagaagcatggaaacgaagggaaagatacatcgtctaacaccgatacacacaccgctcagctattatctcaggtcaaccatctcagacaggagatacaatctctaggatcaaggcctgttacagttgtcaccaatgctgctagatcaggacctggtacatttactataacagcggtggttgttgctggggctgttggctacgcctacattaagtggaagggctggaaactttctgatttgatgtttgtcacgaagcgtggcttatctgatgcttgcaatgtagttggcagccaattggacaaggtttcagatgatgtcacttctgcaaggaaacatctcgctggaaggattgatcgtgtggatatcagtttagatgaaacacaagaaattattgaagggacaagggatgaggtcacagtcatccatggggatctgagtgctttccaagaggatttacaatcagttaaccttgtagttcggagtctggaatcaaagcttgtgagtctggaatacacccaggatcatacggctaatggaatatctgacttggttgagttcacccagaaagccactattcgccaggtcccagcagcatccgttcctccagctattggatcttcagagcgagttgttaggagggtttcttcgttgcctcaatctactgctcttccagctctgccgacaaccgcacctgcagctgaaccatcacctagggcagaggtgccacaggaggaacagtggggttttgtgagcaaagcatcatctagtagggaaggattagggcgtttgcagcagcagcggagtgttgtgaccagaacgtcgtctatgagggaaggatctcctgaatcttcaaatggagcctcatcctcaactggagcaagcacaggaaggaacacaagcacaggaacaaacacaagcacgggcagatttggtgggctgaggcttcctggacttgggtttcttgcaagttcgacgagttagttgatgaggtgtttttatttaagttaaaagatggtgctgccaggagctctccattgctttgcttgtagttttaggttgtacagtaggagagaagagataacagtagcagtgatgtgatggaacaacacatatacgtgcggggctgggctcgtttgttcttgaggaggccaaatttttgtagaaaaaagagaggaaaacatgtgcacctatgtatctatctatctatagccatgaatgcatcatccagggcaacaccttggtctttgatgtcgagatttttaacttaaaatgccaagagtactagtacttggttaattaattttatgaagacgagtcaactggttggttgcctttgtt

SEQ ID NO: 15084 - DNA, 1713 bp, Oryza sativa
  ref <308>: DATABASE ACCESSION NUMBER: AK065618
  ref <309>: DATABASE ENTRY DATE: 2001-12-06
gcccttccctcccatcccccgattcgccaccgcgaatcccaccaccacccgcagatctccgcctcggcgccattgcccaccctccacgcccccgccagattcgcccagatccacagccgggtgcatccggcggcgtggctggggcgccctcgatcgggaagctttgatcttcgtaccctttttgcggtgggcgggcggcgggcggcggaggaggaggagatgggtgtcggcggggagaagttccagctggggacggtgggggcgctgagcctctccgtggtgtcatccgtctccattgtcatctgcaacaaggcgctcatgagctccctcggcttcaactttgccactaccttgacgagttggcatcttcttgtcacattttgctccctccatgtagcattatggatgaagttcttcgagcacaagcctttcgactcgagaactgtcatgggatttggagtgctcaatggcatctccattggcctcctcaacttgagtcttggttttaattctgttggattttaccagatgacaaagctggctatcatcccatgcactgttattttggagactcttttcttcaggaagaagttcagccggagtatccaactgtccctttcagtgctcctctttggtgtcggtgttgcaacagtgactgatctgcaactcaatgctgtgggatccgtattgtccttgctggcaattattacaacctgcatcgcgcaaattatgacaaacactatccagaagaagttcaaggtttcttcaacccaattattataccaatcttgcccctatcaatcactgaccctcttccttattggtccattccttgatggatttttgactaaccaaaatgtatttgcattcgactacacatcccaagttgtgtttttcattgtattatcgtgcttgatatctgtctcagtgaacttcagcactttccttgtgatcggaaagacttctcctgtcacttaccaagtcctgggccatcttaaaacatgcctagtactgacctttggttatgttttgcttcatgacccatttagctggagaaacatactcggcatcctaattgcagtagttggaatggtcttatactcatacttctgcacattggagggccagcaaaaaaacgccgaagtctccccacaacaggcgaaagaaggcgattcggctcctttgatctcagactctctgagcaaagttgagaatggaggtggagtggttgatgatgagcctctcaaggtaccgatgtggagctcaaagtactcaagggcgtgaaaataccttccttttagaaggcggcattatacaggattcaatttggtaggcggatagtagggttggaagccaacccagattgtaatgaacattccagttacatttttgggtttatttaacattactatctagtatctactagcagtaaaagggttcttgggaggattttaccttcaagatagcagatctgccttgaaacttagacaacagatattgtatgattgtatctggatatgctccacatctttctcactgtaacttcctatgggaacatagatccacagatagacttcattcttttgtaccaaagatccagagaactagagatctgcaaggttcaagtttgtgactgtaagtttatgtttactttggacccagtgatggagcttttgtatatttaggaccaagtgcaaagaggggttcttttcc

SEQ ID NO: 15085 - DNA, 1520 bp, Oryza sativa
  ref <308>: DATABASE ACCESSION NUMBER: AK065619
  ref <309>: DATABASE ENTRY DATE: 2001-12-06
gagcgtcccgacgaaagagacgagacgaaacgaaaccctcgaactcgaagcaatggcgacggcggacgtctcgcggccctcctcctccgcgccgacggcggcggctgcgggggcagacggccacggggcgaaggggagcgccttccgcggcgacgggctgcggccgtactaccagtcgcgcatccacgacctgcagctccagatccgccaagggacggacaacctcagccgcctcgaggcccagcggaacgtcctcaattcccaagttataacgctgggggaagagttgaaggtgctccatgaaccgggctcatatgttggtgaggttgtcaaggttatgggcaagtccaaggttctagtgaaggtgcacccagaaggaaaatatgttgttgatgtcgataaaagtattgatattacaaagctctcgccttcaacaagagttgctcttcgaaatgacagctatatgcttcatcttatcctgcccagcaaagttgatccattggttaatcttatgaaggttgagaaggttcctgattctacttatgatatgattggcggccttgatcagcagattaaggagatcaaagaggttattgagcttcccattaagcatcctgagctgtttgaaagtcttggaattgcccagccaaagggtgtccttctttacgggcctccgggtacaggaaaaacgctactagctcgggcagttgctcatcacaccgactgtacctttattagggtgtcaggttccgagttggttcagaagtatattggagagggttccagaatggttcgtgaactatttgtgatggccagagagcatgcaccatccataatctttatggatgaaatagactccattggatctgctagaatgcagtcaggatctgggggtggtgatagtgaggttcaacgcactatgcttgagcttctgaatcaacttgatggctttgaagcatcaaacaaaattaaggttcttatggcgacaaataggatggatattttggatcaagctctcctgaggcctggtcgcattgataggaagattgaatttccaaatccgaatgaagattcccgctttgatatcttgaagattcattcaagaaaaatgaacttgatgcgtggcattgatctgaaaaagattgcagagaagatgaatggggcatctggagcagagcttaaggcggtctgcacggaagcaggaatgtttgcccttcgcgagagaagggttcatgtcaaccaggaggatttcttgatggcggtggcgaaggtgatgaagaaggataccgaaaagaacatgtccctgcgcaagctctggaagtgaaggaagctctcatctcgacatccctgtcatatgcctaaacagctgaagctaaacagcgccagcggtgcattgatcgctgtaaattccttaaaacatgtcgagaagggaaacgttcaacatcttacagtagcttcttttaaagttatagaattccttcattggattatcaagatgtgaaatgaaaaggtttagatcg

SEQ ID NO: 15086 - DNA, 1762 bp, Oryza sativa
  ref <308>: DATABASE ACCESSION NUMBER: AK065620
  ref <309>: DATABASE ENTRY DATE: 2001-12-06
gaatatctacggacacatccatccattttttttccctcctcttctcatcaatcaacttcttctttcttcgtgttcttcagctctgctagctactaaccctcggagcagcttcgatagctagcttagctgcttgaattggtgtttgtttcaactctctgaagctctctggaagaacgggcggcggcggcggggtatatcatgacgtggtgcaggtgatggtggggatgatggagacgagcccggacgacggcggtggcggcgaggcgatggcggcggcgcagcagacggaggaggacatggggccaccgtggctgcggccgctgctgtcgacgagcttctttgtggcgtgcgcgtcgcacccggagctgagcaagaacgagtgcaacctcttctgcctcggctgcaccggcgacgccctctgcgcctactgcctccccgcccaccgcgaccaccacgtcgtccagattcggaggtcgtcgtaccacaacgtgatcagggtgtcggaggtggggaagctgatcgacatatcgcacgtgcagacgtacgtgatcaacagcgccaagatcgtgttcctcaacggccgcccgcaggcgaggcccgggaagggcgtcaccaacacctgcgagatctgctgccgcagcctccccgactccttccgcttctgctccctcggctgcaagctgggaggaatgcggtgggacccaagcctgacattcgccatccggccgaagcgcgggcaggactccggcgacggcggctccggctccgactacgactccttcagccccaagaaggcgaggagggcggcggccggctacgatcagctcggccggttcgaccggggcatgatccggtggtccgacgacgagggcagcaagtccaacacggcgccgatcacgccgaccacgccgccgatcagccggtgccggccgtcgaggaggaagggcatcccccaccgtgcacccttctacggttagctcacacactacaccaaccaaaaaaaaaattatcacccatcaccagcatatactagtctgtccttaaaaaaagcaaactctagctacgattctagacatatcgtagctaggattgtaattttttttggacggaaggggtatatcactagctcttcagccaaagtgaccaaacctagctatcaccagttcactgctagtactagctagccacatatatgtacatgatcaagtgtcaggtctgaaatagtgaagtgatatccaatcagctactgttaggtcactagctagatatgatatgttgattagcagctagcctgatacatatagttgtataaaatatacaagtgtacacaataattaatctaggtcatgaagtaagtatatatgtgtacatatgaaatatattggcaaatgttgtcatctggagtaagttataaaggccatggtggtgatggcctgctttcatgcatgtagacacaaggttaagttaagacaagaaaaagggagacacagggaggatagaaacataggtagtggtttttaggtaggtcgagattaatatgtgaaaaaggaataagcatcatgtatttatctcggtttgtgtagtagtatatacttggctgtttgcccccaccacccaatgcgtttattagcgttgtggtgtgtagttttccacttttaagtttcagagtttctcctttgatcctctgggacttaatttgtatagacaatgtatgatgttttacttggaaaaataagggaaaaaatagaatgatggatgactt

SEQ ID NO: 15087 - DNA, 1491 bp, Oryza sativa
  ref <308>: DATABASE ACCESSION NUMBER: AK065621
  ref <309>: DATABASE ENTRY DATE: 2001-12-06
tttttatgtgaagaaaacagcaatagcgacaacacagactgtacggaaattgttggtgacatatcccaagaagacatctctggcagctctgattcctcttgcaatggaactacagaggataaagctgaaaacaacgaaatacctccactaaaaccaccaaaattccaaaagggtgtcttacggacgaactgtatagactgcttggatcgaacaaatgttgcccagtatgcctatggtttagctgctcttggacatcagttgcatgtgcttggttctgtagaatccccagaacttggtttagatgaccccttggctcatcatttgatgcacttttatgagaggatgggtgacacccttgcggtgcaatacagtggttcggctgctcataacaagatattctctgcaaagagaggtcatctgaagctttttattcgatcacaagagttcttcagaacactacaacggcactacagcaatacctgtatcgatgctaacaagcaagcagccataaacttatttcttggctacttccaaccacaggaaggaaaacctgcactctgggagctagagtcatcttcggtggatcatatcgctgtgcacgcacgtacaataaaaagagtgagatcagatggcagcattctttatggaagcaacacatccatatctggatgtagtggttgccataatgaagacaaggagctgttgaatgcagcaccgcttgatgttaaaagtgggtcacaatttccagtgttggaatctgattcagtacatggcaatgaaatttcattgacctgtgaaagtgaggtatcaaacttaaggtatacacctatgatacctcagacacatcatgttccaggcggcgttgaaactgaaagtagcattcattctggtgattcaaactttctggatcttgaatggctttcaacttcaggcaactcaagcgatgaaaggtccattgcaattagtactccagatgtgaacctttcagcggagaatgttataagtggcataaattctgagaccatggaaaatcaagatgctgatatctatactcagaatttacctgagcatttcgtgcagtgggttaaccacggagacaccttttggtattaaaattacccgatgcttgtgtcatgtacgcggtacgcgttggctactttgaaggccaaaacttgtcttttccaagtggtcatgagacgggaattggtgatttgagtagggaattaggagtgagaagagatagatggcacagcaaacttcagacattcgccttgtgatatatgtccacatcatcccatagccctcttaggaaagtataacattctggttatttgttcccatctttcttgtaggagcaagtagataggcgtttttctcaatttttgaaaagaaagtagaggtagattcatatggatatataatttttgttctttcgaaaaatgtaccattgtgggaacattccgtttgatatgtaaatattattttatgctt

SEQ ID NO: 15088 - DNA, 3102 bp, Oryza sativa
  ref <308>: DATABASE ACCESSION NUMBER: AK065622
  ref <309>: DATABASE ENTRY DATE: 2001-12-06
cattcgaagcgtcgccaccctctcgtctccccctcccgcctccgcctcgccgccgcctcgagatgctcgcgacccccggcgcgctccaccacctcctcctcctcccgccgccgccgcacacgcaactcgccttccaccatgccgtcgggggcgtccccgcggcgctgctcccgctcccccgcccccgccgcgtagcagcgagcgcctccacctcgcgtcgcggtggcgcgcgaaggagagcggcgggggctagggttagggcttccgtgggcgaggaggcgccccccgtggtgaccgaggaggcgagcacctccggcggcccgaccaagttctccacgaagattcccgtcggcgaccgccacatactggtggagacaggccacatagggaggcaagcaagcgcttctgtaatggtcacggatggcgaaacaattgtttactcctccgtctgtcttgctgatacaccaaacgatccttctgattttttcccaatgtcagttcactatcaagaacgcctttcagctgctggaagaactagtggtggtttctttaaacgagaaggaagggcaaaagaccatgaggttttagtatgcagattgatagataggcccctacgccctactatgcccaagggcttctactacgaaactcagattctatcctgggttttcagttatgatggtattcattcccccgatagcttggctatcacagctgctggtgtagccatggcactctctgaagttccaaataaacaaacaattgctggagtgagagttggtatgatcaatgatcagtttgttgttaacccaaccactgaacaaatggatgactcagagttggacttggtgatggctgggaccgatagtgccatactgatgatagagggctattgtgattttctaactgaggagaagctacttcaagctgtggaaactgggcagggggcaattcgagaaatctgcaaagcaattgatggtcttgtccagaaatgtggaaagaagaaaatgttcgatgctatcgacttaccaccccctgaactctacaggcatgttgaagatatttctggagatgagttggtgaaggcgctgcaaataaaagagaagatcctcagaagaaaagctctttcagcattggaggagaaagtaataacaatactttctgaacaaggatatgttgctaaagatgagtcatctggagtcagtgaaaatttagctgatgtaattgaagaagaggatgaggatgaagttatagtggatggtgaagtggatgaaggtgaagttcatatcaagcaagtatcaaggaaacccccacgtcagttattctcagaagttgacgtcaagctagtcttcaaggaagtttcatccaaatttttacggagacggattgtagagggtggaaagcgaagtgatggaaggagtccttgtgagcttcgtcccattaattctcaatgtggattacttcctcgagcacatggtagtgcactattcacaaggggagaaacccaggcactggctgtggtcactttaggtgactatcagatggcacagcgaattgataaccttgttgatactgaggaatcgaaaagtttctatcttcagtacacatttcctccatcatctgttggtgaagttggtcgaattggagcacctaataggagggagataggacatggaatgcttgcagaaagagccctggaaccaattttacctcctgaagaggattttccttacactattcgagtttagagtactatcaccgaaagtaatggctcctccagcatggcttctgtctgtggaggttgtttagcacttcaagacgctggtgttccaataaagttccctgttgctggaatagcaatgggcttggttcttgatacactggaatttggtggagatggcaagccacttattctctctgatattacgggtgctgaagatgcctctggtgatatggattttaaggttgctggtaatgaaaatggtatatctgctttccaaatggacatcaaggtagtggggataactctgcctataatggaacacgcccttcttcaagctagagatggtagaaaacatattttaaatgaaatgtcaaaatgttcacctccaccagcaaaagtactctctccatacgctcccttaatccatgtcatgaaggtcaagccaaacaaggtgaatttaataattggttctggtggaaagacgataaaaagcataattgaggagactggcgttgattctattgacactggagatgatggcacagtaaaaattaccgctagggacttatcaagcttagagaagtcaaaagctataattgctaaccttaccatggttccaaaagttggagaaatttacaggaactgcgagatcaaaacaattgcaccatatggagcttttgttgaaattgcaccagggcgtgagggtttatgccatatcagtgagttaagttcgagttggttggccaaggctgaggatgctttcaaagtcggcgatcgcattgatgtcaagctaattgagataaatgacaagggtcaacttcgcctaagttctcgagccttactgcctgatgcaaatcaagaatctagcagcaagcaacaagcaggtggttcaactagggagaaggcaccacagaaggataatcttgttaagatgacaacaagaagacccagacgtaagaagcaagcagaggcatctacagctgaaaacaatgcaactgcttcaccgaaggatttggcttcacaaggcagcgaaatgggaacggaatagggtggacagaagcagtgttcactttatcaaatgattgcttgtgaagctttgccaacttaaaacgtatcaccacaaaatgcagtgaacatatgacaggaactccattgcaagggtcaagacatttacccagccgtaagtgaaggattaattggctgatgttttgagtgttcatgcttgatgatatgttgaattttgacgctgccgtagaagcgaaattcattttgagtttagttgctgcttcatactgcactgtttggctgtgtttcaagtctttcagatgtacgaagctgcattctgctgattagtttcgcagattttttgtcagaagagt

SEQ ID NO: 15089 - DNA, 1534 bp, Oryza sativa
  ref <308>: DATABASE ACCESSION NUMBER: AK065623
  ref <309>: DATABASE ENTRY DATE: 2001-12-06
gacggcgtccacacgcgagtggccatgcctctcctgccggcgtcgccgccgccgctgtcgctgtctcggtcgttggctgcggcggcggcagcctctcgtcgcggccgcgccgtgacgtgcgcagctgcgaggggcgcggcttcgtcttcgtcggcctcgttcgacgcggcggggttcgaggccgagcggctccgcctcgacgcagaggcgcgggccgggatggcgtccgcggcggcggtggcgggggcggaggcggcggaccccaaggcgtggaagtgggcgatacggaagcgggtgtgggacgcgctggaggcggagggcgtcgcgcgcgacccgcgccccgtccaccaccgcatccccaacttcgatggcgccgcagccgccgcggactcgctggggagactcgacgtgttccaggatgcacaatgtgtgaaggtcaatcccgactcacctcagaagcaagttcgcttcttaacactctcaggagataaaaagttgctgactccgcaacctcggctaaggacaggatttttctcagttctggaatctcacatgatacccattggatgtattccagaagcatgtacttctgttggtgcagccaaatacgggagacctataggtctagatgaaaaaattaaagtggatttgattgtgattggatcggttgcagttgatccaagcacaggagcacgactaggaaagggcgagggatttgcagagctggaatatgggatgctgcgttatatgggatctataagcgattcaaccatgatagtaacaactgtgcatgacaaacaattagtgaatgacattccagttgagaagctgttagttcatgatgtaccagttgacattatctgcactccaactcaggtcatattcacaaataccacgatcgcgaaaccacaagggatttactgggaaaagttatctccagagaaattgggccaaatccgaattctacaggagctgaagagacgcatagagagtgaaacaggaactacacttccttgtggcccttctgagaagctaccaccaacagcgcagcgaagaagaagaaaacgaagacggtgatgattgagtgtgtacgcatgccctggtgctgacgtggacgaatgcacacggtgcgatatcgcgattggctcttgtgtcgtggcgggaggcgtaacgaatttgccgaagtacactcggttttcgtacggaagaaaagggaagagaacaaaatgacatgcgagtaagagtacctagctactagtggctctatcataaaaaacaaaatattacgaatttttgtcaactggagcggtcgacagatttttgtaatttttcattatttctttgatgtcgatactaatttcctcgttgctgtttcttttctttttccttttcttttttgaagactccttgttacacaacactgataacaacaaacgagtcgtacagtcttgggtaatagccaattttagagcttatatgaatacatgattctcaaataatacgagtcaaagaaggtataggactcaagtttcct

SEQ ID NO: 15090 - DNA, 1599 bp, Oryza sativa
  ref <308>: DATABASE ACCESSION NUMBER: AK065624
  ref <309>: DATABASE ENTRY DATE: 2001-12-06
gagttcgagggcggcggcggcggagcgggaggcggcgacgaccttgatgtggagttcgagctgcccactgacccgctgcccccgacctacgacaccgcgctcgacgtcgggcccggcggccgcccactcttcgccttcaccgacaccttcgcgtccttctcccgccgcgatgccaacgcctacgtcgatttcaccttggatgaatggaaagctatgttaccagagggattgccaaccggcatgatgaaggagtttcaggagacaagacggtgtgctgtgatggtgagagagagcttcctagacctacgggataacttccgaagaattgttgatccagctattgctgccaaacgaaaagatgccaaaagacaaattgtattagatggtccccggagctgcggtaaaagcattgcacttgcaatgcttgtccactgggcacgtactgaaggatggctagtattttatgttccacaagggaaggattggtcacatggaggattcttctatagaaacacctacaatgatctctttgatactccaatacaggctgcaaagatcttacaggatttcttgaagtacaatgaaaaccgctggcagcagttaccatgtcaaatatttgagcctattcccttgggggaaggtgctggtgttggaatgatgaagggggctgacacagtggaaatgcctgaaggttcgacactgtatgatctcattcaaactgggataacacattcgcatgcttcagttggtgttgtagttcgtttaaggaaggaattgtcacttgtgaaagatgttcccgtattatttgcaattgatcagtataatagttggtttacattcagtgagttccaggaaccggtgactgttagatcatgtcggccaattcatgcaaaagagcttacaatggtcaatgtttataggccaatgctacacaatgatatgatggtaggagcattttcacattcaactgcagttggaaaattacgacaggacctcccagatgttccatcagatgctcgtgtgatgtttccacggtacactgtaaatgaagctgagactgtctgccactattatatgaggcaaaagatcatcaagcgcgaaaatttttcagaagagaagtggaaaaagatttattatttgtcaaatggaaatggctcagagatgagatggcttgctgcctttatctgagttctgagtttctcatacccggattgcttctgccaaagaaaaaaaaccaattgagttcaagcaggctgtgcaggttttaaactgaagccatccattgttgtatacttgcagtacacatcttgtaaaactcgtaggagcaaggtgctacctaatgacggttctatgatttttttatttctaccccagtaatttgaagtgcgagcaattttggcagcagcataaaaatttcacccatgtgcctgacgacgacgttgatgtgtactgagtaggaatgtagtaggattcactcaacaagccagaactcaagtttgtgacgcagttctgcccatttatatttgatgaattttgaggtgcgttgcttagtgacgcaggatacaataagaactggctgctcttaactttctttctggt

SEQ ID NO: 15091 - DNA, 3150 bp, Oryza sativa
  ref <308>: DATABASE ACCESSION NUMBER: AK065625
  ref <309>: DATABASE ENTRY DATE: 2001-12-06
gctagccgcctccgccgcctcctcccccctcaaatccccccacctcctcgcttccccccttcctccgcccgccggagcagagttccttctccttccatccattccgttcgggaatcaggcgagcgcgtcagcatccccctcctcctcctctcgcggccgccttcgtcgcaggcatcgccgtgctctgaccggagggcacttgttctttccttcgtcagagcggaggggagcggaggagcggagccggagatccagatctgcacgggaaggtatctcccgctgttggtacagccatgaatatcactcaaatcctgctatcagctcaatctgcagatggtaaccttcgggtagtagcagaagggaacctcaagcagttccaggagcagaatcttcccaacttccttctctccttgtcagtggaactttcggataatgaaaaaccaccagagtctagacgacttgctggtattatccttaagaactccttggatgcaaaggattctgcaaaaaaggaactactgattcagcaatgggtcagcctggatccatcaatcaaacagaagataaaggagtccttgctgataacgctaggatcttcggtgcatgatgctaggcatacctcatcacaagtcattgccaaggttgcatccattgagatcccccggcgtgaatggcaagaactcattgccaaattattgggcaacatgacacaacagggtgcacctgctccactaaagcaagcaactctagaggccttagggtatgtctgtgaggagatttctcctgaacacttggagcaggatcaggtgaatgctgttctaactgctgttgtccagggaatgaaccagacagagctaagccctgaagtccgtcttgcagcagttaaagccctatataatgctcttgattttgctgagagcaactttgcaaatgaaatggaaaggaattatatcatgaaggtaatttgtgatactgctgtatcgaaggaagtggagatcaggcaggcagcctttgaatgccttgttgcaattgcttccacatattatgtacacttggatccttatatgcaaaccattttcaacctgacagctaatgctgtcaaaggagatgaggaagcagttgcacttcaagctattgagttctggagcactatttgtgatgaagagattgagctccaagaagaatatgagggatctgatgatgctaattctactgtaaattatcgcttcattgagaaggccctcccttcacttgttccgatgctgctagaaactctgttaaagcaagaggaagatcaagatcaggatgataatgtatggaacatttccatgagtggtgggacatgccttgggctcattgctagaactgttggtgatgcgattgtgcctcttgtgatgccttttgttgagggtaacatcacaaaaccagattggcattgtcgtgaggcagctacttttgcatttggttctatccttgaaggtccatctgtggagaaacttgctcccctggtacaggctgggtttgacttcctgctgaacacaacaaaagacccgaatagtcaggtaagggacaccactgcatggactcttgggagggtatttgagctcctgcattctccagccagtgcaaatccaattataacaagcgcaaaccttactcgtatcatgactgtcttgctggaaagtagtaaggatgttccaaatgtggctgagaaagtctgtggagccatatattttcttgcccaaggttatgaagacgcagagtcgatttcatctgtgcttacaccttttcttcctaatctcattgctgctctcctttctgcggcggatcgtgctgataccacccacttcaggcttcgtgcatcagcttatgaagcattgaatgagattgtgagagtcagcaacatatctgaaacgtcaggcattataggtcagttactgcaggagatcatgaggagattgaatctgacgtttgatctccatatactttcatctggtgacaaggaaaagcaaagtgatcttcaggcattactgtgtggtgtactgcaggtcatcattcagaaattgagcagctcggatgctaagtcaataattgcccagactgctgatcagttgatgtttctgtttctgcatgtttttgcttgccacagctctactgtacacgaagaagcgatgcttgccatcggtgctcttgcttatgccactggtacagattttgtgaaatacatgcctgagtttttcaagtatctggaagctggcttgcagaattatgaagagtaccaagtctgttccatctctgttggagtggtgggtgatatttgccgtgccttggaagataaaattttgcccttctgtgatgggattatgactgttcttctcaaggacctgtcaaactcgatgcttaatcgttctgtgaagcctccgattttctcatgctttggagacattgctcttgctattggtgataattttgagaaataccttccttatgctatgccaatgcttcaaggagctgccgaacttcttgctgttttggaccatacagatgaggatatggttgattatggtaaccagctcagacggggaatctttgaagcttactctggcatactccagggtataaagggtgcaaaagctcagttgatgataccctatgcaagccatctattgcagttcactgaagctgtctacaaggaccgcagcagggatgagagcgtgacaaaggctgcagttgctgtcctgggggatcttgcggacacactcggctcaagctcaaaggatctgttcaaaagcaacctcttccatgttgagttcctgagggagtgccacgatttggatgatgaagttagggacaccgcgtcatgggcccagggaatgataaaccaagcactggtttcttaagaggggattattttgttttgtcagttattggggaggtttcttttgtggctgtgccaagaccatttgccacagattgaacgaaaggataccaacatatatgtagcgtcagtcgtaggctgcttctgtgcttttgtcgtcagtctgtcaagtcagtttatgcgtcgcatttggcgtgggtggattctggcattgaatgtcttgaacagctaaacctgttaatgttaatgtattctacctgtggtgtttatcc

SEQ ID NO: 15092 - DNA, 2777 bp, Oryza sativa
  ref <308>: DATABASE ACCESSION NUMBER: AK065626
  ref <309>: DATABASE ENTRY DATE: 2001-12-06
gattagctaaaactgtgaaaactctccattttccttgcctctctctctccccacccaatcccaacccaccacctctcctctcgccgccgccgccgccgccgccgcgcgccgttctatggcctacacctcctcctccctccacctccacaagcacctcctcctccccaagaccaacccctcctcctcctactcgcggcctccgcctccgacgtgtggtgcgcgcctgggataccgttcgccgcggaggcgtcgtccgtggactgcgtggtggcgcggcaccagatggtggggagaggccgtggcggcgacgcggagaggccgcacagagagagaccgtgcctgtccaggagggtgaccgtgcaggagcagatatcgtcgtcgttcatggactcgccgccgccgccgcacctcgacgtcgcgcccttcttcggcgccgacctcctcccctccggccgcctccgccggatgcgcgggtaccgccactcccccgtcggcctcgaggaagaggtaaaaaacgtcacaggctcacggtagtagcagcagtactagtactggcacagtagcgcacactgcaacaaacgttcgttcgtttcctcgttgcccccacactgcattttgcttgcttgcacacttgtcctgagccaccgcattgcatgcatcggtagatacatttttccaacgtactcctaagtcggagatggacacggcccgcaacaagtgcgcatgctgacagcggttggtggtgcgacacgctgcctgcctgcataagattcccgtgcgtagggtagtttagcgcgtgatctgacatgcgtattaagcagctgtaacgcgtgatatagattaatagtagtagtattagaagtggagtagattgattgtctggtggtgcgcgagtgaacctggggggtggccggctggccgggtgggcgttggaagtggttgacttgcatctttcgtgcgctaaacgtgacgtgagatcgtggccttcttggaggttaactaatcggcagccttacacaggcgcgcacaataattgtataagcggttgcagttgcaagccatggcacctgcattatgcgcgctggttagcgtagtggccgtacactcgtttaggattaatgcggctgagaagggagggaacgagacagtgggatgtggccacagctttggaaagagacctctcaaccatggtcatacacttccatgaatgcttctcgttgtgtgtatacaccgtgccaactacaagtataaatgctggatactcttgctgagctgatcagaaatgttgccggtaatggtcaattgttgtctcaacggtgctagtatttcaggatgcgggcaaggagtgctggagcacacctgggaatgccaagcaatagtatggtttattctatctactgtcatgctgttctgtggtggatcgtacggttggtaggaatgggcatgctggtatggtgcgtgaatgattggttgcctccgatggcagatcgagagtcctagcagttcaccatttatgattagtgctcggctgtgctgcttgactgaactattcttttggtgcttaagggggaccaacgctccttatcatgttcctgttgcttcagtcataatcagatctagagttgtagtcattccttctggtccttctggatttcatgtgggcatgtgattggtgatgactccttaataatagctcaacatcaagatccacaaggattgtcggtcccgcactgccattgcctatcaagatatatatttgaggggatttgctttaatgtgctttggtgcctagttcagggaagtccatttccttacctataaacattttttctatctagttttacttctgtgctatacctctgttttctgacttaggttttccactgtcataagaattcatatttgattttggtgcacattccaaacagtcgtaaagaaagctactatatatttatctggtgcttcaatctaacctttctatgtaatcgtaaagaatataagagatacgtcagtgcagctgtagaagcatatttagctgcacactttgtactctacttggaagaataaccagcccgatggtcagtgattgagggttaacttgtgctaagcggtgcagttgttaatctgtgatcttcctggcagacatatacataattatgcatgttgctagctcaataagcagccttatcaaaggtagcgagttcaaatacttaatgaaactgtttttgatatggcagatcatgatgtttcagacaagagttctgttgggaggaatgagcatgtatgatcggtaccaggattggcgccttgatgttgataacatgacatacgaggagttgcttgagcttggagataaaataggttatgtcaacactggattgcgtgaggatgagatagttcgcaaccttaggaaggtcaaacacccagcctttgactcctcgttccggtattcaacagaaatggaaaagaaatgcagtatttgtcaagaagagtttgaagccaatgaagagatggggaggctggattgcggccacagctaccatgtttactgcattaagcaatggctttctcagaagaacgtttgcccagtttgcaagactgccgttaccaagacttgaagtccggactccgggcaacgacgattgtatacctgggtcaaactttcaaaacatgtttgtttgtgctctgtacagtcaattacatatgttattgtataaacacatcatccattcttttgcatttgcagatagaaatgccatattgaggcatcctttatc

SEQ ID NO: 15093 - DNA, 2705 bp, Oryza sativa
  ref <308>: DATABASE ACCESSION NUMBER: AK065627
  ref <309>: DATABASE ENTRY DATE: 2001-12-06
tacttcacgtcttcaccgccagaaaccgacggccgccgccgccgccgccgcatctgcatggccgccgccgcctctcctcctgtcccgtccaaagtcgacgcctcgtctcggcccgaccgctcccccagaccgcagagcttggaaatctcatgggattcacaagcagcgttatgcaagcgtgcagagagttgcgagttggaggcagaagtaccctctatcaatcctactttgcttccagttctcgaggatttacttatagaattatatgcaatattgcgtccaaagcctgatgactatgagcaacggcatttgatgatcgatgtcttcaacaaaatagcagaagagatatatggtaaaaagaaggggtttccagttgtggaagcatttggatcgttcacaatggatctatttacttccaaaagtgaccttgacctctctgtcaactttaatgctgattttcatagtcaatttgctcgcaaggacaagatttctgttattcggaacctcgcaaaagttctatatgctcatcagaggaatggccgttgtcatggggttttacctgttgtaactgctaaagttcctgtactgaaggttattgataagggaactggggttgagtgtgatatttcagttgagaacaaagatggcatgtcaagatcaatgatatttaaacttatttcatccattgatgaaagatttcagatactatgttatctgatgaaattctgggcaaaggcacatgatgttaattgccccagagatcgaacaatgagctcaatggcgattatctctttagttgctttccatttacagacccggcgacctccaatcttacctgcattttctgccttgttgaaagatggtccagactttccaagtattcagagaaatgtctcactagttgaggggtttgggagcagaaataaagaatcagttgccgagctttttgtgtcacttatgagtaaactactatcagtggagggtttatgggagcaagggctctgtgctagcaattttgaagggtcatggatctttaagacctgggaaagaggagttggtaacttgagtgttgaggacttcttggaccggtcacagaattttgccagagcagtaggcaaggaggagatgcagaaaatcagcgaatgcataagggtcgctgttttgaatttgaacaatttctttaggggtaaaattgatgcaccaaagctgaagaaccttttgtttgagccgcctcatcaggatgagctgatcagtaatcccagtctaaagcgtcctaagaggaaggaccacccaacgcatggcccagaaagcaacccacagcagcaaaagaaagcgaagcatattattggcccagaaagcaaccagaagcagcaaaagaaagtgaagcatactgtaaaccctggaccggccgctagtagatctgccactaatttacaccgtcctaccgcatttgtgcctcaaatacggcccatccaaccaattaatcaggtttcccacatacctcaacctttggttgaccctatgtttgcttatgggttaccaccacaacagcatctacattcagctcccctttattgtcaggggttactaggtcaacagcagggtaatttcatccacctgaatcctggaatccaaccgcagcagcaagcccaacatatgtttgtccctttactagaacagcaacctgtgatcaatggttttcacccctatgatttccatttggcccagctaattcagcataacgagaatatagcgttacaaaggaatatagcttatggaacctatccatattacaggagatgacagttgcagtatgagaatgtagctaggtaatgtttctgagataggaagttcacaccgtcgccatgtaccctggtgcaaatcaattcgttgatttgttgtaaaatttagttgtgtgttgtcatatatgtgctggggaagaaattaagtagagaggcagattttgcatagctatcaaaagttctggcaaaaccatgctgctgactctgccacctagttttgtcaccgcagattgtgagctctcatttttccttgtgcaagtgggggtaagaagaattcacgattgtcatggatcaagattgagaggtgtgctgcaaagcttgctgttgaaaattctgtcagtcatgcaagattgatggatgctgatgatgaatcacttggtgtactagcttatatataatagtaaaaatatccagcaagaccaacaagaagcaactgcattgcatcagcatgttattcctctgctaagcatccaccactgcagagcaacctcatggacaagaaatggcaacatctgcactgctgctggtgataggtatggatgagctgttccaggtttgttgggtatcagctgataaactgggactgttccaggtttgttggtatcagcaaaaactggagctgccgcccatggtaatctcaattctggtgttgctgatgaccacataacctgataagatggaaactgcatgcaactcacatagcccagaacaagatgctttccatcatcactcgtgttttgcctgatgcgatggaaatacccagacaaggtgagcttttgcacgaaaatgacatgaaaaataatatgcctcccttttccttgcttgcactgtacatacctgaagcatatgatgtaccagtacgatgggatagtgaacagtatgccgttctgttttttgccatgg

SEQ ID NO: 15094 - DNA, 2621 bp, Oryza sativa
  ref <308>: DATABASE ACCESSION NUMBER: AK065628
  ref <309>: DATABASE ENTRY DATE: 2001-12-06
gaagctaaacccacaccacctcgcccaattaaaccctcacccattctttttcttttcaacaattctctctctctctctctctctctcttccgaagggcggagcagttgatcggctccggccaccgccaatccgcgcctccgccgtcgtgactgcgcgacttcggaagcggaatctcgcgggggttcgcggcccgtcggaggccgaggcggaggcggaggcggagacggagaagggaggctgggaggcttcgtcttcgcgcctcctcggatccaatctgtttatatcaattccgatgctgtgctgctgcgccattggagtagtagcagagacgatcctgccgcctctgcacgattccttcggttcggggttgaacgcattgggggccaagaagggattataggcgcattggtgtcaagcggtggcccctagggtttccttgttgataggagaccctagggtttgttttttcatcaatgggtcacatccactaattcatagtgcaaatagctgcttctctagtgctggtggctgtgcacttgtgcttgttgcatcagtagctttggctgccttggctgtgttgcttgagatcagcaaagatgtcgtcagccggtatagccacactgagccccctgctggaccagttttgttttgcgccccatggcgagccccggttgcagcagctggattctattgtcatttttcttgccatgccaggggtggcacccatgccaatgcgtgtcctgcactcagactctgttgcctcggtcaagctccgcatccagcagttcaagggctttgtcactaccaagcagcggctggtgttcagtgggcatgagctgtcactaaacaactcccatgtcagggattatggacttaccgatggaaatgtgcttcatcttgtcgtgcggttggctgacctccgtgcgataagcattgagactgccaatgggaagaaatttcagttccaggtggagagttgctgcaatgttgggtatctcaaggacaagctctcagctgagagtggacagcaacttgggagtctcaaggaccaaaggcttgtgtttgacggtgaagagcttgaggataaccaattgattgcagatattagcaagaagggtgctgcagttatccacttgttcatccgcaggccagcaaaggttcagacacagcagggtgataaggaaactgttgttacagttgttactcccaaagacaatgataacctccaaacagatgctttgaaccttgcgaaaccagctaagggtaaacctgctccagttgagccaatcattgctaatggaaaggtgaaattgtctcctgctgtgatggaaatgatctactcaacaatttctggtatagaaaacgggtaccttcccgtgatgtcaacagagggttcagggggagtctatttcatgaaggactcttcaggtgaaagcaatgttgcagtattcaagcctattgatgaggaaccaatggcaaagaataatcccaggggccttcctttgtcaactgatggtgaggggttgaaaaggggaacgcgagtaggggaaggtgcattaagggaggttgcagcatatattcttgaccatccagtttatggatgtaaatcgtgtgatgttcctggattttctggtgtaccacccacagcgttggtccgttgtttccatatggggaagggatctaataaggttggatcattgcagctgtttgtagataacaatggcagttgtgaggatatgggccctcgagctttcccagttaaagaggttcagaagattgccatactggatattaggttggcaaatgctgatcgtcatgctgggaacatattagtgtgccaagatggagaagatcacttgaagttgattccaattgatcatgggtactgcctgccagagaagtttgaagattgtacctttgagtggctctactggccccaagcccgcgaacccttcggtccagaaaccgcagcatacattggatcactagatgctgacaaagacattgcgcttctcaagttccacgggtgggcgctatctccccagtgtgcccgagttctgcgcatcagcacaatgcttttgaagaagggggcagagagaggcctaacgccttatgacatcggcagcatcttatgcaggcaaacagtcaaaaaagaatctgaaatcgaggccatcatagaggaagcagaggatgccatccttccaggaactagtgaggagacattcttggagaccatctcggagatcatggactttcaccttgataagcttgctgtgaagttaaagaagttctgaataactgatcgagttactcgaattgtgcccggttgtaagtatgtatcgtagtcactaaatgaaataacgagtttggccgttgaactcattaccgtggaacattttgtgaatataacaaggatcatccacttttttacctgtacttgtaatgtagactgtagttgcatcgagtgttctttctgcttggtaatttcagcaaaacctagcacctgagaagcttgtttggatcattgtcaatgtaaacctgtttaaagtgttggcattgccaaatcctgagaacaatgtttggatcattgtcaatgtaaacctgatgaaaatgtttggtg

SEQ ID NO: 15095 - DNA, 1550 bp, Oryza sativa
  ref <308>: DATABASE ACCESSION NUMBER: AK065629
  ref <309>: DATABASE ENTRY DATE: 2001-12-06
cctccacttttcttccatccatccatccatccatttgattcaagaaccccaatccaaacccccctcaactcgccccaaaatccctaactcccgaagaaatcgccgagaaatatctctcatcttgccgccggatcgagcccgattccctgcaccgagagagaggtgaggcgatccggatctatctgatctcctcgttcgtcgccattgttgcaagtgaagtgaagtgggagcagggatcatccatggcgggggtgggggtggaggaggaggaggcgttcgagcacacgctgctggtggtgcgggaggtgtcggtgtacaagatcccgccgcggacgacgagcggcgggtacaagtgcggtgagtggctgcagtccgacaggatctggtcggggcggctccgcgtggtgtcgtgcggcgaccgctgcgagatccgcctcgaggacccggcctccggcgacctcttcgccgcctgcttcgtcctcccaggccagcgcgaggccgccgtcgagaccgtgctcgactcctcccgatacttcgtgctccggatcgaggatggcagggggaagcacgccttcgtcgggctcgggttcggcgagcggaacgaggcgttcgacttcaacgtcgcgctgtcggatcacgagaagtacgtcaagagggagcacgagaaggaggcggccgacggcggcgccggcggcggcgaggagaacgacgacgggcagattgacatccacccggcggtcaatcgccggctcaaggaaggtgaaaccatcaggataaatgtaaaaaataagccatcaactggaagtggtatgctttcatcagctggtttatctggaggggccagtgcaaaacccaaggcaagcatgctccttgcgccgccaccgggttcagctgggaagcttcgatctcctcttccacctccaccaaatgaccctgctgccgcaaggatgaattctggctctaatgctggaatcagggctccaaaagaacccgccaagagaaatagcgacgccttttcagatctttctgctatgaagcaaaacctaccgtcatcgacagagtcggcgcaaacaaaaagcacaggtgctggttgggcagcattttgacaatgagtctgccatctgctgttgataaccttttctcaggaaaaggaaaagaaaattgtgtaactgaaaaaaaagaaatcccttggaggaagcctgtatccgctcgaatcacatggtgataatgacttgctagcaaccacttggtactcgaaaaaataaaagatttacaggatgatgttgttattcatcgtgcgatgccacatggattcctggagctttggaagtctgaaaaatatgagtatggctttccttgtttgtcatatttgtgttgtcagatttttcgcatatgaaacaagaatcatactgacctcattgtgttgtacccttaaagatttgagaacactgttatgaatgcggcagcttatgtcactgatgccaaattttctgtaaaacacgagcactgcattcttgtctttgtgcattaatcaaaaggttttgagttgt

SEQ ID NO: 15096 - DNA, 2231 bp, Oryza sativa
  ref <308>: DATABASE ACCESSION NUMBER: AK065630
  ref <309>: DATABASE ENTRY DATE: 2001-12-06
ggtcttcactctcccaactctctccccccaatcagaaagaggataaggagctccgcctcggggagggagggaaacccgaatcaaactcgcgcgccgcgaagcagcagccgcagcaatggcgggcgtcgccgccctcttcgcctccccggccttccccttcccatccacctcctccgtctcctcctgctcctgccgcttccgccccgccgtcgcccgcgccccgcgccaccagcctcccggccgccgcgtgacccggcgcttcgacgaggtggagggggtgtcgaagaggcggcggggcattggcggcggcggcggagggggctcgcaggcgtcgtcgtcgtcgtcgcgtaaggacagagggctcgccgttgacttcaaggagtcgcaggtctcagatttcgaggaccttgaagaggacaaattccttaatgctgtagttaaggtctattgcactcatattgcacctgattatgggcttccttggcagaagcaaaggcaacatgcaagcacagggagtgcctttatgattggtgatggcaaactattgacaaatgcacattgtgttgagcatgacacccaggtcaaagtaaagagaaggggagatgacaaaaaatatattgccaaggttctagcaaggggtattgagtgtgaccttgcattgctgtctgttgagaatgaggaattctggcgaggaacagagccacttcaactgggtcgcttgccgtgccttcaggattcagtaactgttgtgggatatcctcttggtggagacacgatatctgtaacagaaggtgttgtttcacgcatcgaggtcactccatatgcacatggaacttcagatcttcttggcattcaaatcgatgcagcaataaatcctggaaacagtggtggaccagcctttaatgaccatggggaatgcatcggtgtggcatttcaggtgttcaggtcagatgaagctgaaaatattggatatgtaattccaactacagttgtatcccatttcttgaacgactatcagaagaatggaaaatatacaggatttccttgcctgggtgttctccttcaaaaattggaaaaccctgcgttgcgtgaaagcttaaaagtaccttcaagtgagggtgttcttgtccgccgggttgagcctactgctcctgcaagcaaagttttgcggaagggagatgtgataacaagttttgatggcgtcgcggttggatgtgagggaactgtaccattccgctccacagagcgaattgctttccgctacctcacaagccaaaagtatgcaggtgatgttgcccaactaggtatcattcgggcaggcaacaccatgaaagtacagaccgttttgcagccaagaaaacatttagtgccgttccatgttgaaggagggcagccttcctatctgatagttgctggccttgtcttcacacctttgacagaaccatttatagaggaggagtgcgaagaaactctagggttgaaattgctggcaaaggcacgctattctctatcaacatttgaaggggagcaaatcgttattgtatcacaggttttggcacacgaggttaacattggctatgaacacatgggcaatcaacaagtcattaagctaaatggaaccgtggtaaagaatattcaccatcttgcccaccttgttgacaactgcaaagacaagttcttgacgttcgaattcgaagacgacttcctagttgttttggatcgggaagaagcgactaccgcatcatcagatatcctaaaggaacatgcaattccctctgtaaggtcatctgatctatcagagccatatgtcgacacagagcaagaaatccaaaaaccaaacgatgattttggtgacagccctgtcacaaactatgaaatgggagttgactgtctcctctgggcatgaacagccaaggatggaatttgaatttcagttcaaacagtgacaatgccggtgaatttcatgcatctggatggcaggaaagagcatttccccaccatgttgaaatccactccatagaggcgaagccggagtcatgtttgttagtgtaggaagttcagagttatgttgtaccttagaaaaccacacaaatgcttgattcatcatcaatttttttaggggatgggactatgggactgtgggagattgggggagggctgtagaatttggcagggtgtaatcctgtaattttttgggcatgcaataaatcgtccagaaattttgttgcttt

SEQ ID NO: 15097 - DNA, 2349 bp, Oryza sativa
  ref <308>: DATABASE ACCESSION NUMBER: AK065631
  ref <309>: DATABASE ENTRY DATE: 2001-12-06
gggagattcatttgcatcagccgaaggcaagaatcacacaagactcggttggacgatttgcagcaaatagtagcatggggcaactccataatttgatgcttctgctgccgtgcctgatcttctctacgctactgcgcacagaggcgatgagtgtagctccagtgaaagtgagcaccacacccatcttccccacaatcccaagaggtcagacgaacaaggacttccaggtgctactgcgcgtcgaggcgccgccggcggccgatctcaacagccatgtccccttagacgtagtcgcggtgcttgatgtcagcggcagcatgaatgatccggtggcggcggcgtcgccgaagagcaatctgcaggggtcgaggttggatgtgctcaaggcgtccatgaagtttgtcatcaggaagcttgctgatggtgatcgcctctccatcgtggcgtttaacgatggacccgtcaaggaatatagctccggcttgttggatgtttccggcgatggccggagcatcgccggaaaaaagattgaccggcttcaggcccgtggtggcactgcgcttatgccagccctggaggaggccgtcaagatccttgatgagcggcaaggcagcagccggaaccacgtagggttcatcctcctcctcaccgacggcgacgacacgaccggattccggtggacccgcgacgccatccatggcgccgtcttcaagtaccccgtccacaccttcggcctgggcgcgtcccacgacccggaggcgctgctccacatcgcgcaaggatcgcgcggcacctactccttcgtcgacgacgacaacctcgccaacatcgccggcgccctcgccgtgtgccttggcgggctcaagaccgtcgccgccgtcgacacgcgcgtcagcctcaaggccgccgagctaagcggcggcggcgcgcggatagtgcgcgtagactccggcggctacgagagcagcgttgcttgcggcggggcctccggtgaggtcgtcgtcggcgtgctctacaccggcgaggtgaagaacttcgtcgtccacctccacgtgccggctgcttcgtcgacgaccttgaccttctcgtcggtggagtgcggcggctactacgacgccgccacggtctgcgaccactgccatcaccgtcaccagcagcagctgctcgccgtcggctactcgtacagccacgctccgggcgccgcctctgcagcggtgtccgtcgaagggcacggcgtgttcgtcgagaggcccgaggtggcggccgtcttcgtctccgtcgacggcgtcggcgtcggcggcggccgacagcgacaaatccccctcccctcccccgtcgtgatgcagcacatggtccggttcgagctgctggagctcgtcgccggcttcgcggaagccgagatggcgtcgaagccggcggcgacgacgacgcagccgcgcgccgccgacgtgctgcagggcaagtgggaggagttccggcgagcccggcagttctggggcggcgtcgagctggacggcgtggagaaggaggtggacgccatggtggccagcctcaggagcgggctagcctacgtcagctcgttggtgtcgagccaccagatgcagcgcgccaccgccatgggctcgccggagaaggtggtggccgagttcatgactccggcgatggtgatcattgtggaggaggcgcggaagctaccgccaccaccgccgccgccgccggcagctgctgaggcggcgagagagaggcccagcggctgcgatggcggcgacgatatccatcacgtgatccggcagcggcttgagctgtggtcaaaggtgagacgcgaggtgccgctcatgtaccagccgtcgccggagcaggaagacgtccagctgaccgccgtgttccgggaggcgtcgctggaggccatcgaccgagcaatgcaccacgacatctacctggccgttgtgcacgtgagcaaccagaggcgatgctagattgctgtccacggcgatccggcgccagaagtggaattagccgatgaagcagcttgcaagcataatgcttgttagctatataattaatcttataagtattttgccatatgcatgtctattgcgttgatttgcatgtattgaacaagtgtatgagctttgcctatgttgctagctcgtagagatcaatcgatctgtgtgtatgcatcacgagattatgtactggagagcagagagctagtaatatccggcagtcgtgtgagttgtgccgttgccgttggcggcaagagcaagctggcggatctgctcattttccattactgtatccattttccttctcaataaataatattatctcgtgatcgattatcctacc

SEQ ID NO: 15098 - DNA, 2023 bp, Oryza sativa
  ref <308>: DATABASE ACCESSION NUMBER: AK065632
  ref <309>: DATABASE ENTRY DATE: 2001-12-06
gacacgctgctctcgctgccagtccgccacccaccgccgcccaccgccgagcggcctccccgcgcggcgaggccaaaccctcccatgtccaccccggccggcgtggcgccccgccgctcctccaggctcgcctccagcgctcctccgctcggagccggccagccttcctcctccccacttcctcggcgccgccgccgccgcgcttcgccgtctggctgcgccagagaggttgacaactcgcctcctccggtggtcatcttagatgacaacgaaatggagcagcatgttgaggcagaagaaatgaagaagcaaggggaagagagtgtggaggcaaatgaagcagaggagaaggacaaggatgcggaggtcttagaggaactacctgattggcttcctgatggttggatcatggaggtacgttgtggcgacaacggcaacatctaccggtattacacttccccggtgtcaggatacacattctctacaaagatggagacactacattatcttttttcggagatggatgagcgtgtgctggagtctcaggcgtgcgccgatgacaatgagcttcatagaatgcacacatggcttccagatgggtgggcaattgaagtcagagctgggggtaagaagatggaaaaaatgtacaagttctatgttcatctgcctactggaatgcggttcttgtcgaaagaaaatgtactgctctattctaatgaggggaagatttccagatgtgatgtaaagggtttgtgtgatacaagctctgaagataatattcttgcaatggtagaatttaatccagatgggcttccagaaggatgggtgaaggaaataatatttagaaagtgcaatgatggaattaggaaagacccgtattatactgatcctgttagtcgtcatgtattccgcacactcaagtctgtaatcaactaccttgaaactggacaaatcactaaacatgcctatattccgaggagaagcgttactgatatgtactcttttgacaggtgcacagatctgcctcaaagtatgctgaaaagactgaaaatacaaggaaaagcaaagaaaaagtctgtaggagcatcggtcaaaggcaagaaactatctaatggcctggcatcaaataactgtatgtcttctgggttggatcctgaaatcgggccagaagaaaggaaacttggaactgttaaatccataaccaaagaagcagttaactcagatactatcaagcgatcaagaggaaggccaccgaaaatcttgatgccaactattgaaagcaccaaacctgagattgcattagtcacgtcagaggctatcaagagatcaagagctgaaggtgtcaattcttgcttaattcatctctctgaaccaaatgaaaagatggtcaaagccaccagtgcagtagaacctgccagttcaaataatgccaaacgacatggagggagcccgcaaaaaaaatttaagcacattactgacatcactttagattgtgccaagagttcaaataaggagtcagagcatattgttacagcaaagaaattgggtattggaggtggagaacaagtggcaaacgaaaatacattggagcacactaacatgaaagagcaccttggggtaatccaggactacacaagcaacaggaagaaagataaattgaacttgattactgatccagatctgcatgagcataaaaacggcaagtttactgaaaaactagcgtgcactgcagttcataaattttatatgaggagaagtagcaatcatacagtggcattgaaaaaaggataatgaaaacaagatactcttaccgagtttagagcccttctccaaacataattggagcagaataaagaacacttcaattccctcgtaagtaatgaaatagctgaatgcgattgtaccttgggcaatatgaagcaagtgtagtttccattgaaaatgtgcccttttatttggtacattcttgagagaataatgcgatatcaaacgactaatttgattgtctatttggatgtttccc

SEQ ID NO: 15099 - DNA, 4635 bp, Oryza sativa
  ref <308>: DATABASE ACCESSION NUMBER: AK065633
  ref <309>: DATABASE ENTRY DATE: 2001-12-06
gaatggccgcgctcccgcccacgcctcggcctcgggtcctcgcggcggcgccgtgccacgtgccttcgcgccgccgccgccgcgtgtgcgatgggctatgctcggcggcggcggcggataatggctgcgccgagtcaccggatgtcgttctcgagtgcaagcggctgaacaggctcgtgaagtccgggaggctggcggatgctctcgacctgttcgaccgaatgccgaggaagaacgtcgtcgcgtggacctcggtcatgtccgggtacacgcgcaacgggcgccccgaggcggccctagcgatgttcgcggacatggtggagtccggcgtcgcgccgaacgacttcgcgtgcaacgcggcgctggtggcgtgcgccgaccttggcgcgctccgcgccggggagcaggtgcattcgctcgccgttcgggcggggttcgccggcgacgcgtggattgggagctgcttgatcgagatgtactcgcggtgtggctccttgccggcggccaaggaagtgttcgaccggatggattcacctgacgtggttgggtacacttcgctcatctcggcattctgccggaacggcgagtttgagctagcggcggaggctttgatccagatgttgaagcagggattgaagccaaatgagcacacaatgacaaccattttgacggcatgcccaagggttctcggtcagcagatacatgggtatttgatcaagaaaattggtttgcggtcgcagagcgtctactcgtcgactgcactgatcgatttctattcgagaaacggtgagttcaaactggcaaaggcggtttttgacagtctccactgcaagaacgtggtttcatggtgctccatgatgcagctatacatcagagatggaaggctggaagaggcattgcaagtgttcggtgatatgatttcagagggtgttgatcctaacgagtttgcactatcaattgttcttggagcttgtggatccattggtctggggcgtcaactgcactgctcagcaatcaagcacgatttaatcacagatatccgggtgtcgaatgctctactgtcaatgtatggtagaactggtcttgtcgaagaactggaggccatgctcaacaagattgaaaatcctgatcttgttagctggaccactgctatttctgcaaacttccaaaatggttttggtgagaaggccatagcattgctttgtcagatgcattcagaaggattcacaccaaatggctacgccttctccagtgtgctgagttcttgcgcagacgtggcatctctggatcaaggaatgcagttccattgcctggctctgaaactgggatgtgactccgaaatctgcaccggaaacgcactgatcaacatgtactccaagtgtggtcagatgggctctgcaaggcttgcatttgatgtcatgcatactcatgatgttacatcttggaactcgctgattcatggccacgcacagcacggtgatgcaaacaaggcactggaggtattcagcaagatgcgttccaatggcatcaagccagatgattcgacatttttgggagtcttaatgggttgcaatcactctggtatggtagaggaaggagagctgttcttcagactgatgatcgatcagtacagcttcacgccagcaccttctcactacgcttgcatgatcgacatgctgggccgaaacggcagattcgacgaggcactgcgcatgatcaatgacatgcccttcgagcctgatgccctgatatggaagacgctgctggcatcttgcaagctgcacaggaatctggacatagggaagcttgctgcagacaggctgatggagctttcagacagagactccgcgagctacgtgctgatgtcgaacatctacgccatgcacggagaatgggaggacgccaggaaggtgaggaggaggatggacgagaccggcgtcaagaaggacgccggctgcagctggattgagatcaacaacgaggtgcatacgtttgcttcaagagacatgtctcacccgaactctgattccatatatcagatgctaggagagcttgttgccgtgatgcaagattttgacgaacttgaaccgtttgatgtacatatatgctgatttagatgccactccagatagtatcaaagaaagtaaagtttctttcttttcggatcaagaaagttttatgtgctgtgtttgctaaataaaagatgtataccaattttatttaggtaaggggagggcgtatgatcaaattgcccttgtgtatatatcaaagcccaaaggtttcctcttttggcaggcggcaccactcctcctcatcttcctccattaatagcggcggcggcaggaggacgcacgttgccgcggtgccgccttcacttcttccccaacaccaacagatcgagaatcatggttttccaatgttgctttactgccatgggaaagatgcggaaatctaagaggacggctgatataatctcacaagaagctccaagaacgaaggagagataagcagtactaagtcattgatctcaggcgacttaaattcgggctctaatcaagatgtctgggctattctcagtgttgaagttgcatcaaatttgtctaaaagcgttgtctcactcaccttgtctgatggaaacacactgatatatgcatgctcgggcatagctatcgagtgccaggaggggtctggtacaattttcctgacctcggctagtttggtaacagctttctatgatactgaagaagtctatgataacttaaagattgaagtgcgccatgaaggcaatgaagtgctcaagggttatttggcaaaatatgatttagacaagaactttgctgttgtctacaccatggaatctcttgatgttcatattgtacttaccgaaaattcgagggataggtatatcaacaaaaagttagtagctgtagggcgtgacaaacatggcgtattaatggccaaaagtgtgatggtggctggttgtcgtgattcaaacagatctgaagatagcaaagaaattaggttgatctctgaggactgggaaggtggaccgctttttgattttgatgggaaatttgttggcatgaatcgtttttcggttatggatagaacatctgtcctgtcatgggtctcaattctcattattttgaagcattatttgccatccctgcaaaacaggattcttaaacggttacaaaatgtcaaaagagtcagggatggagagagacccacaggtgagctacctgactatcatcaagaaggtgagcacagtgccatagtgccataccttggcaccaccaaacatgcatgcaaattttggttgtatgtaatggtatctatttttaatattagcttttacatttgaactttctaattttacatgaacttatcgcatttagttagtgtatctcagcgctaatcacttggccttgtgcagcaccagtacatagatgtggtctcaacacagaacagtttgggtatctaaactccatgggttatcccaagccgccaataaatgtgttagacgatggtatgattttggctaattcttttgaagagacttttggagatttatgtggtgaagatctttggagtgaaatcaataaaaaggttccttgtgacatacatcaaaatgttgttgcacttgcttcattcaaaggaaaaaggaggtcttttgcatgcacggtttctttattgaatggaagggatgtacaactattctgacatctgcgagcttggttagagagtctgatgatggaaacaagattgatgaaaacttgaggattgaagtgttgcttccaaacaaacaacttagagaaggaacactacagcattatagtttacactacaatgttgctctagtgagtgttaaggacaaggatttccatgctcgtccagcaaatattcagcttgatcataatcatggacctggagtagcagccgtagggcgttgcttcgaatcaggcaaattaatggctgcacggacggatgttgttgattggtcgggcacacttgattgtgagatgttccttatacgttcctcatgcaaaatcactaagggattggaggacctcttgttgacttagaagggaaagttattggcatgaacttctatgataagaagataggaaccccttgcctgccatggaatgtgattctcatggttctggcatgttttgagaaagaaaagtattcgtagatttcttttctttttttttggttatttaagtgcttgcaataaaatctattcgattgtgtgtttgacagtagcggtggtgaagttggcagtggtagtgatccatgtggtgcgcctggctggaaaatccctcgagatgagagtgtcaggctaaacaggtggcctgtgcccctgccatattggcgtcctcatgacgatgtggatgaacaagaacccccagaaggctgtgagcacatctacacatacataaatggtgaaagatattgttacaggtagaatctgcttcttctactctgtctgttggatctactacgacgccgtttgctagcggagcttgctgccgtgattcaagattttgatgagcttgaactgtttgatgtacatatgcagatttagacgccagatgtaatatatattactaaagaaagtttattcgaacc

SEQ ID NO: 15100 - DNA, 1945 bp, Oryza sativa
  ref <308>: DATABASE ACCESSION NUMBER: AK065634
  ref <309>: DATABASE ENTRY DATE: 2001-12-06
gattggagaggctaaaacggaagagcacactagtggtttcacttgtgtcacttgcactgactaattgtacgagctcgccacgtactgtctcaccagctagcatggcgacatcgccgttgccacgttgggcggcgacgccgagcccgtcgcgcccgctgtggcgttcatccggcggcggtggcgccatcgtcagtaaactcctgcgttccccattcaccaccgtgctcgaggctgtccgcgggcgtgctgcccccgacgacacgccgcctcctgtacaagctccaccggcgccggagcacaactgcgccggcgcgttcgacggtatcgccgtcgtcgctggagatgggagggaggagcggctcgacgggggcgtgttcctgacgtgggaggacgtgtgggtgacggcggtggacagcggggggaaggccgccaccatcctcaacggcgtcagcggcagcgcgcgccccggcgaggtgttggccatcatgggcccctccggctgcggcaagactacgctgctcgacacccttgccggaagattggattcaaacttgaagatgaaagggcaaattctggttaacggtcgatgtcagcaacttgcatttggaacctcggagagtgaagacagactccggtgcatgccagctgttgcagatgaagcaatagacattttggtgaattcatacaaatcctccaacacttcggaagtcgcaaaacaggacatgcgtcacataaacgagatggatcgggtgacgattggaagaaaccgagctggttttattaccaagacacttgtccttaccagacgttcatttgttaacatgtatagagatattggatactattggttgcggatggccatttatatttccataagtgcttgccttggcaccatattttacaatatgggctatggatccgattcaattcgagctaggtcatcaatgttaatgtttattagcaccatgctaaccttaatggcaattggagggttcccatccttcgtggaggatatgaagatctttagcagggaaaggctaaatggacattatggtgtaaccacatttgtcatctccaatacattgtcatccacaccatatcttcttcttattgccataatacctggtgcaattgcgtattatcttagtggcttacaaaggcaaattgaacattttgtctattttacgttagtactttgttcatgcacaatgctagtggaaggcctgatgatgatcgtagcaaccatcgtaccagatttcctaatggggatcataacaggtgctggtatacaaggtattatgatgctcacaagtggattcttccaacttcctaatagccttccaaacatagtatggaagtacccaatgtactacatctcctttcacaagtatgcactgcaggggttttacaagaatgagttcttaggtttagtactcaaccttgaaggacccataacagttagtggcgagaaagttattgctgagttatttcaagtggaaacaggtcattcaaaatgggtagatcttgcagtactttgtggtatgattatgacctatagactattgtttgtagtgattatcaaggttcttgatatagtcaagcccatacttaaggggatgacatttaggtgcaacactaaatgcattcatggcatagagaacctttgcgccccctcgtgattcttgttggaaaatagtatatctaatattgtaatattgcttggtgcacttatatacagcgagaaaaaaatgtagtattgtatttatattactcaatataagtatgtgactatattgtgaacagattcactactggagaaacgctttttagtcccggttaggaaccccctatagtaccggttttctaaccgggactacgaatccgggactaaaagatgtccagttttagtcccggttgaaataaagagactaaatctttagtccct

SEQ ID NO: 15101 - DNA, 1502 bp, Oryza sativa
  ref <308>: DATABASE ACCESSION NUMBER: AK065635
  ref <309>: DATABASE ENTRY DATE: 2001-12-06
gagtattaaggctccttctgtgtcaaagaatcagccatcaaaccattttctcattgcagacatctctgcctgctgcctcctcttcttggtgttctgggtcagacagagaaagctgagttgttctttaggaattgggtattattttttttgaaagcgcggaattgggtattatgggtaactgctggtttaaagggaatccatactttaacagggtttcttccaatgcaacaaaatcagaatcacctaaaatgcagagcccatctgagagaaaagaaaaggatgacagcatgctgccgtcgaacgcgaaagaggtggaggaactgagaagggagtcggctcggaaccctctgatagcattcacatttgaggagctcaagaggataacaaaaaatttcaggcaggattcattactagggggaggtggatttggtagagtctacaaaggatacatcaccagtgatcttcgcgaaggattaacaatagaggagccactgcgagtcgcagtgaaggtccatgatggagacaatagtttccaggggcatagagagtggctggctgaggtcatatttcttgggcagctctctcacccaaatttagtgaagttgatcgggtattgttgtgaagatgaccacagagtacttgtttatgagttcatgcccctgggaagtgtggaatcacacctgttttcgagggtaatggtaccactcccatggttcaccagaatgaaaattgcactaggtgcagcaaaaggacttgcttttcttcatgaagctgagaagccagtcatttatcgggatttcaagacatcaaatatattacttgatgaggaatacaatgcgaagctctctgactttgggctcgcaaaagatggaccagtcggcgacaaatcacatgtttcaacacgaatcatgggaacctacggttatgcagccccggagtacatcatgacagggcatctgacagcgatgagcgacgtatacagctacggggtcgtgctccttgagctcttgacagggcgcaaatcattggacaagtccaggccagtcagggagcagacattggcagactgggcattcccaatgctgatacagaagaagaaggttcttggcatagtagaccccaggctcgccgaggactacccggtgaaggcagtccagaagacggcgatgctggcctaccattgcctcaaccgcaaccccaaggctaggccgttgatgcgcgacattgtcgccaccttggagcctcttcagcagatggaggaggatcccagtatcagtttggttagtggcactgaagtgtgagagcttcatcttgttcagacttcagagaaacaaagatgccatatcaccatatgtttgatcatagtagctaattgagtgcttggtctgtatatagtaggtaattgagttttgctaagaaggtatatgtaatatagtatcattttaggtttgtttgtgtatctaatgtttgacatgggaagtggttttttacccttcgagggg

SEQ ID NO: 15102 - DNA, 1647 bp, Oryza sativa
  ref <308>: DATABASE ACCESSION NUMBER: AK065636
  ref <309>: DATABASE ENTRY DATE: 2001-12-06
gataccaaacggcaatacgcgcctctctctctctctctctctctctctctctcccctccttcccttccctctctctctctcctcaattccccattccaccaacgcacgcaccaacccgccattccctcccaaaaccaaatcccccgtcgacgcgagaggaatccaatcctccgaatcgtctcccaatcccgcgcgccggtgagctcccgttccgaccccgcctcagttttttttttcattttttttgcgctttatttggtgatccagcgcgcgagcgagcgagcgagcgaggcgatgatttttggtgttttttttggatggggagcatggagttcatggatgggatcgacggcgttcgtcgtcgcgtctagtctcgtggtggttcggcgaatgcggttgcggctgctgtttgtttgttgcgggtggtctcgctggacgcggaggcgtgcgcatgacgctatggtgttttggtgtgtgggcatctggttccgtgacgcggcgatgctgctgctgctgggttggggtgaccattcaatttgtgtggctatcggattctgcgttttttttttttttgggttgtgtatgcgttgcttcatcatgcaggcatgcggttgtttactgcctccaatcccatggtcgatttcatgattccggtacttgttagtgtcgtgggattgtgcatacatgtgattttgaggtgcgttgcggtggaaggcagtgatcatgatttataaggtgtcatgcgcctgtggagtggaagtagtttttgtcaattcggtcgtaatatgaatagttcggtgtaacatggttgagaaatttcagagggttgtgtatacagtgcctctggagttgattctgctgatttgtttctggggtgaattgccccggttatatgtgcttcatgcgtctctgatgattggtttggttgtgttgtggtttgatcatgaaccctgtttgcttcttttttgggtgatgagttcagcatgcagttctggggtgacttatcctgtaactgtgattgaagcaattatttctgtcacttttcagtgattactccatgttgttgctatgagctcaaattgaatgcatagttggttgtagaagcgcggatgcttttcgcatctattacgatgcaatcagaacatattcttattgtttgctcacttcttttctttttttgtttttgttttggcaacgttcccattcctaattatttgatggcttctaactgttcaaaattccatcaccctctatgtcaaccctgaacaaaatgcagattggcacattggatttccttttgctttaaggaagttatcctattgcatataattttcatatttgttgctcccagtgtagatcgacagatacaattgctaattagtacaaaatggctataagcttcaaatattgggatgactgcttggatccagaggatatgcaattaatgtgggctgatcctcatgtaagtaaagagtggattgatgctggggaagggccgggacagaaggttcacctgtcacgggatcctgatggtgaggcatatctcacacaaactgaaatgatggtgagtgatcagctgtagccagtgtatcttgacatctaaaacctgcattagtggcaatcaaaccaaagttcatgtcattatct

SEQ ID NO: 15103 - DNA, 3638 bp, Oryza sativa
  ref <308>: DATABASE ACCESSION NUMBER: AK065637
  ref <309>: DATABASE ENTRY DATE: 2001-12-06
gggtttacgcctcgccttcggtggagtacatcgccgccgtcctcgccgtgctcagatgcggggaggcgttcctgccgctggacccatcgtggccagaggagaggattcgatgggccacctcgtcgtcgaatgcggtgctcgttgtatcatcagggggtttgggagcagctcatgtgtttgcgagcagctcttgctctgttattcacatggacgacgacttatggcaagtgtttgaggatgaaaagggtgggattggtcgagatgagcttgcttggccgtgcaagtacaagaagccgagggagttctgctacgtgatgttcacatctggttccactggaaaacccaagggtgtttgtggaacagagaaaggtcttctgaaccgctttttgtggatgcaaagatggaaacctctatgttcagatgacctgttattgtttaagacatctgtcagctttgtagaccatctgcaggagttcctttctgctgtgttgacttgcacaacacttgtcattcctcctcctaatgattggagagctaatccagcatccttggccaacttgattaaggcatatggtatatcaaggatgaatttggttccatcattgatggagataatactaccttccctggagaaaaatctttcatggggacataacccgcttaagatgctaatatttagtggcgagaatctatccatattgttgtggaagagagtgcatgaaattctgccagagactactattgtaaatctgtatggaacgacagaggtttctggtgactgtacattttttgattgcacagatctgcctatacttttaaagcgagaagaattaactagtgtaccaattggatttcctatttcaaattgtgaagtttgtattgcaaccgacgccgaggtagcagatgaaggagaaatgcatgtcactggagcatgtttatttgctggatatttagaagagtccatggcgagtaatcacactgaagacaatggaagttcaacatactacagaaccggtgactttgctcgacgcttaaagagtggtgaatttattttccttgggagaaaggaccgtactgtaaaaatttatgggcagcgtttttcactgcaggaagtggaatctaccttaaatgaacatccagatgtcagtgctgctgctgttacttttcaaaataatgaatttctggattttagggcatacctggtgcttaagagtagcgccgcatctgtggaagactgtcagcggcgtaaaagatacaaatcttttgaagttatcatgccatcaattcgaagttggctcataatgaagcttccaccagccatgattccaaggtttttccttcccatggaatcattacctctgacttcttcaggaaagattgattatatgaagctatcaagcttgaagtgtgccttggagtcctgtgaaactgaaactgaaagaattacagttaatccacatttgcaagttatcaaaaaggcattttctgatgccttacttgttgatgaagtttccgagtttgatgatttcttcaccttgggtggtaattcaatttctgctgcgcacgtagcccacaagctggagattgacatgaggatgctttatatatattccaccccttctaagctcttggatgctttatttacaaagcacggttgtttactttcttctagtcatgagcctcaccctaagaagggattggacatatcttccagcatacatagctcatttaatccgatcgctacaagtgtagatgataactttcctgaagtaaaagcacatataaatggagatggagagtgtgcacatgatgccatttcagggaattatgcaaatgaagtagatggccagcttaacagaaatgtgcctttatctaatgatagataccagacaaaatccctcttgttggatacatgctcaaatgacagaaacagtgtcgatgtcagtccatggatcttgaatttttgtttagtaaagaaatggtctattggacgttgcaatagatttatgcatggatacgaagataagctgcaaattgaagatgtttgctcatatgttccctacaacaaaagaggttatcttcaggccctttggaacattcctctcggttcatgtgttgacgcgtcacctttgcttgtctccaacaatggcatgctgagtatatttatcgggtcccattcacacagatttctctgcattgatggctgtagtggttctgtgaggtggagtgtcaaattggaaggacgtgtagagtgttctgctgctataacaggtgacttttcagaggttgtagttggatgttataaagggaaaatctacttccttgatctgttaactggaaaacaagcttggaccattcagactgatggagaggtaaaaatgcaaccggctgtggacatgataaggaacttaatatggtgtggctcttatgaccaccatttatatgcgttaaattacaaagatcgttgctgcacttacaaaatttcttgtggtggaagcatttatggttctcctgctatagacatgacacacaacatgatatatgttgcatctacgagtggccttgtgactgcaatatcacttgaggtatcgtcatttaagataatttggcaatatgaagccggggcaccaattttcggttctcttgctatacatcatcatggtggaaaagttatctgctgcctggtgaatggtctggtgattgcattgaactcacatggctctgtcgtttggaaggcatctgttggtggtcctatttttgctggtgcatgtttgtcatctggccttcctactcaggtgttgataccttcccgtgacggaagattatactcttttgatactacatctggtgctcttctttggaaatatgaagttggagaccctattaccgcatctgcttttgtcgatgaagtgttaacagcaacctcacctggagcatctgaaagattcgcttgtatctgcacgagttcgggacaggtccatgtcattaggattagagctgatgctaaggagagaaagttaatggaagtatttgtaatgacttggtgcaaggatttgctgcaatagatcttcctggggacatcttctcatcgcccttgatggttggtggacgcatctttgttggatgcagagatgatcaactacactgtctcacaatcagctcatagcttcaagccgaataattggagggcagatagtttgcttcgcattgctgtaccgagagctcagctagtcagcatcatatccatcctgctatgattatacaacgagaacattttccctcctgaagctgctggtcttcctgcaaattagcaacagtgaagaagtgcaaaatgaaacaggacgacgtatggactccggtaactaggcacaaggttttgaacgtcaaaaattcaatttcacaacatgagtgttttccccatatgtaaaaccacttccgttactctgcagggctatcaagcagccgctgcttacttcagttatgcattcttaaggctgtgatttgaccaaacaaactacacactcaactggggtcttgttcagctttgccttacccgggcagcttggtttagggatgcaaatggcccgtattaattaaggcctgttgggtttagaggaatttcgcgggaattttgaagg

SEQ ID NO: 15104 - DNA, 2183 bp, Oryza sativa
  misc_feature (986)..(986): "n"=any one base of a, t, c, or g
  misc_feature (1039)..(1039): "n"=any one base of a, t, c, or g
  ref <308>: DATABASE ACCESSION NUMBER: AK065638
  ref <309>: DATABASE ENTRY DATE: 2001-12-06
cggggtctagtcgtcttctcttcttccacgcgcaggcgcagccatcgtcgtcatcgccatcgccgccgcggcgcgcgcgcgcgcgcccgtgactgacttccgtagggggggactgaggcacgccaccccgcgcgcgcgcgcgcgcgcgtgcggccgcacaaccacgaacgcgctccgaagtcttccttccgggagggcacgtgtggttggggtataaagggggagagaggcacgatgccgcacggcgtcgcgctcgtcgtcgtcgtcgtcgtcgctcctggccggtagcggatgggcgtcgtggtggggttgcagcttgctcgcctcgccctcgccctcgccgtcgccgtcgcccccgggttgctcagcttctccgccgccgccaccgcagcctgaagcgcgcgggcgtcgaaacgaggatgagggagtacgggcccgcggcggcgccgcggctgctggtgtccgactccggccgcgtccatgagatggagaggttctcgcattacgtcgctaggcaaattgggtttgaccatgtggatgaatgcccccacctatgtacgctggcctatgattatctgaggaagaacaagggttacgaagaaaacatattcgcgttcttccaaaacagccaggatcccgagactctgattgtaaagttcatcgaggaactcgacaaatgtatacttggctacttctcattccattggaactatgcaacctatataatttcccaggttttgactgtagaaggtgctcctaaaagaaagctcaggaacatggtattagaggccactaggaaacagagatttgaaagggttacaagaaacttgaaggtgaccagactattctccacattggtggaggagctgaaggccataggactatcttcccatgttgaagcaccacggagtgatgtgatggtcccagcagcacattgtgatcgcagcccagttctactcttgatgggtggtgggatgggagctggncagagcaccgtgcttaaggatatactcaaggaagcattctggtccggagcagnctgcaatgcagtagttgtagaggcagatgcattcaaggaaactgatgtaatctatcgagctatcagctcaagaggccaccacaatgacatgctgcagacggcagaactggtacatcagtcatcgatggacgcagcctcgtcgctcctggtgactgccctcaacgaagggagggatgtgatcatggacggcaccatgtcgtgggagccgtttgtccagcagacgatcaccatggccagggctgtgcaccggcaacggtaccgcatgggtgttggctacaaggtcacggaggacgggtcaatcactgaggagtactgggagccagttgaggactccagtacagatgaagaaggcgagacgagaaacaggaagccatatcgcatcgagctcgtaggtgtggtctgtgatgcctatcttgcggttgtcaggggaatcaggagagctgtgatcaccgggagagcagtgagggtgaagtcccagctgaagtcccacaagcggttcgccaccgcgttccacagctactgcaacctcgtcgacaatgcgaggctctactgcaccaactccacgggcgccgccaagctgataggatggaaggacggcgagagcaaccttctagtggaccctgaagaaatcggctgcttggagagggtgagccacctcaacgacgaggccgactgcgtccacgagatctatccggacggctcggcggcggcggcctgggaggccctggtcacgtcgccgtcgagggcgccggcgcagcgggagatcatggcggcggtccagaggagcgaggcgcgcttccggaccacgtccacgccctcgtagctgcagcacacgatcactcgtgtcaggttggaattttcttttcttttgacacgatttcaggtaggattgggggtatttgggtgttggttgtgtgtggtggctgccaaatggctcgtgggacacagttcgtgttatgtacgtatcatactgtacattgtatcaactgatcctgactccgttaccacccggcatattgtttcgttttgccgggcgatcgagctgcatcgaatggagctcgtcggagtcatcggtcatgtacacatgtgtcttgtacgatgtattccggatctagacaagaaacaacacatacttttcatggtc

SEQ ID NO: 15105 - DNA, 2499 bp, Oryza sativa
  ref <308>: DATABASE ACCESSION NUMBER: AK065639
  ref <309>: DATABASE ENTRY DATE: 2001-12-06
gctctctctttctctctctcgcctcgcgaaacccagcgagccctagccgatggcctcgccggagcgggaggaggaggaggccgcgcgatcgcctccgccgaagcgcccccgccgcgacggtgacgccccgccggaaccccagcctgcccgcgtgggcctcaacccggcggactgcgacctcgatttcgacgtcggcggcggcgggctccggggggaggcgctgcatgatggcgggttcgcctactgctggtcgggcgcgcgcgccacggtgggcgtgaggggtggcgggaagtactgcttcgggtgcaaggtcgtcgccgagcaggccgtggagatggaggacacggccgcggaccagcagcacctctgccgcgtcggggtctcgaggggcggcgaccccgtgggggccctcggggagaccggccacagcttcgggtttgggggcacggggaaattctcccaccagggcaagtttgtggagtatggcgtcaagtttggggttggggatacggttgtctgcgccgtggaccttgattccaagccgttgtcgtcgatcgggttctccaggaatggggagtggcttggcattgccaagcacttcgatgcaagtgacaaagggctgggtttggttgaatctcctgtgagctcaatgcaatgggagtcggcaatctttccacatgtgttgctgaagaatgttgttgtcgagatgcaattcagcaaggaggatggattgcagcttgttgatggttatgagctctggccctcagcttgtgtcgatgggaatgcggtatctggccctgtgtttgcagaacaaaaagagtgtgaaatcatgatgatggttggtctcccagcttcagggaagtcaacatgggcagagaagtgtatcaaggagcacaaggagaagcgctttatccttctcgggactaatcttgcattggtgcaaatgaaggtgccaggattgctgcgtaagaataactacggtgaacgctttgaacgtttgatggatcgtgccacaatgattttcaacacattgctgaccagggctgcgaagatccctcgcaactacatcatcgatcagactaatgtttacaaaaatgcccgtagtcgcaaactaaggccatttgcaaactaccgtaagactgctgtggttgtgttcccatcgccaagtgaactcaaggtccgggcagcaaagcgtttcaaggaaatggggaaggatgtgccagctgatgcagtaaatgagatgacagctaatttcgtcttaccactgtccaaggacatgcctgattctaaagagccctttgacgaggtaatctttgtagagctttccagggatgaagcccagagaaacctggatgagatgaaacgtttgctgccgaaagcctcaactcccagctatgccaatttcagtaaccaaaatgtgagctcaacatatagtgggactattgctgggacaatgccatctctgtcaccaggttatcaccgacaaatggacagtccatatggaagtggtgtgcagacaccaagggccttgacacaccaacaggcagcatggggtgttcagggtttccagagtccagcagggattaaccaccatcaagtccacttaagcagctacccaaataccccataccaacatcaacaaatccaatcaaaccatccaagcaccccataccaacatcaagcccaatcgacaagctacccaagtaccccttatcgagatcaaattcactcgagctacccaagtaacccaacccaacatcaaattcatctgaactaccccagtaccccaaaccaataccaaagccattcaacatatccaaataccccatttcccggtcatggaaatagcgtatatgattccaatggtggcccaggtccatacaatcctaatccttacagcatgaacaccgatatgcaacaaagaattcaagctcccattggtgacaggaaccagtcctatgcagttgtgtcaaatgaagcctatgggagatctggctatgaagcggcaaattctgttggaaggcctatcaatacacatcctgccgtgtacaattctggcagtggcaattacatgccctatatgcagcattctcacgatgtgcacaactctggatcacagtactcagctccagtccccaggcctccttacggagctcctccaccaaactatatgaatccacagacgagcatttggcatatctagcaaggcagctaatttgtggcgataagcgaacactggacatggtaccaagaaaagtagtttaagtagatatgcgcgagtgcgtgacctataggttccagggaacctttggcagttcggctcgcagatttttgtatagttatatgcacgcataaaccattctccgtatgtatccagtttacgacttttgcatgatcaattagtattggtttggccaacgcagagtgttatgtcgtgaacaactttcggacgctcggtcaggtacgcctgaatcatgaaaacgtatattctagtctctg

SEQ ID NO: 15106 - DNA, 2191 bp, Oryza sativa
  ref <308>: DATABASE ACCESSION NUMBER: AK065640
  ref <309>: DATABASE ENTRY DATE: 2001-12-06
ggcctactactaattcttccgatctgtccgcagaggtacgcgcagttatttctggaccttcttgatagttaaggtcgatcttggttactggaatttataaggaatcgggatttggtgtgtgtattcttggcaagttggcacgggggatgatctttgcccaattcagtttcatttgtgcgcagaaacttgcttgctgcggaatctgacccaaggagttttcgagatgagcgggaggagatcgttcttcgcatccaagaagccgtcgcggagcagcaaccccttcgactccgactccgacgatggcgggagggagcagagaccggcgagggcctcctccgtgcctcctccggccgaccagcggggctccctcttcggcggcggggatggcttctccgcctcgtcggcggcggcgaggagccggtacaggaacgacttccgcgacaccggcggcgtggaggcccagtcggtgcaggagctggagggctacgcggcgtacaaggcggaggagaccactcagcgggtgcagggctgcgtccgcatcgccgaggagatgagggataccgcgtccaagagcctcgtcaccatacaccagcagggccagcagatcacgcgcacgcacatgatgaccctcgacatcgaccaggatctctccagggtaactaacacaaactaataactaatactatgtgattactcagaagcctgattaattctgtttgatcacatagtggcgtaacaagtccccaccaaaattggcctgtttccttcagaattccatccttaataagtccacgaaaactgaaacaaacttcgtgtcacacttcagaaattaattgccaactccaaatttactgtattatgtggtaataatggctaaagggaattcttcgcaccttttcagagcgagaagctgctgggtgatcttgggggtatattttccaaaaagtggaagccaaaaaagaatggagaaatcagggggcctatgctaactagaggtaatctccaactctagtcttgaaatagtagactgcaacaacagttgctgacagggaaagcttgtactatgtggtatcacttatcagttatgttctctgtgtaactaactggaaggatggaattacttgtatgcagatgattccttcattcggaagggcagccatttggaacaaaggcacaaactgggactatcggatcacccacctcaatcgaatgcacgccaattccattccgagccaacttcagccctccagaaagtggaggtaatgcgctaagacatatatggtgattgatttgctaagtgtgtgtattctgattatcttgttgtgttgctcagatggagaaggcaaagcaggatgatggcctatctgatctaagtaacatattgaccgagctgaaaggcatggcggttgacatgggcactgagattgacaggtgaatgccacatttttcactttagttcataaaaactaatacacacttgttttttctgagattggcgtattgttatgtggaatcccttttttgtgctctaattccagcgtacttttatagtttgtactaactgccagtttatgtttagtccattctttaaaaattttcacttcttcatgctgaacgaactaaaaaggagtaaaaagtttggccaaagtaccttcaaattcaagcggcaaattacttcctaatatctaatctggaacactttgcataattatatttaaatctgatgagtattgttgctttaacagtccaaccaataaaaatcatcatgtgatatgtctttttgtctgttgattggattcagacaaacaaaggctttgggagattcagagaaggactacgacgaactgaacttcaggatcaagggagcaaacactcgggcacgccgtctgcttggaaaataaactgcagaatataatctcatcacaggacaggagtccttccatcccttttacccttagtcttgtggaggataattaattgttttgtgggccattggttctgatgattctgtgcatcagattttgatcagtacggtgaatggttggtcctggatatgtcagggtataatgtatctgtatatactgctatagccattagccagtaatgctttgtgccattgttttggaatttggatcgttcgcaattgtttcaaatcgcgttagcatcaataaaattagcaatctgccaagcc

SEQ ID NO: 15107 - DNA, 2194 bp, Oryza sativa
  ref <308>: DATABASE ACCESSION NUMBER: AK065641
  ref <309>: DATABASE ENTRY DATE: 2001-12-06
gacttgccctcgcatctacgtcgcccaagcttcgcccgctgccgcacacaactccgccgacgccgacacgacgtcctctctcctttcgcctcctcatcctcctgcttccgaaatcctcaactcagattcggagctactgccgccgccgcctcccccgttgttgttccaagcgcccccacaaaacccccggccgtggcggcggccgcggcagcgacgggcttcggcggcggcacgcggtgcatgaggaggagaagaaggggaaggcacgactgcggtgtcgcgatccggagcaggagccgatggggaaagtgcggctgacccgcgcctgagcgatagagattgagagatccagggttcgtgagcgagtgtggaaaagaaaggttatactgaagacttcagctggtggcgccaccaagatgcagaccagcaattttcgtaagaagaatgcagcagaggtggatttcttcatggggtatggtgatgttaatcgatacgaagttctggaggtcataggaaaaggaagttatggacttgtatgttctgcaaatgatatacatactggagaaaaggttgcaataaagaagatacacaacatttttgaacatatatcagatgctgcacgcatactccgtgaaatcaagcttctcaggctgcttaggcatcctgacatagtggaaataaagcatattatgctacccccatccaagatggatttcagggacatatatgttgtctttgagcttatggaatcagatcttcatcaggtcataaaggctaatgatgatttgacaagagagcactatcaatttttcctgtatcagatgctccgtgctttgaaatatatccatacagcaaatgtttatcacagagatctgaagccaaaaaacatacttgctaatgcaaattgcaaactcaaaatatgtgattttggcttggcaagagttgcattcactgatgctcccactacagtcttctggaccgattatgttgcaacgagatggtatagagcacctgaactgtgtggttcattttattccaagtacacaccagctattgatatatggagtatagggtgcatttttgctgaggtgttgattggaaagccactatttcctggtaaaaatgttgttcaccagttggatttgataactgatcttctgggaacaccctccttagatgctatttctcaggtgcggaatgacaaggcaagaaaatatctgacatgcatgcggaagaagcagcctgcatcattttcacataaatttctgaaggctgatccattagcattacaattgcttaggaagcttctagcttttgatccaaaggaccgtccatctgctcaagaggcactggcagatccgtacttcaatggattagcaaaggtagagcgagaaccatcttgtcagccaattccaaagatggaatttgaatttgagcgtcggagagcaacaaaggaggatatcaaggaacttatttttcaagaaatattggagtaccatcctcaattattgaaagaacacatcagtggaacagaaaggccaaattttcatcatttaagtgtggttgaccaattcagaaagcaatttactcaagttgaggaaaatctgaatggaagtggggctgctgtttcgctacagaggaaacattcttctttgccaaggcgagccttcaactatcgttagacctgcagtgtcctcggaaagaagcttagcgcctacacttcaatggcaaccaaatatgacgcattttctgaatcatgcattgtgttaccagaacacagtatttagcgggtcacttcttgatgcaacaggcccagcccaagccattcctcgaactactccatatgtagactacaggtccgggaacttggacctctatcagcatcatgtttctagagaggatgtacaaagtgacacagccactgcacaagcacacgctgcttctcatggcccggttccagctgtgtcttacagtcttccagggacgtatagaatcacctagacctatcagtcgttcaatcatggaggtcttcctttttctttttttttcacccatcataaactgattgattaccaacatgcaataaaaaaggcagaggaactagatatgcatgttcttttctttctgggacttagacatgccattatgctttgccagttcggaatcaaaagccttcaaatgtatgcagtttccc

SEQ ID NO: 15108 - DNA, 2769 bp, Oryza sativa
  ref <308>: DATABASE ACCESSION NUMBER: AK065642
  ref <309>: DATABASE ENTRY DATE: 2001-12-06
ggtgatgtttgaggcgcaaaaacagtatcccccttaacaccagttataatataaaggcggactctttgctgccacattgaaacttcaatataatcttccaattttaaaagcttcgaaacatcacacccagtttcctctagaacttctctaacagcacatgtatgatcttcttcatctttactcctctttccacgaggaaaactccagctggcgctagacttccatcccttcacaagcaagcacttctcgtaggtgtcatcgaggatgatggcgccgcagacagggacacggaacttatagtgagtgaaatccttgtaaatgtcatcaaggtgcgcgcggtatggcctgagcgcagcacagctattgaacatgagcgtagtgaagtccttgaaggagagcgacttgagggaggggttgtgctcgacggagttgtcctcgtagaaccagtgcgcctgctccagcaagaacaggatccgctcgaacgactccaaatcctccttgggcacgttgagcacgaagcggctgcagagatcgtcgagaagctcctgcggcggcagctgccccctcgacgacgaccggttgagccccccgccgcccgccatcgccatccaccgccgccgccgcgccgcccccgctcccacccctcctctctccctctctcgctcgcctccggaatccactgcctccgcctcccaagaaggcgaaccctattccgcccccgattctcccggagcggggggccggactcccgttgcgcgattgggcggtgaaacccgaatccccctgcgggcggcggcgtccgtttctcatctaccgtcggcgttgggggggacgccgccccatgggccggtcgccagcgatatatcactatcagctcatcgaccggcggaaagggcttggataaaatcttattgcaaatttccccttgtacatgtaacatcacatgtaatttctattaaaaatgacttcactcaataaagttgtttccaatggagatacaaggtcaatgttgccaaataaagtcacagcattgaatcccaacgcagcagaatttgtaccttcatgtattagaccatcttttgagagtagcgctgtctcagatgtaagtaaggcagatcttagggcttctgggaaaactatcctagataggtccgagtcatcaaagtcaaataactcggatgatgaggcacaccagttttggcgtaagcagcttcctgatgacattattccagacttcagttttgagaaaattgaacaagaacctgaagaattgtctcttgctggattatccttgaatgcaccccctttctatggaacaacagctagccgcttttcaagagagcatgatttatcttctcaagctaacaagagcctggaactggggcttaccagtttactttatgaagataattcacaagcatcgtttccaactatgggttcaagcaattgggagcaaaattttgtaggggatctccattttacgaatggaaatcagggccttcattatgattctgaaagtgctgcaggcttttctgacagttttgctagcgattatgctgcagcaacagacgatgttcttgaccccctagcgtatttagcttcacagtttcctgatttttcatcagagagccttgcagagctgtactatgctaatggatgtgacttcaaccatactattgaaatcctcacccagctagagatgcaagttgatgctacctccaatccaactctgacccccaggacaccaaactttagcacaggggacttccccgcactgccaacagttgaagaccaaaatggtttttccaaaggcaatgcagatattctaagcatcttcaatggacgcagctcaccctctgtatctactggtactggtgattttgtttcagctgttcgcaaacttgcatcgcaaaattctggccattggaagtataagaaaggtcctgaatacggtaatggtgtttcaactgtttctgtacccaagcagtacagttctacgaccaaaacatcttctggaaacaagtttcaaagtgttagcagtgcaagagctgctccatggctcgaaactggagatgcagtagcaaacatgtactcagaatcaaggggagaagcccgtgattttgcccgcatccgaaatgcatgttttgagcaggctagacaggcttacctgattggcaacaaagctctagccaaggaattgagtatgaagggacagacatataacacacaaatgaaagcatctcatgagaaagcaagagaagctatttatcgacagaggaacccatcttcgcaacgagggagcgaccgtctgatcgatctacatggtctccatgtgaacgaagcaatccatatacttaaggtcgagctcggtactcttaagagcaccgcgagggctacaggtgagaggatgcaagtcatgatatgtgtcgggacaggtcatcacaccaagggttctcgcaccgccaggctgcccatcgccgtcgagcagtttcttctggaggaaggcctccactacacgcaggcacaacctggtttgctccgtgttgtggtgttctaacatctcttaggtcagcagcacgaagaaaaaagaagcaaaacaaaaaaaggagaaagagatgtagggaaaagaaaaacctaaaaaaaatggccgctgttgcagcactgtaattttcttgtagttgtatattaaaagaggcagcaggagaatagcctgacaacagaatacagtgtaaaattatacatagcttcattcaattcacattccattcc

SEQ ID NO: 15109 - DNA, 1714 bp, Oryza sativa
  ref <308>: DATABASE ACCESSION NUMBER: AK065643
  ref <309>: DATABASE ENTRY DATE: 2001-12-06
gttaccaaaccccacccaacctacaacgaccacgacgactcctctcctccctttctctctcttcacccgcagcacgcgcgccgccgtctccggcgatggaagttgccgccggcgcccgcggcggcggggccggcggaggagggggaggccccgcgccgttcctgctcaagacgtacgagatggtggacgacccgtcgacggacgcggtggtgtcgtggagcgacgcctccgacgcgagcttcgtcgtctggaaccacccggagttcgccgcccgcctgctgcccgcctacttcaagcacagcaacttctccagtttcatccgccagctcaacacctacggattccgtaaaatagatccagagcgatgggaatttgccaatgagtacttcatcaagggacaaaagcacctgctgaagaatatccacaggcgtaagcctatccacagccacagccatccaccaggtgctctgcccgataatgagcgtgcaatatttgaggatgagatcgaacggctttcacgagagaaatccaacctccaggctgacctctggaaatccaagcagcagcagtcgggaacgatgaaccagattgaagatcttgagcgacgagtgcttggcatggagcagcgacagaccaagatgattgccttcttgcagcaagctagtaagaaccctcagtttgtcaacaagcttgttaagatggcagaagcatcttcgattttcacggatgctttcaataagaagagaaggttacctggtttggattacagtatcgagaacacagaaaccacaagcttttatgatgaccatagcagcacttctaagcaagaaacaggcaatcttttaaatcagcacttctctgataagcttaggttgggactttgtcctgccatgacagagagcaatatcatcacgctaagcacgcaaagctcaaacgaagataacagaagccctcatggtaaacatccagagtgtgacatgatggggagggaatgtctcccgttggtgccgcagatgatggaactctccgataccggcacatctatctgcccctccaagagctcttgctttgcaccacctataagtgatgaaggcctcttaacatgccatctgagtctaactcttgcatcatgctcgatggatgttgacaaaagccaaggcctcaatgcaaatgggaccactatagacaacccaactgaggcagcaacagctaccatggaaaaggatgacaccattgacagaagcttcgatgacaaccaaaagaaatcagctgattctcgtacagcagatgccacaacaccacgagcggatgcacgagtagccagtgaggctcctgcagccccggctgcagtggtgaatgacaagttctgggagcagttcctaacagagcgacctggctgctctgaaactgaagaagcaagctctggcctaagaacagatacttccagggagcaaatggagaacaggcaggcatatgatcactcacggaatgacagagaagacgtggaacaactgaaactctgaatttactatagaattatacaatttacaagaagggatacaggcgtacagtgtaagatgtttagaatcaggaacctgctgttaaacatgacagatcaatgggtgtacaacatcacacaggtgtacatattttttttccctgaatgtttcggagggttaagattaatagttcgattaaccacaccagttgttgc

SEQ ID NO: 15110 - DNA, 1161 bp, Oryza sativa
  ref <308>: DATABASE ACCESSION NUMBER: AK065644
  ref <309>: DATABASE ENTRY DATE: 2001-12-06
aggtcatcatcatccaccccaccggagcagcagccgacgatctcgccgccgccaacgccaacgccaaggagtgcgtgttctgcgagatgacgcggcacaccacccgcaatgcgcgcggcggctcccgagcggatcatcctggtgcgccacggcgagagcaggggaactcgacatgtccgcctacaccaccacgccgactaccgcatccgtccgctcggcgtcgaccaggcccgcgccgccgggaagggcatcctcgacgtcgtctcctccgccgccaactggaaggtctacttctacgtctccccctacgagcgcacccgcgccacgctccgcgagatcggcgccgccttcccccgccaccgcgtcatcggcgcccgcgaggagtgccgcgtccgcgagcaggacttcggcaacttccaggtcgaggacgcatgcgcgccgtcaaggagacccgcgaccgcttcggccgcttcttcttccgcttccccgagggcgagtccgccgccgacgtcttcgaccgcgtcgccagtttcttggagtcgctgtggagggacatagacatggggaggctggagcaggacgcgagctgcgagaccaacctggtgatcgtctcccatggcctcacctcgcgggtcttcctcatgaagtggttcaagtggacggtggaccagttcgagcgcctcaacaacttcgacaactgcgagttcagggtcatgcagctcggccccgccggcgagtacagcctcctcatccaccacaccaaggaggagctccagcgctggggcctctccccaggagatgatcgccgaccagcagtggcgcgcctccgccaaccgccgcagctgggccgccgagtgctcctccttcctcgccaccttcttcgaccactggaacgaagacgacaatgacacagatgcaggaggaaaatgcaagaccaacaagttgctcgagtaataatcttgctgcttgcctctacttgctctttctttagaaattccgtttaaaattctttggaatttgattcgattggtactactagtgtatttctccattggggcgatgcaatgtactcccctttgctgattcttttctgtttgatctgtagcctgttcatacatagttgctagatactacattgataaatactatatatgatttggg

SEQ ID NO: 15111 - DNA, 3051 bp, Oryza sativa
  ref <308>: DATABASE ACCESSION NUMBER: AK065645
  ref <309>: DATABASE ENTRY DATE: 2001-12-06
gaattagcgagcgcccgggtggtgtacccatctgtattcatcatttccgcgattccaccctctctctctctctctgcggccgcgccatctctatccgggctcaagggtgtggccggggggcgacgaacgccgctctctctgccttcctccttgaccgatcgctcccttctgaccgccttaatattctggaaagatcggttcttgccttcttgggctgcttcaggggcgtgggagaggtttggggttggttcatctcgcgggcttgggcggcgggaggaggagaggggttttgctttgtctcctgttccgactctccggttgattcctccgactgagttcagggggagttcttcaatcaggaaggtcttgactctcgacgaggagttcaaggttcttggattaaagattggcagtcattcatcgtggatggagaataggaacaaagaagatatgggtccatcccagcgtaattcttgccctaaggttcacagctcaatgtgcagtgagctgacaatgatgttagataaagtctcctctattcttccattaattgaggcagctcgaccaggatgtaaagcaggtatacaggaattatgcaacctatacaatatagttgagaaagggaaactcataattcagcactgcgttgaatgtagcaagctctacttggctattactggagaggcgattgtatctcggtgtgaaaggatcagagactcacttaggcggagcttgttcctgattgagaacatggtcccaccagcactagctaatcagattgttgacgtccatgatgatcttggggacataaaatttgttattgatcccacagaagaagaggctggcaaaaccattttagagatgcttcggcaatctgatgtgactgaagaacttgaacttgagacattcctgcagggcagcttcaaacttaaacctgacatctcctaaatctatgctaattgaacgaagggctatcaagaaactgcttgacaagattagcggtactgatcccaaaaaggagggagttcttaagttccttctataccttgttaaaaagtatggaaaaaacatcaaaccagaaactggtgagcggaatgaaaacatgcaatctgaaagccagtcttcgactccaagctcaagttttgttagtgataccagcactcctggaaagtggtacacacccacagacatccagaggaatgaggatcagactagtatgtcaggagcagccacaccacctgcagagttctgttgcccaatatcaacaaagttaatgcgtgatcctgtcataataacatctgggcagacttatgaaagagaaaatattgagagatggtttagggagggatatgatacctgtcccaggacacatataaagctagaaaatttcgcgatgattccaaatacttgcatgagggacctcattttcaattggtgcaaagagcatggtttcataatctcagatattctccctccatccaaaaatgcatacagttacttgccggagcaattgcatggttactccatgtcaagtctgcacaatgtttcagtacctctaattgctggaaaagtcagggattttgtgattgaccatagcacttcatctgttgcattatctgaggccagttatatgtcagattcatatcatgtgcgggacatggaggaaccgaaagatagtttttctcagttctcttggagtgcggactatcaagagtgtttgtcttttcgcaacttcaaccaggacaagttcctaaggttcttttacgagctgtcgaagctcccattggaactccaagacaggtccattggtgatttgaagatcattctcaatgaggaaaatgaggcttcatgtgctatggtttccaatggatttgtagaggcattctttgatttcttaatgaatgaagatggaagctacagtatgcaagctcagaaagttggatttcagttctttcgtgtttttctttccaatagcaggactaatattctacacatgaatgaagaagcattccgtctatttgcatcctttattgattctgagttaaaaaccgaagctttgctgacacttcacgagctggttcaacacctgagttgtcgacaatcccatttgatggcctctattatcactcctttattggagtctgaagatgccgagggtctcaagctttgcctgaagattgtctgcaatctttcatctgattcggatgtaaaaccatacctaatttcactgggaattgtctcaagattgtcacccattctttctgaaggaacctttgctgagtgttgcttggagattttgcggaacctgtgtgatgtggaagaagccacagtgcttattacaaaaactgatcgatgccttggttccgttgcagaatatctggacactggaagccctaaagaacgagagcatgcagtggttatccttttagcagtatgttcccatagttctgaggattgtttacttgtaatgaaggaaggtgtaatccctgcccttgtggacttgtcagtaaatggaattgatgaagcaaaaggttgttcaatgaagctacttcatcttctcagggatctgaggcgaaccgaccagttgaacaactcatgttcacaagaagtggttgtcacagatgtagtggagggtcctcctgacagttcaattcacaagcagccaataccaaagtcatctcgttttttccaaagaaagttgaacattttctcaaagccccggtcacttacgctattctgaaaactggtaaagatcgatctagtagtccttgtatattttataacactaacagttcttttgtatagggtggtagaggctgtattgtccaaaggaaatgcttgatgagatgatctttttcatcctcatgtattccagtagagtttgataaactattgtgatgcatcttgcagattgcagttgttttgcatcttgctgcgtgtaaaaagtaggctagatatagtttttgtatttttgtactctgctgtagtgctgttccattgacagctggaaagcctgaaaacaaggttttgtttatcttatctgaagttctg

SEQ ID NO: 15112 - DNA, 1819 bp, Oryza sativa
  ref <308>: DATABASE ACCESSION NUMBER: AK065646
  ref <309>: DATABASE ENTRY DATE: 2001-12-06
gttcgtcaacaaggtcaggggcggcggccggggcggagcggggttgccgccggagatcagcctcgatgacctcgccgacgagttcttccgggccagggcggagtccgaggacgacgacgacgacgaggaggcggtggtggtcgtgcgcggggaggagtcgcgtgggcggctcaggttcccggcgccagcggagaagggcggcggtcggcggagctccaccgcgcggtacgccagggagacggagtcgtcgcggcagcgcgggaggtcggtgtcgcggccgccggccgagaggcgaggcggagccactgctgtcgccaatggcggggctgctgccgcggggcggcagcggtatgcatccgtcgaccggcgcgcttcgatggatcggcaccgatggtgtgattcggataatgatatggacatttctcaccggtatggttctaggggaataaataccaaatccagcaataatagcctgcagaactcatcattccataagacggctaaagtaaatcaatcgttgaggaagtctacaagtcaaaaagatttcttacattcacgagacagcagctcaagccattcttcaataactgatgatgaatttcgggactcttttcatagcagaagtcagaaggggattcgggcagtttatacccttgaaaaggaccgcctgagtaataatgaggatgaaaatgcactgtatgacgtgatgcgtaaagaagtccggcaagctgttgatgaaatcaggactcagcttgaaaaggtcgtgacaaaatctgaaccttcagaaaaagcaacaagcgctgatgcacaaccaactcaggttattaatgagctccgcaggagttacactagcaagttggaagagtcagagatgcggaaacaggaattgttagctcaattggcagcggaagaacaacgtgggcatgaactcacaaaaatagtcaaggaattgctacctactcctaagaagaatatgaattcggaaaggcaaccacgatatagaagaagaagcaatgatagagccagggtgtcaagacgtcttactgaagaggctgagcaatacttcgaagatttcctgtcaaatgttgaagatactgatttttcatcttttgatggagaaagaagtgatacaagttcaagcagaagagatgtggtacaaaacaccaagatcgaaactccaataacgcttccaaaagttgcttcacccgtcgaggcagacggggttgtccttccctggctgcaatgggaaacaagcaacgaccttcaaacctctccatgcaaaccaaagacacagggagcaagtaccgcatgcagcaccagcagtcgcactatgagcagccgcgggagttggagtcctggagatcatgatagcgcagctggctccaaggatacacttctgacaaggttcgaggaggctgcgtctcgccgaagcagctgccccgataacactcaaagatcgtcatttcacatcgatgactacatgcatttgcggaggagccacgatcttctcttggagcgatggaggcaaaaggaaagaattggcgacggtggccttatcctgtgcagtagatcatcaataatgtaggttatggcccatggttcatatgtagaagcagatgattagcatatcaaaaacaatgtagccattattcatctgtgtgcttacccattaggttgttggttgtgatgagctaaggccaaaagtgtgtacatttgcaaacttgacataattacttcatggacctgtggtgcttagctatattctaaatttgtatagacgtttgcttttaacttagtcctaaatttgtttaccaacccc

SEQ ID NO: 15113 - DNA, 3790 bp, Oryza sativa
  ref <308>: DATABASE ACCESSION NUMBER: AK065647
  ref <309>: DATABASE ENTRY DATE: 2001-12-06
gaattgggtgaggaggatgcttatccggcttcctccgatgccgcggtaggtgaggagaagggcgaattgggcgaggagccggaggagaaggctccggctctggctccggaggcgaatggcgccgccgaatcggatgtggaggagaagccggaggaggataacgagggggaggaggtggctactgggggtggggatgatggtgaattgggaatggagaaagaggttgatgtttctgctggggccgcggaggcgccgcagccggaggataaggtagctcctgaagctgaagctaatggagatttgggcgacaaggcggaggaggaagcgagtgcttcggcggcggtggaggtggtggaggagagcaatgctccagaagaattgttggagaaggctgtggtttcggaggcaaatggcgtggctgccgccgtcgaattggctgtggaggagaagctagaggataacaagggagaggaggaagaaatggaggcgaagcctgagccagtaagcggggtgattccagtggttgttgacgacactagctccgagatgattgcgcctgtgagtgccgaaagtgcagttgaagagagtactgagaaggagcaaactgttgacgacactagctccgagatgattgcgcatgtgagtgccgaaagtgcagttgaagagagtactgagaaggagcaaactgttgaaagcgaggccagtgaatctgtggagattgttggtgttgagaagcctactgaggatgagagtaatgttgatggcggtgctagttctgttgtgtctcgagaattggctccagaggaaaccaaggaaaataatgttggtcaggaggatgaaggtgttgctgaggttattgaccgtgaagaagacgctgatgatgatgaagagatagttttagctgcagctgatgatgaagatgatggtactaacgaggctgatgacgatgaagatggagtgagctctgacagggggcctgcacgagttgctattatagagagttcagaagctgcgaagcagatcatgaaggagcttggggaaggttctgctagtgttagtcctgtatctggcttgagcagctcgagagagtacactaatagcatggatgggcagattgtccttgatgattctgaggaggatggggatgatgacgataatgaagatgacgatgagaaggggtttgattctgctgccttggctgccctgctgaaagcagcaactggtgcatctgcagacgggaatgtcacagtttcttcccaagatggctctagaatcttctccatggatcggccagctggcctgggctcatcagccccatctctcaggccaacagtcccacgcccagttgcacggtcaaacctattcagcccctctgagctagcagtgactgctgagcctactgaggagatgacggaggaagagaagaagctgcatgacaaggttgagttgatccgagtaaagtttctgcgccttgtctatagattgggggctactcctgaagaaacagttgcagcacaggtgttgtaccgtctgagccttgctgagggtattcgacacggaaggcagacaaaccgagctttcagccttgacaatgcacggaagaaggccatgctgcttgaagcggagggaaaagaggagttgaacttctcatgcaacatacttgttttggggaagataggggtcggaaaaagtgcaactataaattcaatttttggtgaagagaagtccaaaactgatgctttcagttcagccaccaacagtgtacgggagattgttggtaatgtcgatggtgtccagatacggatcattgatactccaggccttcgacccaatgtgatggaccaaggatccaacagaaaaatcctcgcttctgtcaagaaatataccaagagatgccccccagatattgttctgtatgtggaccgcctggatagtctgagccgtgatctcaatgatttgcctcttctaaagaccattacttctgttctgggctcatctatatggttcaatgccattgttgctctcactcatgctgcttccgcccctcctgaaggtctaaatggtgcccctatgacatatgaggtgctaatggctcagaggtctcacattatccagcaatccatcaggcaagctgcaggagatatgcggttgatgaatccagtagctcttgttgagaaccatccttcttgcaggagaaaccgcgagggtcagaaagtacttccaaatggccagagctggaggcatcagatgctgcttttgtgctactcttcaaagatattgtctgaagcaaactcacttctgaaacttcaggatccaaatcctggaaagctttttgggttccgtttccgctctccgcctctgcccttcctgctctcctccctgttgcagtcaagagctcacccgaagctttcaccagatcagggtggcaatgaaggagattctgacatcgatttggatgattactctgatatagagcaggatgaagatgaagaggaatatgaccagcttcctcccttcaagccattgaccaaatctcagcttgcgaggctgacaaaggagcagaagaatgcttattttgatgagtacgactacagggtcaagcttctccagaagaaacagtggaaggatgagatccgcaggttgaaggagatgaggaagagaggtaaaactgatatggatgcttatgggtatgctaacatcgcaggagaaaatgatctggatcctcctccagagaacgtatcagttcccttacctgatatggtgctgcccccttcatttgactgtgacaatcccacataccggtaccgctttctggagccaacttcgactgttcttgcaaggcctgtgttagatgcacacgggtgggatcatgactgtggttatgacggagtaagtgttgaggagacgcttgctctccttaacaagtttccagctaatatggcggttcaggtcaccaaggacaagaaggaatttagcatccatttggactcttccatctcagcaaagcttggggaggatgcatcgtcgcttgctggttttgatatccagactgttgggcggcagcttgcgtacattctccgtggtgaaaccaagttcaagaatatcaagaagaacaagactactgggggattttcagtgactttcttgggcgacattgtggcgactgggctgaaggttgaggaccagctctctcttgggaagaggttggcactggtggcgagcacaggtgcaatgcgagctcaaggcgacaccgcttatggagctaacttggaggcacgcctgaaagacaaagattatccgattggccagtccctgtcaaccctgggtctttctttgatgaagtggcgccgagaccttgctctcggtgcgaatttgcagtcccagttctcgattggaaggggctcgaagatggtggttcgtcttggattgaataacaaactaagtggccagatcactgtcaggacaagcacctcggagcaggtccagatcgcgctgttgggtcttatcccagttgcagcctccatttacaggagcttcaggcccagcgaaccctccttcgcctattagcttcgcatcaagatgaacaatttactcatgtcggctgcgcctcctttcgtcttagcaattttcctatcttatatgaaccataattttctgtctgtttttgcttttaccagtgtactccgaagatcgttcctatcataattttggctgaagagggttgtgaaatttaatgtggaacttcaactgaataatgttgttagatctatataccatccgtttttctatt

SEQ ID NO: 15114 - DNA, 1323 bp, Oryza sativa
  ref <308>: DATABASE ACCESSION NUMBER: AK065648
  ref <309>: DATABASE ENTRY DATE: 2001-12-06
gaccgctagaagcgccgttgagcacttccgcttccggccaccgcggggtcgccggatatggcccaggcaccagcgcgcgccgcttccgtcgtgcggctcttcgacgcgcactgccacctgcaggacccgcgtgtgctgtccgtcgccccttccctcatacgcgccgccaccgccgccggcgtcgcgcgcttcgccgtcaacggcacttccgagaaagactggcacctggtgaagcagatggccgaggagtacccgtccgtcgtcccctgcttcggcctccacccatggtgggtaccggagagatcgccggattggatggattcgctccggcggttcttcgctgaaacaccagaggcggctgttggggagattggtctggacaaaggttcacatggaaaaaccattgactttggagaacaggttgaagttttccagcagcaacttgaacttgctaaggagttgaacaagcctgtttctgttcattgtgtgcgcgcctttggtgatcttctggagatactaaagagaactggacctttcccagctggtgtgttgctgcattcgtatctaggatctgcagaaatggtgtccagccttgaaattttaggctgttacttttcgttgtccggcttccttacaggcatgaaatccacgaaggcaaagaaaatgctaaaatcaatgcccttagacagaattctgctagagaccgacgcaccggatgcattaccgaaattggatgatatttctctattagcagtacctgtggatagctcaagtgcagataatggagaaagtaaaaaagattctaattcacgggcatctaccacttcaaatgagtctttgaaccatccatctaatatccacattgttatgaagtatgtcgcctcactgcttgaaatatcagaaatagaacttgctgaagtgacatacaagaatgcgaccaagctgttctcttatcatggatccaaagttcacaatgaagtggaagctttgtgattgggtgggcatccaatttgaaccatgttgttcctctgaaattatgaaccctggtgcgtgcattctgcctctgaacactacccgttatattgtactccctccttttttttttgtttgacgttggttagctcaaaattgaactaaccaacattaaacatttggggaaggcggtagtatattagtaattgcaacataaaaggaagtggttatttcgttaaggaggcactatcttggcaatgttgtctaagtgtgattttacatttcttgagaggagaacagcaggtcagcaaggtatctaaataactattaaatgcaccacgactggcaacc

SEQ ID NO: 15115 - DNA, 4484 bp, Oryza sativa
  ref <308>: DATABASE ACCESSION NUMBER: AK065649
  ref <309>: DATABASE ENTRY DATE: 2001-12-06
gcgttggtgagaacaattaaccaagagagcaaagaggaggagtagccatggccgccgcagcgattggagggatgcttgcctcggccgccatcaaggagacgacgagaaagctgggttccgccatcggaggtgagatcaagctgcacagggacttcaggagggacctggagtgcttcaggaacaccctggaatcaatcgaagcggtgatggaggacgcggagaagaggtccatcaaggagaaaacggtgcagctgtggctgaatcggctcaagaacgcctcctatgacatctgcgacatgctcgaggagtttgaggccaaaactgctacaccagctgcacgaatgctgtcacgtaagctcttccatcaccccaaaattaccaagtttaccatggttcataagatgaaggagttgagactagaactgaaggatattacagatcagtatcataattttggattcaagcaaggctctaccttcagtgagcagcatgttccagataaacgggaaacatcacccaaggagtacgaagcattcatcgtagggcgtactgaacagaagaattttatattgtcttgtttgtttgacaatatcaaggacaagataataatacttcctatatatggcattggaggtataggcaagacaacctttgcgaaaatggttttcaatgatacccgactcaatgattattcaaaagtatgggtctatgtgtcccaggcatttgacttaaataaaattcgcagttctataatgtcaaaactatcaaaagaggagagtcaattgagtaatcagacgaaccctgcagagccatttggtgacaagaaaattatggttgttttagatgacctgtgggagattgatcaatctgaattagacaggttgagggctatattggtaaatgatgttggcattggcagtaaggtgattgtcgttgtaaccacccgtgagaaagaaattgcaaacaagttttgtactgttgcgccgttcgagcttccacccttgactgatgatatgtgctggacaataatcaaacagaaggttgagtttgatactagacctgacaaagatcagctggagcaggttggaagagagattgcattgaagtgtggaggtgtggcgttagcagctcaagcactagggtacatgttgagatccatgacagtcaacagatggaacacagtgaaaaacagtgatatctggaatgaaaacaattcggaagatagatccaaccagcatcacaatgttatggcatccttgatgttaagctgcaataacatgtctccatatttgaggttatgctttgcctattgtgcactatttgcgaaaggtcaaaagatagtcaaagatgatctggtttaccaatggatttctcttggttttgttgaaaaacaaggcatattctccatttgggaggatggtgagaattatgtttgtcatcttatggggatgtccttccttcaatattcaaagtcaccttcgattgttcaagtgcatcaagaggatgttacattgctgaccatgcatgacctggtgcatgacttagcaagatatgtcatggtcgacgaaattttagatgctagcaaacaaggcaatattactgggaggtgcagatgccgctttgcgctgctcaatgattgtaccaagccattgaattcactcactcattctcctacccaggtaagggcggtgcgttatctggaaaatgaagaaaatgtgctccgagatgcttctttttcatctgctaaatacatgcgcgtcttggatttaagcgggtgctccatacagaagttgccagattccattggtcacttgaagcaattgagatatcttaaagctcttgggatcaaggataaaatgatccctaattgtataactaagctctcaaaattaattttcctcagcatttctgggtcttcggcaatcttgacactgccaaagtcaattggagaaatggagagtctgatgtacattgacttgtcaggttgttctggattgaaagaactgccagagtcatttggcaaactaaaaaaattgattcatctggatttatcaaattgttctaatgttactggtgtatcagaatccttggagagtctcatcaatctcaaatatttgaatttatcatactgccggaatattggacaactacctgaagttatgggtaacctctcgaaactggtatatttgaacttatcaagttgctcctatatgaaagggaggttagaaacagaagttttgggtaccctcaccaaacttgaatacttgaatctgtctacagaacacttttatacggaaaggctagctcaaggtttgaacagcttaatcaatctcaagtatttgaacttgtcaggctcgctgaattacttgggttcttcaatagatatcagtttcctcggttgtctgaacaacctagagcatttggtcttgtcgaagaacatatatcttaatggcgtcgtcttacctgactgttttgatacactcaaaaagctacatacacttgacctctcggattgcccacttttgagtagtttaccagcaagtataggtaaagctgacagcctgaagtttgttaatctgaatggtagtgacctgtccaaggtgccacaatggaacaaaaatttactcacattaccacgctttgtggtgcaacctaatgatgatggatcttctagcaaccttgttctgcttaatgatgtgaatcctcctaacttgcagataagatgtcttgaaaatgtgaggtcggtcaaagaggtccagaagatagaactgattgaaaagcaaagaatcaaagagttggaattgcattggactcaacatgttaagaggtctatggaggacatagatttgttgcgtgagctagttcctccaagatctctaaagaagtttcggatggaaggttataaagacaccaaatatccatcctggttaatggacatttccctttatctccctaatcttattcaaattaccatggcacaaatgcccaagtgcgtcaggctaccaccacttggccaattacctaatctggaagagttgtgtcttgaaagaatgaagagcgtggtgaaaatcgatgaggatttttgtggcggcccagggccatttcctcgactgaagaagtttaccatagaaggcatgccaagcctagaagtgtggaacacaatgtactcttgcgatgaggatagtgtgagcgagtttatgtttcctaacctttgtgaattggaaatctccaattgccccaaactgcagcttacaccatgtccgcctagagctaagaagtggactattgtgagaagtgatggcatcatatcctcatgggcaggaaatgcaccacacactagtacatcctgctccactcctctggtatcttctttagtggtccaacaatgcgattctcctctgcgtgagtggaggttgcttcatcacctccctgccctcaattatttaaagatccagtatttcggtgatcctacgatctcagcagagattattggagccctctccaccctccaatcactggctctggaaggcatctatagccatcagccacaactgccagattggttgggtcatctcaggtctctcaaggaattgaagataaagttctttgaggtgaaagcaacacatgagaacatcacgcgtctcacttcgctacataaactaagtctttcccgttgtgatagcttgacatcattaccgctgtgggtgggagacctcgtctctctccaggaattgagcatctcagattgtccaaacctgaatgatttgggagattgcatgggacgcctcacctctctcaagagacttgagatcaagggttgttatgaaatcaagtctttgcctgagggcataaaaaaactcaccatgctcgaatatatgttaatttttcactgccgtgaattaagggagtggtgcgaattagaggataacaagaagacgcttgctcatgtcaaacaaatcaaattgcgttaattagcaagccataaactcatacagcatagaagttcactccaggctgcaaaaatcaaaggccttgattaatggagattgagatcatagaagttcactccaggatgaatgaagctgtcatattcagcagagttttttgtcaggtcgtcgtccatcgtcctcgacttctgttacggttttattcagggaaatttacacttgaatataatcagtatgggccgtcaatccatccgtatcctgctgcatcccttcgcgacggaccttcagtgatgaaagcgtattttgctattttctgccaggaatttaagttcatagttaagagaagattcaattttgttacataatgctaggtctaaaatgttagattccacatcttgtggtataagtttttatccccaaattcttcatcatgttttaacttctattctctacaaaattctatgcatgtgttctatgtaacacatccttcataattggtccttgaccacttaatttagaatatatattgtctatagc

SEQ ID NO: 15116 - DNA, 1489 bp, Oryza sativa
  ref <308>: DATABASE ACCESSION NUMBER: AK065650
  ref <309>: DATABASE ENTRY DATE: 2001-12-06
gtttgcccttgtcccttcctctgtcttcttcttcccctaaacgacggacgatcggttccccatttcgctcccatcgatccctccttctccttcctccgcctccgcgggcacgacgcaaggccgcctcgcgccgcccctggtcgaggatcgatctccccttcccctcctcggctcccgtctccttcgcccgcttgccggcagcgccggtctccgtcccgcgagctgcggtggtgccgccgtctctgtccctgctgctgctgctgcttccgccgccgatctggaagcttgtagcagtttatgtgttccccagaaagtttgggggttcaactgaccccttgcctgaagggagggagtatttgattcttgaagaagagagagagagagagagagagtatttgattcttgaattctactagtttggaaggaggggagctgcgttattattattattattattattattattattattattattattattattattattattattattattatttttggttcgtttgtttcatggagtcgaaggaagtgcatggccgggatgtgctggttgatctggagaaagggaattgcttgctaatgagagagggggggcgataatgggacggatgtgaatatgatatctagccaggcgaaaactccatggaatgatcttatagctatgaaggatgatcaccacattccttgctgctcgtcacgctctcaagatttcgccgtgaaaagcggagaagataggacgtccgatggcgagatgaaggttgggcttttggataagtcgatgggggagaaggagaagaagaagcggtcgaaaaagccaccacgaccgccgcgaccaccttctgcttcaccattagatgctgctgaccagaagctcattagtgaactatctgagctcgcaagtttaaaaagggcaaggattgaacggatgaaggctttgaagaagatgaagaacaccaaaccagcttcctcaattggcaacctggtagctttgattattaccattatcttctgcctcgtcatactttggcaaggcttgccgatgaaatgaattcactgggttttctcaaagtatggggcgggcattatctttcatggatcacctatatcatcaggccgatcacatggcagcctgttctccatccagttctacaagaagaatgagacggctaccagccctcggagttcttcttcagctccaaacaacacgggaataacaacgagattggagatccatggtgaagctaggggggttacagaatgagtgccgtagctgccatcactgccttggccttttggtgtcatcctgctgtaaattatgttgagttgttgtggtcgtggtcttttagcactccatagattccaaactacaagtgtttactaattggcattgctgctctgtgctctgagtcagcttctgttatgacaatactaattaatctgactgatataatgatattcatgatacttattctttctt

SEQ ID NO: 15117 - DNA, 2530 bp, Oryza sativa
  ref <308>: DATABASE ACCESSION NUMBER: AK065651
  ref <309>: DATABASE ENTRY DATE: 2001-12-06
gaggtttccgagcgcggggaacggaacgggacggcagattctggggaagaaatggcggacgtgcagtcgccgccgccgccgccgccgccgagcggccagcggcggctcgtcgggccagcgccggacgccctgggctcgctccccctcgacgtcctcgacagcatcctctcccgcctccacatccacgacgtggtccgcacctccgcgctgtcccgatcgtggcgccgccgctgggagtcgctccccaccgtcgacctcacgcggagccccggcatcagcgcctccgacgtggacgcgctgctcctccgccgcaccgcgcccgcccgctccttccgcctcgccacgcgcgaccgctcctggtcccctaccgccttccacgactggctcctccgcctctcccgcggcggtggcggcggcggcctccgcgacctggagctgaccctccggtacacgtacatcaacagcaagctcaactcctgcctcttctcctttcgcgagctcacctcgctgagactccactgctgcggcctcccgcacgtgcccactgagttcgccgggttcccgaatctgaagacgatgtacctctcggtggtcaaagttcagaggcacgggggaagggggttggccaccctgattgctgcatcgccggtgctccaggaggtgactctcatcgacgtagtgctcattggagatggacccgacgaagattgggtgattcgggcttccaatctgcggaaattgacgatagctcttggctctgaatatggtggccggatggaagaccttccacggctggaggaatgttgtctctttggcctgaattatgccaaatacttgacggggatggcgcgagtcaccaagctcactttctactgcaattgcatgttgtcaactgaagttgacgtgctggagcgattgccgttcctgtttgagaaccttagaagcttaatccttggagtgaatttttgtatgatgtctcacatcttggctattttctgcctacttagaagtgcgcctgttcttgaagaactcgatgtttggaattggagtgagggtgcccaggaaatggaagcaaatgatgtgttcttgaatgctcagtggatcaatcatatgtttgccaaacttcatgttgtgcgcatgaagaaggtttattgcctcaataatgagatgcactttatagagttcattctgtccaaggcaagagtactgcgagtgctttccctcactcttgcgtctgattccctgagcagtattgaggaagcaattattgatataacagaatatccaagagcatcacctgatgcgcaggtcatcttcatgggtgtagagccagaatctgcaaataagtaaacattgtgattctgatttcctagccatgctgttccatacattcatccaacttctcagatgttctttactacacttgacttaaaaattccttccggttcagtcttttctggacaccctatgtgtttttagtattcttcgctgttaatattgtctatagtgtaaattgtattatacatccctaaacttgcttgagtgcgaaattactccctgaacttataagcatttttttactgcacatccaataactctttttttcctcagtgatatgaatggtttcctggatttatccgctgagtttcctgacgtggaggaggaagagacatcaggcttaggatcgctggatactgtacaccctcggagaaggcagcgatccaacggggagtctgtagctcagctgcagctgcttcaggagcagctgcaagagctggaaaaggagaaggatcagcaccacaagcctacggtggaagaattgaaagagattatccaggagggtaaaaaaaacgcaattaaatttcaaaattacttcgaatctaccatccagtctctgtctaagcaacacgaccttagccaatttaggcttcccccattgccagagttcccatcggagctgtcatctcatccggtcaccaccagaccaggagacactcctgtcgatcctgctgacaatgttgctgctaatgtacctgaggattctcgagaaggccatgctacttctggtgatgctgatgttcatgtccgttctccaatagacttcgttgccaaatgtgttgggaatggttgtgcagaatctccagaagaccaaatctgacgagagtttcatgattctagccatttctgtacttccttttgatgtgaaatttttagttcttgacacccctcgatggtggaacttaacagctaggttatgatctgttgataaacattgcatagccaatttagtcgggtaagggaaggcagcgacagtttttggatgaacaaatacacaaattcacgatggtactctagttatagattgacagcctttggatgaacaaagactgcttttggaattgacatttgggttcacactgcagttttcgctttcggcacatataagaacccactgtccagttggaggtttccaatcgcacagctgaaatagcaaaatacataatgtggaaaaaatcgaatctttaaaagt

SEQ ID NO: 15118 - DNA, 2104 bp, Oryza sativa
  ref <308>: DATABASE ACCESSION NUMBER: AK065652
  ref <309>: DATABASE ENTRY DATE: 2001-12-06
gttgggccccaccttcagagaaaaccgcgtctccccaacttccaccgctaatttccgccgctggcttcgtactttccaactccacggcggttcggcggcgtacggcggcgacccccgccgcttactcctcttccctcctctcctcccaccggcggcgcacagccggccttccaccgcagcggagaggccggcgcgccaacgctcggatccggcctccgcgccgtggcccaagcggcgacggcgacgagcggacgacttggagcggcgtctcccccttcctcgtccggcctccgcgccgtggcccgagcggcgacggcgtcgggcggtgcttttcagctgtgcgcctgcgctgagcttcgcttttcagccaagaacgggtgaccaagtttggccactcggtcttcactaggctacacatgtggatgaggacgtggcaccgaatatgccgaacatgtggaggagcattgtaaacgcctcacaaaagaccgtacattagggaggggattaggcaacaaaagctcgtcgtccatccgcagatacggaactactcccctatccaacacctccgagtccgagcaacgcaagatggcgtcgtggtcgtcgcccgtcgccgccgccgccttgcaggtccatttcgggtcctcctgcttcttctccgcccgatcgccacgacagaccctcctcctaccacctctcgcccgcaaccctacactgaccatccagccccggccccatcccttccggaacatcaactcctcctcctcctccagctggatgtgccacgccgtcgccgccgaggtcgagggcctcaacatcgccgacgacgtcacccagctcatcggcaagactccaatggtatatctcaacaacatcgtcaagggatgtgttgccaatgtcgctgctaagctcgagattatggagccctgttgcagtgtcaaggacaggataggatacagtatgatttctgatgcggaagagaaaggcttgataactcctggaaagagtgttttggtggaaccaacaagtggaaatacaggcattggtcttgccttcattgctgcttccagaggatataaattaatattgaccatgcctgcatcaatgagcatggagagaagagttctactcaaagcttttggcgctgaacttgtccttactgatgccgcaaaagggatgaagggggctgtagataaggctacagagattttaaataagacacctgatgcctatatgctgcagcagtttgacaaccctgccaacccaaaggtacattatgagactactgggccagaaatctgggaggattctaaagggaaggtggatgtattcattggtggaattggaacaggtggaacaatatctggtgctggccgtttcctgaaagagaaaaatcctggaattaaggttattggtattgagccttctgagagtaacatactctctggtggaaaacctggcccacataagattcaaggcattggggcaggatttgttccaaggaacttggatagtgaagttctcgatgaagtgattgagatatctagtgatgaggctgttgagacagcaaagcaattggctcttcaggaaggattactggttggaatttcatctggggcagcagcagcagctgccattaaagttgcaaaaagaccagaaaatgctggaaagttggtagtggttgtgtttccaagctttggtgagaggtacctttcatctatcctttttcagtcgataagagaagaatgtgagaagttgcaacctgaaccatgagcctaacttcagtgttcacaacatcataattgtttctgagatttctggccattagttttttttttctgagaagtatcataccactccatagctgtttgttcgataaataaaacagttacctttgcacttataatgaggcttgtgagggtactgtgaaatttctctgaacatcttctactcttctcttttatccttaaatcaatctgggagcagtttgtaatacatacgtaaatttaaagctgggtgtttggtaattgtaaacaaatgtttcgaagagccgtgaaacattatcaattagcatgaagcactttaaaagtgctttccggatgctgcc

SEQ ID NO: 15119 - DNA, 1290 bp, Oryza sativa
  misc_feature (1038)..(1038): "n"=any one base of a, t, c, or g
  ref <308>: DATABASE ACCESSION NUMBER: AK065653
  ref <309>: DATABASE ENTRY DATE: 2001-12-06
ggctggctggctccacgtcggaccccatctctctcccacacacacgccttcgccttcgccttcgctgcacccatcggagccactcaattctccctccccaagaacatcccaatggccaatttggaagcttctactacatggagctcgtaggcgaaggaatccgctacttgtaggctagcagatagatcaagaaggcctggctttcctcctccccaagctcaccacgccgtcctgcaagtcgccgccgagctcgctcaagtcgcagctcggccttcccggcggcgggaagctccagccggcgcaggccgtggcaccgagccacctcaacctcctgctcctgctcggcgcctcgcagcaggaggccgccgccgtcccgacgcccaagagccggagcaagaacggtggcggccggagcggcggcggcggcggggaggacccgcggaggtcggattattacctcaaccttgggacggcggtgcgcacgctgcgggacgacctgccggcggtgttcgtccgggaaccaactacgacatctaccgtgaagatataacattcgtcgatccgttgaacactttccatggaatcgacaactacaagacaatcttctgggctctcagattccatgggcgcctactcttccgtgaaatcgggcttgacatatcacgcatttggcaactgacagagaactcgatagttgtccggtgggagctgtggggaaccccgcgtgtcccgtgggaatcatacggttgcttcagtggcacctcgagatacaaggtcgacaggaacgggaagatttacgagcacaaagtcgataaatttggcactggactttccccggccagcagccaaagtaggcagcattgctgacattgtcgtcgcctcatgcccaccaagccccaatttgacgttctgggacatggttgggagtactggtgatgggtgctcatgggcaattctctaccaggcggtggtggaaaccgtggagcgggaaggcaatgatccatgctggcattgctcattgaatggtctgctatactntgttcatagatgatgagcttcagggctagctgcttggtagtgagctttcttagggaagatgtatagaaggtggatacataaatcataatgctattaatcttggtacactgtagctctagaataacaattttagatacaatacatggtagataactatgtctcggatatcttgttacgcattctagaatgtatctaccagtctcttaagtctcaaaagttaatggctattcttagcaggtctttcaatatcct

SEQ ID NO: 15120 - DNA, 1743 bp, Oryza sativa
  ref <308>: DATABASE ACCESSION NUMBER: AK065654
  ref <309>: DATABASE ENTRY DATE: 2001-12-06
gggcaccaactccccaccacttcgcttcgcttcccttccctcctcacctctcccgcgcgcgcgagtttaaccgcttaattataaccgcctctcggattagcgcggctataataccgcgcgcgattggctgattagccctaggcaacgctcgctaacacgccaccacctcggcttcgctgtttgctgtttgctgctgctgcttctagggttagggtttggggtggggaggggtggatgcgcgtgggctggtggtggtggtggggatgacgccgcagcggtctccggcggcggcggcggcggggggagggggcacgccggcgctgcactacctgagcgggccgtacggggacacgacgtacaccaaggtgttcgtcggggggctcgcgtgggagacgcggagcgaggggctgagggcgcacttcgaggcgtacggggagatcctcgaggccgtcgtcatcaccgaccgcgccacggggaggtccaagggctacggattcgtgaccttccgggacccagactcggcgagaatggcgtgcatggacccgtacccggtgatcgacgggcgccgcgcaaactgtaaccttgccatcctaggccgtcctgggccagacatacctttcgcacctttaaggccggtcatcccatacaatggaggtgtggcggttccagggggcatgtatgtgcaaagcccaacatatcagcaacccccctacaactatccacaggcatttgtatatccttcttatggaccatcaacttatgggccagaatacatgtatcctcagaatgcatatggttcatatgttgggcaacagtatgttccagtatatggcggtcccaggacagtaggcccagcagtttacccatatgggcagtttggccaacctgtgccaggtgatcaaccgtattcacctggctatgtaccaggtcgcattctgccgctatctaatcagaatgctgcaaatgttgtacgcatgtcaacagttcagcaacaatatcctccaggagctccacgccctcagcaacagctcttgatccctgctcgtgcacaattcacaccaaacaacatttcggaacaaacgtcgggctgacataaggatgccaacaagtacaaatttgaggtatcctatagtctgcagcaggactaagaacagcagaactgctaattgggcggcatgcttcttttcttgcaaactgtcatcttttgcattctaaaggttctccttatccatggttacctgatccatataaaatgtgaatgtcaagctgctccgttggaaggggcaggaaggcgtgagagtttcgaagccactcttgcgctgcttctgtcaagtgtctgtgcattccccatctcctgccaggaattctgatagctggtggcctgtacatggaccaaaactggatgccggaaatggagtccggaatccagccctgtgtataatagctcaagtagggtccaaaatcgtagagctagtcaattctttcaaacgttgctgatgcgtctggttacagttgtgtatagcccaattctctcatcttcgtccttctcgtcatctccaatgcatgtgattgtgttgcattatgtacagcattagggcgttgggtcgcgtcctcggctggttgtgtaaattattcatcccaaaactgtaaaactgtttatatcactttatatgcaacgtgtaactaaataatggcagttccaatcctagaaaataatcaactgctcctacctgttaatgatcc

SEQ ID NO: 15121 - DNA, 2656 bp, Oryza sativa
  ref <308>: DATABASE ACCESSION NUMBER: AK065655
  ref <309>: DATABASE ENTRY DATE: 2001-12-06
gattttatctttcgcaaagaaaccctcgtctctcacccctcctctctccctcccttcccccgccttctccctcgcgctcgccgccggcgagcagccccggcggcgcgcgcggtgtgtacggcctcctctcgctcgcgcccccatcctcctccccctgccccgcgcgctcggccggcgagcaggtcccggcctccttccatctcggctcgaatcgaatcgaatccaaggttttcaaccgctgtgacagacgatggaggatgatgagaggggggatggcgatgagctgattgccgactatgtcgactgcctcatgtccctggacaccaactcccgctcttgccagaatgacgccctgattcttgaaggagctccagatgatgtagacgacgacgccgctgcggcggcggccgcggcggcggagcaggatgtgatgagagattttgctcctggtgatggtgatggtgatgctgatgctgagaatgatcccaaggagccggtgctcggcatgacgttcgagtccgacgaggcggcaaagatgttctacaatgagtacgccaggtggctcgggttccccttccgcgtcggccggtcccggcgatcgaagggcatggaggaggttgtaatcatgaagaggttcgtttgctcgagggaaggggcgcacaagaagaagcagccatcgacgtccggcgaggctaccagtaagcgtgagagggcatcgatgcgggaaggttgcaatgccatgatggaggtggtcagggacaaggaccattgggttgtctccaagcttgagaaggctcacaaccatagccttggcatcggcaccagatacgggtatcttcgtgccagaggattgcctgatgtgtccaacaagatcgctgcgatgggctctgacgggaccgcctctcttaggcagaatttccttggggagaccggtgacggccagggtcttcttgattatctgaagaagaagcaagccaatgaccccaggtgttcccatgccatacaggtcgacaagaatggttgtctgatgaatgttttttgggctgattctagagctaaagaagcctatcggcattttggggatgctgtcacatttgacacgtcatataagaagaccaagtatatgatgccctttgttaccttctcaggtgtcaaccatcatcttcagacagtaatttttggttgtgcgtttcttatggaagaaactgaatcctcattttcttggctgtttgaaacttggttagcagcaatgggtgggaaggcaccaggctcgttagtcactgaccaaaatagggctatgaaggctgcaattggaaaggtttttccagatacctgtcaccgcttctgcaagtggtatattttgagtagaaccaaacaaaaattatgtcatgcatactctgagcatccggacctgagggatgagatagaaagctgtgtgattgaatctgaaactatctctacttttgaaacatcatggatgtcaatcctcgagaaatatgacttgagaaaacatgcatggcttcaagcaatttacaatatacgccaaaagtgggttcctttgtacatgatgggtacattctttgcagaaatatcacccacacaaaaattggagaccatgaatgacttttataagaaatacttcaatacaaagacaacgctggaggttttccttaatcaatttgattcgaccatgacaagtcgatatgaaaatgaagcacaagcagatatagacactcggttaaatgaggcaactacaaggactgcatcgccaatagagaaacaggcagcaagcacttacacaaaagcagtcttcagtaggtttcaagaagaattcacagaatccttgggttatatcattcagaaaactgaagaaggcagagtaaacaaattcagcatcacaaaagatgaagatgatccatcagacacattctgtgtgacttataatgcttccagtaagatggcaaagtgtagttgcaagtactttaagttctcaggtattttatgccgtcatattcttggagtattcataatagttgatccacgcacacttccacctgattactttttgaaacgttggacgaggaatgccagacatgatgaattgttggaagacaacagcaataaccacaaagatgctacttgtcaatccattacaagccgttacaatgtcctgtgtgctgatgccatcagatgtgctgacaaaggatctgcatcaaaggctgtgtataaagcagcaaaagacatcttacagaaggcatatgaagaaatcattgcctatgaaagaaatcctggcagaggattacaaagggatgctataaacatcaatgaggatatcacaatagatgataccatgaatgatcaatctttgccagatttctggacaaaaggaacctaaaatcttctaggccagcttcttggcaactctcgatctccaatctgaatgtatatatttttgtcttctcttggagatgcgatgcaaattaccaccattgcatggtgtcatgcttgacatgcaatttccatgttgaattgaccagtggagaacagcatatggaccaagatgaaaagagtttccaccgatggtaaatgaaaaatgttattatatgactatatgctctttaattttattttctgctacttcagtatcagtcttgcc

SEQ ID NO: 15122 - DNA, 2156 bp, Oryza sativa
  ref <308>: DATABASE ACCESSION NUMBER: AK065656
  ref <309>: DATABASE ENTRY DATE: 2001-12-06
gagaggagagagactgagggagggaggcaggaggaaggaggaggagtaggacgctgcagtggtgggtggcgtagctcccgatccgggaagccgacccggtctgggggatttgctcctggcgcgcgctcgatcgagagggaggccagggttgggttggggggagcgtgaagaagcgcgcgcgcggctatggggaaggggacggtagtggggacggcggtggtggtgtgcgctgcagcggccgcggcggttggggtggcggtggtggtgtcgcggaggaggaggagcaagcgggaggcggaggaggagcggcggaggagggccgccgctgtgatcgaggaggtggagcagaggttctcgacgcccacggcgctgctgcgcggcatcgcggacgccatggtggaggagatggagcgcggcctccgcgccgaccctcacgccccgctcaagatgctcatcagctacgtcgacaacctccccaccggggatgagcacggactgttctatgctctcgatcttgggggcaccaatttccgtgttatacgtgttcagcttggaggaagggaaaagcgtgttgttagtcaacagtacgaagaggttgccattccacctcacctgatggttgggacttctatggaactgtttgacttcattgcggctgagttggaaagttttgtcaagaccgagggagaggatttccacttgccagagggcaggcagagagagttaggcttcaccttttctttcccagtgcaccaaacatcaatatcatcaggcactcttattaagtggacaaagggattttccatcaatggcacggtgggggaagatgttgtggctgaattgagcagggctatggaaaggcaagggcttgatatgaaagttacagctcttgttaatgacactgtaggcacattggctggcggaagatatgttgataatgacgttgctgctgctgtaatattaggcactggcacaaacgcagcctacgtggagcatgcaaatgcaattccaaaatggactggattactacctagatcaggaaatatggtgattaacatggaatggggaaacttcaagtcagaaaggcttcctcgttcagattacgataatgccttggactttgaaagtttaaacccaggcgagcagatatatgaaaagatgatttccggcatgtatcttggagagattgtgcgcagaatcttgcttaagcttgctcatgatgcttccttgtttggagatgttgttccaacaaagctggagcagcgctttatactgaggacgccggacatgtcagcgatgcatcatgatacctcacatgatctgaaacacctgggagctaagctgaaggatatcctgggggtcgctgatacttccctggaagcacgatacatcacccttcatgtctgcgacctcgttgcagagagaggtgcacgcttagctgctgctggtatatatggcattctaaagaagctgggcagggacagagtgccaagtgacggtagtcaaaagcagaggactgtcattgctctggatggtggtctctatgagcattacaagaagttcagaacctgcctagaagcaacgcttgcagacctgcttggagaggaggctgcctcatcagttgttgtcaagttggcaaacgatggctctggcatcggagctgcacttcttgcagcatctcactcccagtatgctagcgtcgagtagtaacaggagctcatgggactgagctcccagtgtagcttgttttcctcccattttccccgtttctttccaatgggagttcgtttccctcctgcgattcgcatctccttttgctattctgcagtcacataaacgagtgcctgtgcagcgggatgtagctagtatggcgccaaagagtttgcagttatcacatgaacaagcatttgcaactgcagggaagtgaaaacgggggcttgaatgatgccgttcttttcctgcaaattattttccccctttccctgtaagtttgtattgtgatgcgatgtcgcaaaccaatcacagcggtttcgcgtgtagccttttgtcattcagatttcagaataaagagggggacataatttcacttttcgtatgtcagtttgaactatgtatgtactcttacacactggtatcaaagctcaaatgatctgatc

SEQ ID NO: 15123 - DNA, 2647 bp, Oryza sativa
  ref <308>: DATABASE ACCESSION NUMBER: AK065657
  ref <309>: DATABASE ENTRY DATE: 2001-12-06
gattggcagcagtaggaggtcactgcactagcccacatgccgctgcagtagctagtcgtcgtagcagcagcagtatactactagtagtagccttcttggccttcttcttcttcttcttgcacagatcttgggggcgcaatcagccagttgcaggcttgcagcagacgaacctcggagagagaggcctgcgttcttgcgaaagaggagctagagcttcaggataaagcagacaccaattcctcaaggaaacaagttcttaaattgacacctccttcataaactattttataaagattcaaagataatagaatagagaaaatgcatcaagacagtttcaggtcggtggtttgcagatccctttcaaagagtctttcctccaaaaccaaagagagcagctaccctgaaatagctcaatgtgctgtcccttgtgttgtcacattgcaacctacggtttgtcgaggctgccaaggccgggattggagcccatcacaaagcaacagggaggatatgtccatgatgttgcagaaagattacctgatggcatcctcgctctcgaggcgcttcgcggaggacctcctaagaggagccatggacctccaggattcgctcacgatgctcgaaaagttccaaactgcgtcgcggagcatgagagtgtcaaacaagaagagaaggccagagggttgtgagagatcaccggacacaagtggattccgtggagccctgtcggaagcgtcaaacgccaagaagatggtgggtagaagcgccagcagtggattggatggggaattaacgaattctactgatgagctgaaaagagtgatcaaggatagcttttacaggaagaacatcttgtcggtatatcccaatgatgaacaggcttccatgagccagtcattacattacatgccaaacaagaattcgttatccaagcctaatgagcagaagaaggcagcaccaagatcattgccatcttgtgcaccagggcagtctgagaagtccaaatccccaagcttggtagcaaagctcatgggccttgatggattgcctacacacaatagcaataccttcaaaaaagacgagtcaatgaagacagtaagttcaccaagggcactttttgatattgagatgcctaaggtccagcaaaatgatgctcatatgagttctccttattcccgaaaaagtaatgtttctctgtatgattctactgtggttaatgagattggctcaatgaaaacaattaggagggaaaaaggcatagagcaacctcaaacccgagcagccaaggatatcaaggttgtatctcacacaagtcgaaagcaacaaataaaagagaccactgaaatgggcaggagaagtagtgacaaacaaagacctcattcgacttataggaacagagaagggaggaaggataccaagtctaaaacaggatcagcatctcggtctagtgctaatacagtgaaaaggcctgataagaaatcaatgattgcatcaagtagcagctcttcaacatgtcgcacaaggaagccggtcgcacgtaaagcacctagtaattcgagggagaaggcagtgtccagtagaagtcgcaagaactcaactattgatgacattgtggcatatgagctgcacagagagttcatacaagttgatggtccatccactgaacatagcgcaacacctagtgatgaaagctgccaaagtgttgttgattgggacacagagcctagcattgatggcattcgggaagatttgagtgaatcctatgaagcttcagtgactaccagctctgcggaaagaaccgattcagctaacggagatccttttcacccatcgacacacttagtatcaaaaaatgaagttgaaataaaagacgagatgagtctgcttctcctaagtgatcaaccattccttacccgggcagcagaactcattggcatcggcgaaccggggcatctgatcaaccgatataaaggtatccgcaaggcccagatgggtaaccatgagcttttcgtggacaccgcaacagagcagctggagcggaagcatcgtcagcgaaacagcttgtgttacacaggaatttggagccagaaatgcagaacagcaccatacttctcactggaggcattgctgacagatattcgcgatgcgactcgaaagctgagcatctataccgaagacgacgatggctgcactacaaaagacacactatacatgaaactggagaaggatctgagatgcacagatgcgtcgatcaacagcgtgtgggatatgggctgggaagattggattttcatggaggaaacacaatgcttcataagagatgttggggagagcattttatcagggcttatcgaagaagctgctctggacatgtgggtacattgatctgggaaaatgaagcctaggtggttcttgcgttcttggagaatttctagctttgttctccacttggctggcacttctcatgatttccagtttccagtttgtatctatcttgtgttacatttcacctgtgtaaaaaatgaaaaatgtgcaatgatttagagagttgcctaaagaagtgatggagttgtcttcaccaagaaacaattgtaatttgtgcacaaggtatgaaggcatgatgaatagacaaagagcaatgtttcgtttc

SEQ ID NO: 15124 - DNA, 1155 bp, Oryza sativa
  ref <308>: DATABASE ACCESSION NUMBER: AK065658
  ref <309>: DATABASE ENTRY DATE: 2001-12-06
tggaaatgagaaggcacaggaaattggtgccatggctctttttaaccttgctgtcaacaataacaggaacaagggacttttattgtctgctggagtaatcgatcaacttgagcagatgatatcaaatccacgcctatctgctccagccacggcactataccttaacctttcctgcctacctgaggcaaagaacatcattggttcgagccaggctgtgtcattcctagtagaccgtctgttcagtcatgaggcccgcgacacaaaaggcagctcttgcaagcatgatgccctatacacactatacaatctctccaaccaccaggccagcgtaccgtcgcttttgtctgcgggcattgtggaagctcttcactctctcctttcggagtccctggcgtctgggggcctgggttggacagagaaggcccttgcagtgctcatcagccttgcggcaacccaagctggcagaaaagatatcatgtccaccccaggtctgatcagcaccttggcgatgctgctggacaccggcgagccaacagagcaggagcagtcggtgtcctgccttttggtgatgtgctcagccgatgacaagtgcatcgcaccggtgctgcaggaaggagtggtgccttccttggtttccatctcggcaaccggcacaggcaaggggaaggagaagtcccagaagctgctcaagctgttccgggagcaaaggcagcgagatggggcacagcctgtgccgcagcaagctcagcagcagcagcagcagcagcagcagcagcagcaggcgggagagaccggtaacggcaccatggtgtgccgccgcgactcaaaacagctgtgcaagtctaaatcgaggaagctaggaaggactctgagctcactgtggaagaacaggagcttctccctgtaccaatgctagcagatttttgagctgagtttgatcagtggatatgtacatcttttcttgttccatgtttctcttgatctttcttttttttttgccttctttgttgtttccttgtgtaaagtaaaactatcttcccccccttctcggtgggttgatgtaggccatttcctctttgtttttctttgccaagatatgtgcatagctcatctttcactctacttaacaagttcagatcagatcatcagattgtc

SEQ ID NO: 15125 - DNA, 3204 bp, Oryza sativa
  ref <308>: DATABASE ACCESSION NUMBER: AK065659
  ref <309>: DATABASE ENTRY DATE: 2001-12-06
ggctgacggtctctgtgcagactgcgctgacagttcgcttccgtataccagagagaaaccagaagctgcccaactagtcaaagctccagtttcgctttcgcacaggcaacagaagccatggcggagatgatcgccgtgacactctcggcgaaggtcgccgccgcgctgtccggacccgcggccgtcaggctctcctctctcgccggggttcgctcgggcatcgaagcggcggcgcgagacctggagctcctccgcgccttcctccgcttcgtcgactccctccacggcagcgacccgctcgccgacgcctgggttgaccaggtgcgcgacgtcgccttcgacctggaggacgccgcggacgagtacgccttcctctccggccacggcttcttccgccatggcgctaacttgggcgcctggttcgcgctctccaggcgcctgtggaggtctccgcctcgagctcgggtggcgctggtggcttgtctgcggcgatgatcggtcggaagatagcagaggcgtcgcacttcgtagaggagggtgagatcgttggttttgcgatgcacgaaaggttactgatgaaatggctgactggggatactgacccccggcagctgctgatcgcagtctgcggcatgggcggcgttggcaagacaactcttgtcacaaacgtgtacaagaaagtcgctgcaacctgccactttgattgcgctgcgtgggtggctgtctccaagagcttcacaacagacgacctccttagaagaattgccaaggaatttcatcgggataaccgcggctgcgtgccgtgggacgtggacaatatggactaccgctcgctggttgaggctttgcgtgggcatctcgccaagaagaggtacttgcttttgctggatgatgtctgggatgcccatgcgtggtatgagatccgtcatgcttttgttgacgatggaaccaagagccggataatcatcactacacgcagtcaggacattgcttctctggcatcatcgaataggatcatcagactggagccactttctgagcaggaagcatggtctttgttttgcaacaccacgttcagggaagatgcagaccgagaatgcccatatttatctgaggcattgggcttcaaagattctggacagatgctgtggcctgccattggcaattgtttctgttggtaatctgcttgttttgaaggatagaacagagtttgcctggaaaagtgtatatgacagccttgtgtggtatgaaagcagtgatcatggaattgggcaggtgtcaagcatactgaatctgagcttcgatgatctgccttaccacttgaagaaatgttttctgtattgcagtatataccctgaggattttatgataaagaggaagattctaatcagagcatggattgcagaaggtttaatcaaggaaaagggacagggcacaatggaggaggttgcggatgattaccttaaccagttagtgcaacgttccctgttgcaggctgctgtccagaatgagtttggacgtgcaaagcgctgttgcattcatgacctgatcagggaaatgatagtgcacagatcaacaaaggaaagattctttgtgttctctaaatgcactgtaacattgaagtcaagcaaaaaagcccgtcatcttgtatttgaccgatgcagaagtgatcgtttgtcagctcccaaaatgaactcgcttcgctccttccatgcatttaaggcagatttggacgcctcactcctctctagctttaggttattgactgtgttgaacttatggttcactccaacagctaaactgcctagtgcggtggccagtcttcttaatttgcggtatcttggcatccgttccactctcatcggtgagcttccagaggagttgggacaattacataacttacaaactttagatgctaagtggtccatggtacagagattaccacaaagcataacaaagctcaagaacctgcgccacttggttttgtatagacgccgatctgcagatttcacctatccaggccctggtacggcaattgcgcttcctgatgggctgaaaaatctgacctgcctgcagactcttaaatacattgaagctgatgagaagatggttagatccttaggaagcttaaagcacatgaggagcctagagctatgtggtgtgcatgagagcaatcttattcatttgccctcgtccatctccaaaatgacttgcctactgcgcttgggaattatcagtcaggatgctaatgtaaaattagacctggaaccattctatcctccaccaataaagctacaaaaacttgccttagcggggatgttagtaagaggtaagttaccttcttggtttggctcccttaataacctcatgcagttgcgattgcattcatctaacctcatggaagattcacttggattgctctcatcgcttccccggttgttgcatcttagccttgtcaatgcatacagtgggaagagtttgacctttgcaaatggttattttccagcccttaagaaactaactttgcacgacttgcctaacctttctcacctggagtttcagaaggggagtcttgtagatctacatgtgttgatgcttggccgatgtgctcagctaaataaactaccccaagacatcaggaacctggtaaatcttgaaaccatggatctttttgaaatgccaagtgagataatacagaatatacagaacaatgagatattacaggaacataatcatgagtctgagcacacaatagtaatcaagaacatccgttggaataatgggaaattgttggaggaaaaagtttatatcaacctatcactattggaaagtaggcccttcatagataaagagcagcataatgtaaagtcccaagctgaaattactgcaggtagaacacacaatgaatgatcaggtgttctacatatatgaccaacactgacttgcgggcagtttatataagcataaggcaggctccttcagttgtcaacagtcttagccttttaagagtagagcttggtgcagctgatgtggttcagtgagtaaatttgaatggagacacctattctatgatggattttaatttaccctctattttcgtgcctttagtagcctttgtatttctagcaattgcaatggctttcttttatttctttgtgggcagaaaaataagattgttaagaatcgacaggaccgatttttctc

SEQ ID NO: 15126 - DNA, 1179 bp, Oryza sativa
  misc_feature (169)..(169): "n"=any one base of a, t, c, or g
  ref <308>: DATABASE ACCESSION NUMBER: AK065660
  ref <309>: DATABASE ENTRY DATE: 2001-12-06
tgaggttgagtggtgaaactgtcaaaagagcaagtaaaccctccgaattcagcaaagcagcttaagaagacagttagcgacattaggcatgacgtccaatctgggatcaagcaaacacgtcaggccaagatgcaattccaaaaaatcaagaagaggattcaaagcttcnattggtgggtaacatgcatcaactccaatactgttgttgcggtgcttattgccacagttgcctttgcagccatatttactatccctggtaattttctggaagatatgaaagatccacatgatcccaacatgaccttagggcaagcatttgtagcaagcaatccggcatttataatcttcttggtatttgatgccttggctctttttatctcgcttgccgtcgtcgttgtccagacctctctaattgttgttgagcagaaagccaagaagaagatggtctttgtgatgaacaagctgatgtggatggcatgcctttgcatctcagcagccttcatagcactaacatatgtcgtcgtgggccgtgatgatcggtggctagcttggtgtacaatggcaatcggcaccgcgatcatgctggccacccttgggtccatgtgctactgcattatcgctcacaggatggaggagaagaacatgaagaagatcaggaggtcatccaccagccagtcgtggtccatatcagtcgattcggatacagagctactgaacaacgaatacaagaagatctatgcactttaggataacaatataacctgtggtcgagtcttgtatatatcgaagcccgtttgcctgatgaaactccatggcattcagcggagtttgactcacaaagtatatttaggcctagaacatggcagctttgtgcaactgaagcctccttttgtgtagagaaaggaggccatccatccatctcactgcatatgctactatatagaatccaggtgatactttgacagcactattattagacatcataagaatattggtaaagcagaatgtactcttaatactcaccaatgtatatctgtgaatgatgataatgaaaaaccatgacaattatactagtatagatagtggaataaactgccattatctgtcaaagatgtactgtcactgatgctactacatgagctagaaaatgaaaatgatgcacgattactgcacactacc

SEQ ID NO: 15127 - DNA, 1052 bp, Oryza sativa
  misc_feature (84)..(84): "n"=any one base of a, t, c, or g
  ref <308>: DATABASE ACCESSION NUMBER: AK098934
  ref <309>: DATABASE ENTRY DATE: 2002-08-28
gagaattaatacacacactccatctccatggcacccacgccgttgttcctcctcctgctgctcaccggcgttacggcggacgcnagcacccgggctacgcggagggcgatggcagcagctgcgacgtggcggcggtagcggtggcagagaggcgagaggagttcgacggcgggcggatcgtggacatcagccactactaccgggaggagatgccggagtgggagtcggcggacggcaccggcggcgggttcctgcggctggtgcggtcgatgcgcaacggctccgacatcgccaacttctccgagctccgcctcacggcgcactccggcacgcacgtcgacgcgccgggccacgtcttcgaccactactaccacgctggcttcgacgtcgacacgctcgacctcgccatcctcaacggaccagcgttgttggtcgatgttcctagggatagcaacataacagctaacgttatggaatccttgcatattcccaaaggagttcggcgagttctctttcgaactttaaatacagacaggaagcttatgtggaagaaagaatttgatacaagctatgttggtttcatgaaagatggtgctcaatggttgattgataacacagacattagactagttggcgttgactactcgtcagtcggagcgtttgatgaatgcattcctgctcatttagtttttcttgagaaaagagaagtcatccttgtggaagccttacatttagagcatgttaccccaggaatatataccttgcattgcttgccactaaggttacgtggttctgaaggttccccggcaagatgtattctcatcaagtaacatatgcttataagttacatcgacatcttatatgtgttgaaatgttgaatggtgttgatggttgtcaagtcagatgcatccacctaggacatatgtatatgacaaactatgcatagtatttgacacatatatatgattgtaaaataagatcatgttgccttctaacaggttaatgtctgtgcatctatcagctataaacttatatatattactattgtaatt

SEQ ID NO: 15128 - DNA, 2784 bp, Oryza sativa
  ref <308>: DATABASE ACCESSION NUMBER: AK065661
  ref <309>: DATABASE ENTRY DATE: 2001-12-06
gacgtatcgctctccctcctctctctctctctctctctctctctctctctcttcgccgcgcggcggaggcgttcgtcgcgagctgtcggcttccctcctcgcgcccgcggcggctgtggccatggaggtccccatctccggcggcggcggaggggagaggttctgccacgcggcgcaggtggtgggggcggacggggagatggacggggaggcgatggcgcggttcgcggcgggggcggggctcctgggccgtggcctctcctacgccgtcgtctccatcgtcgggccccagggcagcgggaaaagcaccctgctcaaccaactcttcgggacaagcttcacggagatggatgccttgaaagggaggagccagactaccaagggaatttggattgccaaggctgtaggcattgagccgtttactgttgtaatggatttggagggcacggacggcagggaaagaggagaggatgatacagccttcgagaagcagagtgccctttttgctctggcagtatcagatattgttatgataaatttgtggtgtcatgatataggacgagaacatgcagctaataggcctctgttgaaaacaatatttgaggtattgatgcgtttattcagcccacgcaaaacaacgttgctacttgttattcgcgataaaaccaagactccactagagtatctaacccaagctctgaaggaggatatccagaagatatggaatgctgttcgcaaaccagaagtttacaaggaagctgcactaagtgaattcttcaatgtggaggttactgctctgtcaagttacgaagagaaagaaaatctatttaaggagcaggttgggcaactcaggcagagatttattcattcaatcgctccaggtggtctagcagctgatagaagagatcatggttgctactgttcggtgtgaagagattgcggatgaaaagctcagaagtttcatatctgataagggctggttggagctagaaacagctgcaaattctggtctagtaccaggctttggaaagaagcttaatgctattcttgatttttatctatctgagtatgacacagaagccatgtactttgatgaggatgtgagaaccgctaaacgccaacagttagaatctgaaatcctaaaacacacatatgatgctttcaagaaaatgttagaacacctgcatcatgtggttctgaacaaattcaaaagtgatctagaacaatcattaaggagcggtgagggatttgcagcatcagctcgttattgtgtgcagtcatcaatggcggaatttgatgctggattgagagatgctttggttaagcatgcagagtgggacacgacaaaagttaggagcaaactggagcagcatatagaagctcatgcaacatctgttcggggtacaaaactggctgaactaaaggctaattatgagaaaaaactcttggatacacttgctggacctgtacagtcaatcttggaaactggtgaaaaggactcttgggcatgtattagaagactttacaggcatgcgactgaaagtgctattttggcattctcagcttccctctccgagtttgaactagaccagacaactatccgtaagatggtcatggaattaagagaacatgcaagaagtatagtagaagagaaagctagagaagaagctgggaacgttctgatgcgtatgaaagaaaggttttccactgtgttgagccgtgataaggattccatgcctaggacatggaaaggaaatgaagatatacgtgcaatcactagagaagcacgcttagcggctttaagacttatgtcggtaatggcagctgtacgttggacgataaaccagataaaatagatcgggctctaacgactgctcttttagatggaggaccgctttcacagaaaaggagtattgaattcacatctgatcctcttgcttcaagcacatgggaggaggtgtcagaaaagaatacgctgatcacaccagtgcagtgtaaatccatctggaggcaattcaatgcagagacagagtatgctgttgcacaagcaatttctatgcaggaagcacacagacgtagcaataattggctgccacctgcatggactgttttgcttctcgcaattttaggttacaacgaatttatattccttctaaggaaccctttatatctgctggggctcttcgtcgccttcgtagtatcctatgctgcatggttgcaatatgacatcacagcctattttcgccatggcacgctctcaggtcttctgactattacatctgggtttctccccacaataatggacatcataacagcagtcatcaacatgagtcacaaccagaagagctcctcgcacccgcctcgacatcgtcccccgcttcatcctcaaagcttcaggaaccaggcgcagcaacagtctcaggctcaggtgcagtatcaggctccaagttcactgtcatcatcctcttcggtgggctccaacagcgatgacgaatcctgaagcctcataaaacatccctgtagaagacacgttccagtctccaggaaggactttgtataaaagaaaaaggaaaaaaaaaagaagaaaacttgatgtgtaatgtactacatacactgtgtgcatagctgtgagcagagttggtgatagctgattagctgagcagcataagttcctggataaaccaactgtatgtcagtatgtgtagagatgatggatggaaatgaactagatgtcgaactaaataccggagtaatagtaaatttcttcttactggttacttaatt

SEQ ID NO: 15129 - DNA, 1123 bp, Oryza sativa
  misc_feature (278)..(278): "n"=any one base of a, t, c, or g
  ref <308>: DATABASE ACCESSION NUMBER: AK065662
  ref <309>: DATABASE ENTRY DATE: 2001-12-06
gagtctctgcctgctgctactgctgctgctctcgtattgggggtcacttgttcttcttcttttactgacttgttgaattgaacgcaacaatttcttggtcggaatccaggagggagagattagagcaaggagcagcgtctgaggcgtgaagaccactttgtgctgttctgactccctgccgaaatggcccataaaggagttcctaaatttggaagctgggaggatgaagaccgtggtgaacacctctacacacagtatttcgaaaatgcccgcaaggntaaatctccagggaggtctgttaatccaaacaatcatcatggagatactgaagcactctctaaggcctctcccctgcacgctggatctgatccagccatgagaaagcccaaggatgacagacgctcaaaccgagaaggtgatcttcgtcagcacgaaaccactgttcgaaaaccatatgctgggtcacctaatcatagatatggggatcataccaactatgacaatgctgtgagaaaaaccggcatagagaagtcacccgttcatccccgtcaccaggcaagagctgcaaacaagggtggagtttcgtctccttcacgtgaccgtaggggttcattggaaggaaaccgtggatctgctcccactacacctggaaggtccaagttcagatcaactggccgtggtgatgagacgcctgatagaggatcagccgtgccaaagtttggagaatgggatgagaaagatccttctacaggtgaagggtttcactgacatatttgagaaggtgagggaggagaaacagtctggtaccggcaacgctcccgtcatgaccagcgaggcagatctatatcaaacgctatcagacaacagcaaatagtgaatcgcacaggctgctcatgctcagttggtcaagaactgaactgacagccatccagccaagtcctgtcagcgaggcctacataaatttgtgttgaaatgtatcattgtgagatgaatacctccaatctgttgtcattgttgagatattgtttggtagcgtagacatgacatgtatttacacgaatttgaagcttcttgttgagcattttgtgctatcttttgtataatgagggattcgtttatcttg

SEQ ID NO: 15130 - DNA, 771 bp, Oryza sativa
  ref <308>: DATABASE ACCESSION NUMBER: AK065663
  ref <309>: DATABASE ENTRY DATE: 2001-12-06
gtcccagccatcttcacacagactgatcaagtgatcatcagctagtgcctagtaacctctcactgacacactcacccagagttcatcagctaagttaagtgcaaaccgttcgacatggcttccagccataccaagccatccattctcctccttgcggcagcgctgctgctgctatcgtgcagctccatcggcggcgcggcgaggtatctggaggaggctgcgccggcggcggcggcggcggaggaggaggagcacccggcacaccccgccgtgccggagataccaaagcctgaactgccggagctgcccaaggtgcctgagctgcctcaccccgtcgtgccggagttgccgaaaccggagctgccgaagatccccgaggtgccgcacctcgccgtgccggagctgcccaagccggaggtgccggagattcccaaggctgagctgccgccattgcccaagttcgagttgccgccgaagccagagttccacttcccggagccggaggccaagccatgaaaaatgacgatcagatacccgtgcagcgtgtggcagtcagtgatctgaatcaaattcgcgtgggtgtgcgaagtgtaggacgttttgcgtgtgatcttgttcgtggtgagccccggctggtgtgatgtgatatagtaggatcgtgatgtttcagagtttcgtactctcgttgttgtattcagagattcagctggctgatggctgatgttgtgtacttcctatccgttcccaagtacttgtcatcagttattattc

SEQ ID NO: 15131 - DNA, 1679 bp, Oryza sativa
  ref <308>: DATABASE ACCESSION NUMBER: AK065664
  ref <309>: DATABASE ENTRY DATE: 2001-12-06
gattccccatttcccttatccggaaacagcctttgctttccccctccctaaaaccccccgcagcggcgcagcgccacctctcctcctcagccgaagcgtcggggccatggccatggcgatggcgtcgccgcccgcttgcccattcctcctctcgctctcggccggcgccaccgccatttccaccgtgtccgccgcctacggttccgtttccgccccgcgcgcgcctctcttcctcctcgcctccccgcgtcccgtcccgcctcgccgacccctcgccgcgggctcctcatctcccaaggccgcggcacccgccgccgtcgagatccccgaggagtacgtggacgatgttgatgcggtgaacattgcgcaggacgtcacccagctgattgggaaaaccccaatggtgtatctgaataatgttgtcgacggatgtgttgctaatatcgctgcaaaacttgagtacatgggaccttgcaggagcgtcaaagacaggattggattaagcatgattaatgatgctgaagagaaaggattaatttttccaaacaagaccattttggttgaaccaactactggaaatactggtataggcctagcttctgtggctgctgctaggggatacaagctaatagcaactgtaccttcatcaatagatgttgagagatgtgttcttctacgtgcatttggagctgagattgtgttaactgatcctaacaagggactaaaaggagctcttgataaagcagaggaaattgtttcgaagacaccaaatgcatacatgtttcagcagtttaacaattccgctaatagtgagatccactttcaaaccacaggcccagaaatatgggaagacaccttgggtactgttgacatactagttgcaagcattggcacaggtggcaccattacaggcactgggcgttatctgaaaatgatgaacaaagatattaaggttattggggtagaacctgctgaaactagtgtaatctctggtgataatgctggttatattccaagcatattagatgttcagctgcttgatgaagttgtgaaggttaccaccacagaggcagtcgatgttgcaagggaacttgcactaaaagagggcctgctggttggcatttcgtcaggtgctgccacagttgctgctattaacgtcgctaaaagacctgaaaatgctggaaaattgattgcggttattttccccagctttggagaaagatatatctctagcattttattccgtccgatatatgactcggtccgaagaatgaggaagagataactaacttctgccactccaggaagaagaaggttgccagttcttaaacctaacatacttccacggcataacagattttgaagggtgaggttccaggtagattacaacgagtagtgcctgaaattttgaaacgccataggcactggtcagcctcacagaaggttgaaattgcgcacggttgctgacgagtagtttgcaagcctgcaatttggttccagggaatcgtgtccaaaactattcataactgtaaatcatctgcaccaaagcgtctggaaccagaccacatccacgatggaatatgtagaattagatattgcagctagcatagtaggatctttcttcaatagtttaggcttggtaatggaacagatctgtaatgtgatatacctttgagctg

SEQ ID NO: 15132 - DNA, 1859 bp, Oryza sativa
  ref <308>: DATABASE ACCESSION NUMBER: AK065665
  ref <309>: DATABASE ENTRY DATE: 2001-12-06
gatagctcgaacacgtatgttcatatccacacctctcccccaagtacgagacaaggtctcgagaacaaaaccccccaaaccccacggcggcggcggcgagcggcggcggaagaagcagccgcaagaggcagcagctcgcgctggcggcggcatgggtgggagcagcgcaagcccgtgtgacctggacagggagttcgcgccccaaatcgcccagctcctcgccacccctcctctccaacccgcgcaggaatactacaatgggctcatacagtccaggaaacatgatggtataagagtgaacttcagcagcaagcatgggaaaggtgtttgtgcgaacaaggagtttgcagaaggggaccttattctgaaggatcaaatattggttggtgctcagcacagtcttaacaagattgattgcgctgtgtgcagttattgctttcgcttcattggttctatagagttccagattggacgaagattgtattggcaaagcgttggttcaagcagtgactgcactaataggaggcattgccatgagagtgatttgggatcgagtgccagttcttctggtgcaacaaaggaaaacagtagtactttgccagaagaggtcttaggatcacttattactggtgacatgtcactgcctttcacagaccattttagtttgcctcaagttgttccttgtcgtggatgtgaggaagaacgctactgcagccaatcatgtgctgattccgactgggaaacttatcactctttgctgtgtactggatctaagactgaaccatcccagagatctgctcttcagaaattcatagaacatgcaaatgggtccaatgatatttttcttgttgctgccaaggctatcactttcactctgctgaggtacaagaaactcaaaacgcagcctgaatttcaaaataacacagatgaatcaaacttttctttgcttatggaagcatggaaaccactttcgatgggctacaaaaagaggtggtgggactctgttgctttgcctgaggatgttgattcctgtgatgaagatacatttaggcagcaaattagggatctagcacttacgtcattgcagcttctcaaggatgctatttttgattctgagtgtgcacccttgttctcacttgacgtgtatggccatttaattggcatgtttgagctgaacaatcttggtttggttgttccgtctccagtggaagactatttcatacatattgatgatcttccagatgatgagaaggaggaagctgaaaaggttacaaggccatttctagatgctttaggtgaagactatgcagctccttgtgaggggacggcattctttcctttgcaaagctgtatgaatcattcatgttgtccaaatgctaaagcatataaaagggatgaggatactgatggtaatgcagtgataattgctctggagcctatcaagaaggacgatgagattaccatatcctacatcgatgaggatgtctcctacgaggagaggcaggcggagcttgcagattatggattcatctgtacgtgccctaggtgccaagaagaaaagcccaactgaacaagatccacagtttggaggttcctgaaatttatttttttggtgtggaatatgcaattgaagttttgacgactccatttattttattttttttgtctaggatatgcaattgagattttgacaactccaaaaatgttaggataggatatgcggaaagaatgatatgatacgtacttatttgagtggatgctggattttgctgtgctaatgttggatgctgcaggaagtttttattccttctgttcagttgagatttttccttttgtgaaaataacacatttctgggacg

SEQ ID NO: 15133 - DNA, 2305 bp, Oryza sativa
  ref <308>: DATABASE ACCESSION NUMBER: AK065666
  ref <309>: DATABASE ENTRY DATE: 2001-12-06
agaacaggaaatacatgtcagtgtgagatttggagctctccaggtgttgagatcagcagttcataattatccaagctgtgcaaatatcatttgggcaaaagttcaatacattgttcttgatttattgcaaatgcaaagcttggaagaccaaagagatgctaattttgggcttcctaaagaagaatcatcaattaaaggaagatgtcttgtggctgccattaaggtaatagatgagtgtctgcgtgtttcatctggattcaagggaacagatgacctcaaagaatatagattgcaagatattcagcaaatttctgattgtaccataaacaaaactatcaaatctgcgcctcactttgagactgatgttcctggaccatcacaaaattttactttggacataactctcggaactaatcgttggattgaggtgatagaaaggcttctccctcaaggattatcacatggctctgctacggtcaggacagcatcactgacatgtttcgcgggcatgacttatgatgttttcttctccctgccagaaaacaagagggattatgtgacgtcctcatcgattcatgctgcattgagtgatacagctcctgctgtaaggtctgctgcatgtagagccattggtattgttgcatgtttccccagcatactgtcaagtcctagcctacctggcaagttcatagatgccattgagtttaacacacggaattcataactccagttcgtatcactgcatcatgggccttggcaaatctttgctcttctattcgttttagagcattagataccaatccctctgcaggtgtactagataaatcagccatatcattgctggttgaaattgctttgcgccttgctaaagatggtgaaaaggtaaagtcaaacgctgttagggctcttggataccttttaagatttatcagattcaataatcattctgacacagttgatgacccaagtaattccgttctctgtggagatcctgtctggcttgaaaggatggtacatgctttgatgtcctgtgtgacaacaggaaatgtaaaggttcaatggaatgtttgccatgctcttagcaacttattcatgaacgacaccttgagacttccagatatgccttgggcatcaagtgtttatagcatacttctgctactactccgtgactcaaacaattacaagataaggatgcatgcagctgttgccttagcagttccagtctcacggcttgattatggtagctcatttccagatgttgttcgaggaatcgagcatgttcttgagtcattgagttccaacagtttatcatcaccttcaaatttcaaacataaaggcaaccttgagaaacaggttacatttactgctcttcatttgtttagttttgtttcaccaaaagatgatcaaagcctgagagattttcttatcaagaaagcatcctttctagaagactggctgaagtcattgttctcattgttcaataatgttgaggaccagcctttggcaaatgaggccataaatgacgaggatggtttcagcccaaacgtggcacaaaaagctatgttgtcttctgctgtgaagtccttgctcgacatatatacaagtgaaaatcagcacactgttgctcagagatttgagcaattggcaagaagcctagaattatagtgtgaatgacaaaacatagatggtggtctcgatccccattaacaagcagcatgacagtggccgtcttcctcccggaaaagccaactcatcatctattcattttcaatctccttcataaagagaggcaacatgccctattgcaagtattccatgaactcaatgaagcttctgaatttcgatgataccagacgttggacattatgttcatgaacaagctcctggcagcttctaatgggaagggggggggggattcaaaactgcatctgcgtatcttatttatattgtaaaatagctttacctgttttttccaggtgtggccatgttctgcaccttatgtgtaaattttgagctttgtacaaagatttgcatgatcatatcattgtgagtgtaccatatatgtctcagcattttagtgaggaaatcttccacaaattttgtatgtacatttctggtagaccagatagcttcatgctacttaagatttgtcctgggcttgaatgcctggttagcttgattagaccactagcttgatgattgttcctcactatctattactcctatctgttagtactgaaaaactgatcagttgtcaatgtcttaatgcaacagaaaatgaatgccagccatttcagttggcgct

SEQ ID NO: 15134 - DNA, 683 bp, Oryza sativa
  ref <308>: DATABASE ACCESSION NUMBER: AK098935
  ref <309>: DATABASE ENTRY DATE: 2002-08-28
gctctcctcctcgtggccatgaccatggaagcctccatgtccaggacagtgtccatgctcttctccgccaggaggtgcatcgtcgccagcgccgccaaggacatcgagatagcacaaggaggaagaaggagaagaagcaacgatgtgaagcagcagcgagggtcacacggccagctcgccgtggccgcggcgacgacggcggcggccatgaccggccaatgccactgctgctgctgctgctgctgcaccggagcgtcagtggcaggaggtggcggagtgggtgtgcagggcggtggcggtggtaggggagctggacccagcgacggcgaaggcggcgatcggggtggccgggccggcgctgtcggcgttcgggttcctgttcatcgcccggatcgtgatgtcgtggtacccgaggctccccgtgagggagttcccctacgtggtggcgtacgcgccgacggagccgctcctcgccgtgacgaggaaggtgatcccgccgctcggcggcgtcgacgtcacgccggtggtgtggttcggcctcgtcagcttcgccagcgagatcctcgtcggcccacagggattgctcgtgctcctctctcagcaaaagccttagcaaactctgtttcgttcgttcgtttccatgtgaaaagtgaagcaaattaatacgctgtgattcggacttt

SEQ ID NO: 15135 - DNA, 2200 bp, Oryza sativa
  ref <308>: DATABASE ACCESSION NUMBER: AK065667
  ref <309>: DATABASE ENTRY DATE: 2001-12-06
gagaaggggtgtactagtaaacaaaacaaaaagaataggttgagactttcctgctatcgtcagcattttcagcccccctcccctgggctggctctgcatcatcattcatcatcagcagcagtcagtccatccaacgcgtcttcagtcctcacccgcagcaagaaagccacacttttcctcctcctcctcctcctcctcctccgcctcttcctcttcctcccccttcgttctccacacccactctcgggctgcggattctccggcttccgcgcctcttcctctgtcgggttaacaaagttactttcagcgtcagagggtatttcgtacaaaaaggaactgctgttggtacaggattatcagctgtgaacactttctgtttctagaggccattctctgtaacactttggagcatcaattttgtagcgtgctatcatggactactctgctggttcctacatgtggcctggcaattcaggttctgagaactataattttgttgacggttcgtcggaatcatatgcagaagaaggaagcctaccaccttcaggctatttcatgggagctggatcagatcgcagtttaaagatcacggagaatgaaaggaaccccactatgcttgcaaatggatgcttgccatacaacacccaggctcatccattatctggccagattctacctaagggtgagctccctaacaatcttctggatcttcaacagctacagaacagcagcaatctgcgaagcaattcaattcccccaggggttcttcagtgcaattcaacatctggaacatttgatgcgaaattggatacacctggtcttgcagaactgcctcatgctttgtccagttcaattgatagcaatggtagtgacatttctgcttttcttgctgatgtgcatgccgtttcttcagccccgacgttgtgttcagcattccaaaacgtttcctccttcatggaaccagtaaatctagatgctttcggtttccaaggggcacaaaatgttgctatgttgaacaaaacaagtcttccaaatgggaatccctcgctgtttgataatgctgccatagcatcactacatgatagcaaagagtttctcaatggtggttccatcccttcgtttggtactgtcctgcaggcactaggagcgggtggtttgaaggctgctcaacaggagcaaaatatccggaatatacctctccctacattcacatctggtagtcatttggcagttactgatgcacaagggccaccacttccttcaaagataccaccattgatccatgaccataatagtgagtaccctattaaccattcttctgatgtggaaccccaagcaaattcagctcctggaaatagtgccaatgcgaagccacgtacaagggctcgccgtggacaggcaactgatcctcacagtattgctgaacggcttcgccgagagaaaatttcagaaaggatgaaaaatctccaagtccttgtcccaaactccaataaggcagataaggcatcaatgcttgatgaaataattgattatgtgaaatttcttcagcttcaggtcaaggtattgagcatgagcaggctaggagctcctggagcagttcttccccttcttagggaatctcaaaccgagtgccatagtaatccatctctatcagcttcaaccatttcacaagggccaccagacatgccagactcagaagacagctctgcctttgagcaagaggtagtgaagctgatggaaacgagcatcatcagcgcgatgcagtatcttcagaacaagggtctctgcctgatgcccattgctctcgcttcggccatatccaaccagaaaggcatggctgctgctgctgcaatccctcctgaaaaatgaaaaaaaaaatgaaatcggaaaaatatggggggaacaactgcagaagacataataactcaacggctgcagaaatgtgctggacactgcaggttttgtgaatgaagtgaaatccaatccagggggtcataaaacataggaagttatctgactaattcaggcttatgacacaatctactctatagtctatagctattgtgtgcctgttgcacatcagttgatgtgtattcttttgttttttttgtattgcatccggatgctaattaggtagtagtgtttcctttgatgtacatgagtattatctatgcggttttatctaatgtgcatataaagc

SEQ ID NO: 15136 - DNA, 2714 bp, Oryza sativa
  ref <308>: DATABASE ACCESSION NUMBER: AK065668
  ref <309>: DATABASE ENTRY DATE: 2001-12-06
aaggcagccgaacgcggaccgacagtggttgctaatgcctgcgacccactcatcgtgtgggtgtgtcaaaaagctcgtcacgtcatttgggtagataccaagccccgctggacagccgacgcgacgctgtgccccaactgtggtgccgtccttacccatagcgatcaaggctgggactgtcctggatgcgaattacagcagccagccgctgattggtgggtagaagaccacgacgccgttgaggcttcgggacggcgcttccaccttgacgtccaagtgccgggatctttcaacctcaccaacgctacttgtgctctcgcagcggctatccatatgggtatccagcctgaggacgccttgcgtgggatcgccacagtgaaatcccccgctggccgctacgctacctgcaccatcagtggcactcgctgccgtctactgctgtcaaagaatcccgccggctggacagaatctctgccgctgacgacctcagatccactggtgctggccattgacgcagtggccgccgacggcaaagacgtctcgtggctatgggatgttgactacgaacagctagccggaagaaccgtcatctgtgctgggccgcgtgcccttgacctggccgtcagattgcaatacgccgaggtgaagcacatcgtcattgaggacctctctcaggccctctcctccccgctcctggccggaaagtgggacgccgaacaccctattgacgtgctgtcaacctatacacctttccagaaactgcgccgactcggaggactggcatgaacatcgaccgtcccaagatcgtcctgctgtaccagtccctgttgggcatctacggcgaccacggcaatgccgtcgtcctcactaaacgactgcaatggcgtggcatcgacgccgagctcctcatcgtcgagcctggtcagcctgtgcccaccgacggggccgtttacctgctggggggcggagaagacaccgcccagatcaccgccgtacaagagctcgaagctgatggcgggctgttcaccgccctcgacgacggcgcaatgctttttgcagtgtgcgccggctaccagatctgcggaaagtccttcaccattggggcccgtaatgaggtcatcaaagggctagggctcctcgacgctgaaactcgacgtggcccagagcgtgccgtcggggaggtgctgcacatctggactcaatccgacagcaatacctatcccattaccggtttcgaaaatcatggcggctggaccgaactcggttccgacgccaaaccgcttgctgccgtagagattggctggggcaatggcaaccgtcgtgacgaaggggctgtgcaaggtcgcgtcatcggcacgtatcctcacggaccagtactggtacgcaacccgcagctagccgaccacgtgcttgaaatggctctaggacgccgtttagagcccctcgatataccggagatggcggcgctgcgacagcgtcggatcgaggctgtgcgaaccgatcggtcatgagcttgtcacttcgattttgcatcgtgaccgaagtccgctaatgttatctcttgtcggcgctgctagctcaattggcagagcagctgactcttaatcagcgggttcagggttcgagtccctggcggcgcaccgaagtgaaagtcgttttgccactagaagtggcaaaacgactttttcatatcctctacagccaatcccgaccagcagcatacggttctgaactgatcacctgcacgattattcaccccattgatgaaatactgtgcagacatgctggggaggcagtgtagggtgctgcctaaagttgtgacctgtcgcacctgcagaaagtcgctgatgcgcacgtgatgtcgctgccgacatcgctgtatcaaggaggaagaagtcacatgatgcactacacacactcccgccgagcctttatccagggctctgtcggagcactggcgctcagtgccttagcagcctgctctagcggggactcgaagggctcggaatccaacaaacccgcagccaaagagggagacttcaccggtgagggcccgatcagctgggtccagggcaaagacctctccggtggcatggtccagaagcgactcgacgagtggaacgcaaagtaccccaaggaaaaagtctccctcattgagctgtcctcggaggctgatcagcaacgccagtcactcatcaacgctgcccagacgaactctgcggcttacgacgtcatcggccttgatctggtgtgggtagccgagttcgccgctaaccgttggatcgtcgaaatcccgtcagacacaaaacccgtcggcgtcatcgactcggtgtgggaaaccggctcctaccgcggcaaacagtacgccgtcccgtacaccactgacgcaccgattatgtactaccgcaaagacttccttgaacaagccaaggttgagatccccaaaacctgggaagacgttaaaaaggccaccgaagccgtccgcaagcttcccggtatgcagaacatcggcggctttggtggtcaatgggccaaatacgaggggctgacctgcaacatcgccgagttcatcaacacctgcggtggtgcgatcgtcgacgactcaggcaaggtgaccgtcgactctccggagtccatcaaaggcatccagacagccatcgacgccttcaaatccaaactcatcccgaccgctgctctggagtggaaggaagagg

SEQ ID NO: 15137 - DNA, 2620 bp, Oryza sativa
  ref <308>: DATABASE ACCESSION NUMBER: AK065669
  ref <309>: DATABASE ENTRY DATE: 2001-12-06
ggggggggggtgcgtatgcgtgcgtgtgcgctgcttcttctctcaagtggtggaggggaagaggagcacaaggagaggcagacggcgataagtcgctcgctcgccaattcgccatgatcgggtggggctccgctaccgtacacgccccggaggaagcccaggccccgcccatgctgctgagctcgtgatcctgcgctcctggccacaggctgcgattcggcgttggggtttctggtccgaggcggccatcaagatccgtgcttcttgtcctttggcccgggcggagtggtttctttcttgcacgggacgtgctcgacggaatgcctgtgaggggaattcgctcgctgtgagttgggaggggtggtagctgtgcttgcctgcttggtctggtcatggtggattgagtgcttgggggtggtgggatttggtccctgggcatggccggttcggagaggaccgtggtttggttcaggagggacctcaggatcgacgacaacccggcgttggcctccgcggcgagggacggcgctgtgctccctgtcttcatatggtgccctgcggatgaagggcagttctatcccggccggtgctccaggtggtggctcaagcagtcgctcccccacctcagccagtcactggagtcgctcgggtgcccgctcgtgctgatccgagccgagagtacccttgaggctcttctgcggtgcattgattctgtcggcgccaccagattggtttataatcatctgtatgaccctgtttctcttgtgcgtgatgacaaaataaaaaaagagctttcggcactgggaatttccatccagagttttaatggtgatctgctgtatgagccatgggaaatttatgatgatagtggacttgcatttacaacctttaacatgtactgggagaagtgcatggaattacctattgacgcatcaccgtcacttgcaccttggaaattggtgcctgtcccaggtttggagagtgttcgtagctgttctgttgatgacctaggacttgaatcaagcaaggatgaggaatcaagtaatgctttgctaatgagggcctggtctcctggttggcgcaatgcagaaaagatgcttgaagaatttgtctcccatggtctcctagaatactcaaaacatggaatgaaggttgagggagctactacatcattgctatcaccatatcttcattttggtgaggtgagtgtaagaaaagtatatcaacttgtaaggatgcaacaaatcaagtgggaaaatgagggaacatctgaagctgaggagagcattcacttcttcatgcggtcaattggtcttcgagaatattcacggtacttgtgttttaacttcccattcacacatgaaaagtcattgctggggaacttgaaacactacccttggaaagtagatgaggagcggttcaagtcctggaggcagggaatgacaggatacccattggtagatgctggcatgagggaactttgggctaccggatggacacataatcggataagagttatcatttcaagttttgctgtgaaattcctacttatcccatggacttggggtatgaagtatttttgggatgtgctattggatgctgatctggaaagtgatattcttggttggcagtacatatctgggagcctgcctgatggccatgagctcagtcgtcttgataatccagaggttcaaggtcaaaagtatgacccagatggtgtatatgtaagaacttggatacctgaactagctagaatgccgacagaatggattcatcatccatgggatgcaccgagctgtattcttgaagttgctggagttgagctggggtttaactatcctaagccaatcgtagaccttcacattgctagggagtgtttagatgattccatctccacgatgtggcaattggatacagctgagaaacttgcagaattagatggtgaggttgtggaggacaacttgagcaatatcaagacttttgacatcccaaaagttgttttgagggaaacatctccatgtgctttgcccattgatcaaagagtgccccatgctagcagcaaggatcataatttaaagtcaaaggtattgaaggcctcaaatagaagttctatttgtgttgatatgatcaggtcctcaaagatggaagcaacgagctctgtagcaaactcaccggtatcaaggaaaagatccttttgtgagactgcatttcatgtcccatcttattcatcttcagctgaagtgcattcgcatattcaagatcatggtggttccttagttgggccttcaagatatctcctgcaggaagcaggtagaaactatgttgatgaggtagaagatagctctaccgcagatagtggttcgagcatttcaagacaacgaaaagccgcatagttgctctgcttgacaaggaagggtgaaggtgtactcaactaagggtgtgtaggagtaaaacttgtgtgatcataaggaaattttgtacattctgtaatctgtttatttttgctttttgtgacacattctgtaactagctgagaactgagctgacacggtttcctcgcccaaaagaaaaaaaaaatgcaacatctttccttcgttgcaataagagaaacttctcatcc

SEQ ID NO: 15138 - DNA, 3141 bp, Oryza sativa
  ref <308>: DATABASE ACCESSION NUMBER: AK065670
  ref <309>: DATABASE ENTRY DATE: 2001-12-06
gacctcgcctccttcctccgccgactccctcccctccgccattgcagcctcgcctacggccttgagctcgtcgccgatccccgccaccgccgcgacctctgcctgccccccatgcctcggccggcgaaaatcaggaaaaaacatgagaatgtgtttgatcaattgatcaaggcgataaaagctcctgtggactttgatctgccgcctgtattgaaagaatggaagtcaaattactatgtgccaattaagcggagtatccttacccaccattgcatttaatctgtttcctttctcggagcagcaatgatttgcgtcctcctcatttatacttgcaatgtctctggttaaaatttcattccttggagcaatcattctacaaacttgagtgtatatttatcagtctctgctgtagcattctagattgattgtatatccgaaaatttactaaatcctaatgtactacaaagtataatatagcataggaaagtcagtggtttgttttttcaataatgtgtcttgtcacagggatgcatttaacaacggcttcaacaacgtgttttcacatggggttgtatttcaaaattgcttaagatggtatcttcaatattccaatctgttgaatctcatttttataacatagccatccaattactcgtttacaattgcatggctggaacatcttaatttcacaatgtaaacagaggacttgccttttactgctgtaaaatttctgtttgtctaaaattttatttagcattacggttgtccttaattctacgtaagatgcttatattactcggaaacgcgttgaggatgatggcattttttgttcctgtaccccttctggatcatccgcaacttgtgacaaagattgccaatgcgggatgttgttctcttgttgttcgtcgacctgtaaatgtgagaataaatgtgctaacaaaccgttccagcataggactttgaggaaaaccaaattaattaagtttcttctagacagagaaatgtggcaatggggtggtagctgaggaagatattaaaaaaggagaatttgtaatcgaatatgttggagaagtagtaatatggtgatcgacgcgaccaacaaaggaaacatgtcgcgcttcataaatcatagctgtgagccaaacacagagatgcagaaatggactgttgagggagagaccagagttggaatttttgctcttcgtgacataaaaacgggggaggagctgacctatgattacaagtttgtccaatttggagctgatcaagattgtcactgtggatcttcaaactgtcgaaaaatgcttggcatcacaaagcctgttaactcaattgtacttcataatggaaatctgtcacaagatcagcatgtccggaagaaaagaaagacatatttggagaattgtattggggagattgtccgtttgtggcatcgacgtcacagcatgtatctcgcagcaagtatatatgacttcaatgagcgcaatggaatacatacattattgtttaccgatgcaactattgaagaatttgatttgagagaggaagattgggacttcttaccggtatgatgttcttagcattaaccaagttacaaatatgtcctatttttcttatttaacatttggatctaccgtggcaacatgcggggtatcatctagttctctatatttctagcaaccatagcctgaagtttccatgatgttgtccactttatcctctacgtcatgcagaccttttgtataatccaattttatcataaatatatttattatttcagtaggtctttcctctactttatataaaaaatagtgtttagcattgccgtctttgatttttttatgtaaaaaaaggataatagtacttctgtatcctggtggtagcattaagtgtaatggagaacaacattctatagaaacttttggccgaatgtagctttccacatcgttatagcacatgttcggatggacctgtcttttcttcttgtcagcaacattgcttgtgctccccattgagtgtgtcaaccgcaaacttttttttgtttttactgattgggctgcgtataacctcctgatctgggctcttagcaggattatgtctaagatgttcttttattgaaggtttaacttgcataatgtttaggatttaatgtgcttgtttacgattctagttgaggaccaagagcttaggaaatgtttttgtgaacctatgagcacctgcactcattctcactgtaaaaggagttgtaactgaactagtatatacctctgttagcagcaatatgttatgcaggaatccttagcaattagacaatttaccctcctctaaaattcactggaatcttgaaatatgataacaattgattgaacctcatcctccattgctcttggaataactttgatgcatctatcgcaccatcattccttggtttgtagcttacagtgtagaagtaaataatgctcactatctgagcttgggcctagtttacttgatgtttcctgactgtttacctgaacttgctgtttatgaagcctgacttaaataaccgaaccttatcatttgcttctggcaaagtaacttaaccttatatgttattttcaggatccagatggtcctgaggaagtgtgagtgatctgaagcttcatatgaggatgtcatcgcaactgtgtcaatcggatgattgtactgttgggatttaacatgtggaagtgtttagctgcaatcatccacccacaaatcaattcttcagagcgtgtacccaacatgatactgtcctcctaaactgtaaaaagcttttttcaattgttgaatgttcattaatttttttcaggtttgtatcaatcgaagtgcatcttgtgatgcttgtaaaaattgttggctgggtgagtttacaatcgttgttgtaacgtgcgatggtgatagtttattagtttagtttatgctgttataccatgtagttatgcttgtactgagagctacttgaaccataagatatttcggtatgtctgctcttagatttgtaacgaggacttggaactctattcgtgctaaacctgggacttggcttggaacatgtaagatgctgctaattgtcgaagcaagtggcatgtactcttaagcaagcaatgcaaatttcagtgt

SEQ ID NO: 15139 - DNA, 1208 bp, Oryza sativa
  ref <308>: DATABASE ACCESSION NUMBER: AK065671
  ref <309>: DATABASE ENTRY DATE: 2001-12-06
gattcttctcgcacattcgcacgctcctgcatctccatccgtcgccaccacctccaccgcctccgcctccgcccccgccccctcttccgccgccaccaatgtcttcggcggccggtgaaccctcctcctcctccgccgccgccgccgccatctcttgctcctcctccaacgacgacgagaagccaccgccgtctctggaggggaaggagctgcggcgagtcgaggaagaggagcccgccgccgccgcgcgccccgagaagctcacggaggggtcctcgcgcgccgctgaggctgaggaggaggaggaggtggtggaggatgaggaggacgatgacgaggaagatgaggggaaggtggcggaggccatcgacctcggccccagggtcagcatcaaggagcagctcgagatggacaaggaggatgagagccttcggagatggaaggagcagcttcttggcagcgtcgatttgaactcagtcggagagtcactggagccagacgtgaggatcacaagcctgtgcatcctgtcaccggggcggccggacgtccttctgccgctgcccgtggagccgagcaactccaaggaaccatggttcaccctcaaggaaggcagcacgtacaggctcaagttcaccttctctgtcagcagcaacatcgtctctggcctccgctacaccaacaccgtatggaaggccggcatccgagtggacaaaaccaaggagatgcttggcacgttcagccctcagctggagccgtacacttacgtgacgcctgaggagacgaccccctcgggagtatttgctcggggatcatactctgcaaaaacaaagttcgtcgatgatgaccggaagtgctacctggagatcaactacaccttcgacatccgccgggactggccctgcaagtcctgagaagctggacaccaagcagaagaggatggcaggcatctgtgaaagaggcatgttcaggctgccctgtccctgtctgctctgatcttttcagagtgtaaggatgattggttacagcgattgtttgtagacacatagtagattcatttgtcaggtcagcattgttaatctgtgcctgtcgctcgagctcagttgtaaacttggaatgctgggtgttcagagaattgtactactagctccgttttcaagcaacggttgcaggttgaattgcctcgttgtgtacaacgataggcaaatggc

SEQ ID NO: 15140 - DNA, 1121 bp, Oryza sativa
  ref <308>: DATABASE ACCESSION NUMBER: AK065672
  ref <309>: DATABASE ENTRY DATE: 2001-12-06
gtcgccagcaatgtcgcaccagattctccacacctccaaccccacgctgccgacgccacctcagccgcacaaccaccacccgccggtgccgccaccgcccaagctcggtcgccgcgctgcgctcgccatcgcggccgctccggccatcctcagcgccacacccgcaccatccagagcgcaggaagcagcagccgccgccgcggcgccctgcatcgccgacctgcccgtcaccgccaaggccttcctggacgtgtccatcggcggcgagccggcgggccgcatcaccatcggcttcttcggcgacgcggcccccgccggcgcgtcgcgcttcctgtcgctcgtcacgggcgtcggctaccggcgcaaggagttcgtcaagatcgtgccgggctacgtgcagcacggcggcgtggtgtcgtacccggccatcccggcggtgaccgagcggctggcggcggagatgggcgccgtgcgggcgcaatgcggcggggagaggagcccgcacgcggcggcgggggcggtgtcgatcgtggtgagggacccgagcctgccgccgcccaagcccaagctggtggcgcgcggcgggaagctggaggtcgaccaggagcaggtgggcgtggtgcccaacggcaccgagttcgtcatcaccaccggcgacgcgccggagctggacgcgtcggcgctggtggtcgggagggtcgtggacggcatggacgtcctcggcaagatcgcagccgtgcccaccgtcaaggataacactgcctctccatacttcagagtagccaagttgatcggggacaagagagcagtggttgcagagcgagggttcaaccgcccatacaccaagatcctaatcaccaattgtggagtcattgaacagcagcaggagcagtagagtgctttgtttctgccttgcctttcatgtctctagtttgtgcaaagggtaattattattggaactctgtttgcaagaggattttgattactcatggactgatataggctatggagaggattaaaaaggattgtgaagagatgagagtctttgtaaaacgcatgtcacactgtgcttacagaacaccaacttatgttattaaaaagagatggaggatatattgacg

SEQ ID NO: 15141 - DNA, 1317 bp, Oryza sativa
  ref <308>: DATABASE ACCESSION NUMBER: AK065673
  ref <309>: DATABASE ENTRY DATE: 2001-12-06
gcgggctcaccttcctcctcctccttcgccgccgctctacgtcctctcctccggctaccaatatcccagaaacctacccaaatgctcgcctccacctttgccacgcaccctgctgccgctgcagccgccaggcgacgaggtccgatccgctggcgcctgccgttctgttcccaaatcgtcacggtgacgctgaggcggcggtttccaatggcgaggctttcgatcacgaacgccctcgctagccagagcctcgagagtgcccctgcggcgcctcccaagcactcgttcccgatactggtgaatagttgtactgggaaaatggggaaggctgttgctgaagcagctgtatctgctggtcttcagttagttcctgtatcattcagtgctattgaggttcctgatggaaaggttgaaatttgtgatagggaaatttatattcgtgacccatctgaaggagaaagtattctcccttcgattgctaaggattacccagatatgatagttgttgactacactgttcctgatgctgttaatgctaatgctgagctttactgtaaacttggattgccatttgttatgggcacaacaggtggaaataggcaactgttgcacaaaacagttgaggacgcaaacgtgtatgctgtgatatccccacagatggggaagcaggttgtcgcgtttcttgctgccatggaaatcatggcagagcaattccccggtgcattttcaggttacaaactagaggtcatggagtctcatcaagctacaaaattggacatttctggcacggccaaagctgttatctcttgctttcagaagttgggtgtgtcatttaacttgaacgaggttaagcaggtccgggatcctcaggaacagcttacattggttggtgtcccagaagaacatctttctggtcacgcatttcacatgtaccatctcacttcaccggatgagacagtttcatttgagtttcaacacaatgtatgtggccgttcaatttacgcagagggaactgtggatgctgccctgtttctccataaaaagatacaatctggtgccaacaagaaattatatgatatgattgatgtcctaagagagggcaacatgagatgatcctctgttggtgttatacgtggttatgtaacaccgatctgtaaactcagatgcgcaccaaaattaggcgactactaagatttaccaattttctattgtaacaaattgtagtaccgtcggatagtagtttcctcaggagaaaaaaaaagtttatctcgaatgaataatgaagatgacttcgttttaaaaaaataaaagaagggc

SEQ ID NO: 15142 - DNA, 2512 bp, Oryza sativa
  ref <308>: DATABASE ACCESSION NUMBER: AK065674
  ref <309>: DATABASE ENTRY DATE: 2001-12-06
gatttccgtccgagggggccgataagagaagccgcgccgcggcgcacgctctcgctgtctctctctctctctctctctctcgtcctcgtctcggtctcgccgtgcggctctctctcgtgagcaacagcacgcgccgcggtcggcctccccttcaattccttcggctttggcccgggcgggtgtgtgagtgctcagctcctatcgccgattcgtcgtcctcctcctcctcatcctgctcgatctggtaattctagtgttgagggtctgaggagctgaaactagcacgggtaccctggcagcatgcggtggctggctctctcggtagacatcttccgcaaagggatctccttgaacctgtactgccgggttattctgtaaattgcctccattattgctctactccaatcctgatcttctagtctctgaagtttgggattgaagatctggttgctggcattgctgtttgggtttctgtggttgcctggcaattctttcaaggagaacgggcaggagtactaatggtgtggcaaccggtggctcagacgagattccgcgtgtttaaacatgagaatggaatcgctgtgagagttatagcttgcttccagccatcccaagattgccaggccgagtacttccgccatcttcttaagcccgtgacgtagttcgactccctcccttccatttgctgttgaatagaacctgtgctgctctaagtttttctgaagcaaaagtaaagcaggagaatttcctgttcatctcaattttctggtgatcctgtttgctggttgtttcttgatgggggagaaggttaatccctggtgccattggtctaatcccccatggaccgagagctctgcaaacaatctccacccacccgatgttagcctcgacaacacaaattcagtggcgttgccaacatatctgaacagcgatggctacatttattctggagttgctgcatctatgccgtctattgcagcatcagttactgacagacctgtttcattctcttctagatttgtcacaacattggtacccagtgtaggcttatcaacagctgagacactgagaaagagacctctggttttctttcataatgtgaataataccttcactgtaggtcctctcctgagcaaggggacattggatacagttccagagctccaaggtagcaatgagaccaatgtaactgatgttggagcacaaaatactgagtgtatgcatgagaatactgaggagattgatgcactcctgtgttccgactcagatgaagggtgcttgaaagtgcaagaactcaacaacagagtcaggaaatacccaatgcagaatgacaccatgagtgtggagtcggtagcaagcgctggtgcttcccaaccagcaaagaaaagaagactaagctctggtaccgacagatctgtggttgacacagccagctcagcaaggcctgaccactccgttgatcagaaacatctcagccatgacgacgacgcacagtcgtgttgtattggtgaagtggaaagcgatcaccagtttgctctgagggaaggtgaagaagcagaaggtgatgatggccccgatgatcggaagcggagaagagagaggatccaagagactgttgctgcactcagaaagatagttcctggaggcattgccaaagatgccacagccgttcttgatgaagcgatatgctatctcaagtatctaaagctcaaggtcaagacactgggagctgtttccctctagctcctcgatcgatgacggttctgttctggttcctgaacccaatacctatccctctctccatatatacaagtaatgagctaaaactatagcagcaataaggtgaaatgaaactcagtcagttccattcggtgattctgaggactactggagtgaaagctcaatggtgctttgcttacaagggtccaatgatttgagtggttacaatgaagattcagtattgcagtatattactagtgaatcaccgaccactgcaccttcatccatccatccactgatggagagtactacctagcagcaagccggtgtcacatctttcttctgggtcagttcagtgcagtgcctcttggtaggcacctcctccctctcataaaaaaaggctctcatggcgttgatggcgcaataagtaaaacagggaggctaagctataaagatcttttttctcccctccattgtggtgtgatccaaagcaaaggaaggaaggaggaatgaatgaatgaagtccatgcaaagtgcagtgctggtggcctggtgctgcatgcgtcgatggctttttgacccccaaaggttgagagatgagatggcggggccgcgcccgaggttagttcgggctccttgtgtgtgtttgtatggtggcgtgtgtagctagcagagtgtgcgtgatggcgtcgtccctcgcgctttttctgcctttctactagtactatacatatatgctactgtatactgtactcctatgtatgaatactgcatgtgtttgtgtttgtgtttg

SEQ ID NO: 15143 - DNA, 2550 bp, Oryza sativa
  ref <308>: DATABASE ACCESSION NUMBER: AK065675
  ref <309>: DATABASE ENTRY DATE: 2001-12-06
ggacttcgctcctcctccacgcacggacttcgcttctcctcctcgctcgctcctcctcctccccgcatgtagcgccgccgcatcctcgccgtcgccggagctcctccccgcgcgtactgctgccgcatcctcaccggagccgctgcccacgccgacatcttctgctgccgccgccaaatccggcttcttccctaccgtcgcggccagatccgacctcagccccatccgccgccgccgaggtcggcccctcccgtccctgccgccggagtacatccatgtttcccttctcgctgtcgtccacaggctccgccaatgcaatgattggcctctaccttccctcgaccaccgtcttctggacaaaaaagcagaagtaccaacagacaattatctgaaccacaaggggatatcacaccaactcactctctcggcttgtttctggtatttatcatacccaacctgttctccaaacataatatttgtaccgcaactcacatattagaattactgtaccattgtttcaatagatgggaacacttcaatcaaaagttgtgttgtctcactttcgttataaaataaaataaaatccagtgctcttcaaccatgttggcaacatagccgagtgtgaattgttggggatgattattcttttttgattgtttggtgagatttgataattctaattattctatacaattctctattcttgtgaattactgatatttttttgagtcttttagaaggataccctagagttgatgccgataaattgaggtttatttgttggtaaaggatatttgtaggctatttgattcgttctataaattgcagagcacctatgcaaaatacaagtgttgtagggctaacccttacaattttggatcattttggttgctatacatgtcatcctgaagcaacacttctttccaaatactacacatcaccatagcagcttaccatggtgatctaatcatggcagttaggagggcagtaaatggtgatgtatgttgactagatactttggaaattaaatgaaggcatagagctggcaatttgggcaaagtagatgggaaatgttgagcactattagtatgcacatataattagaacttacaacatgcactttagtttacaactctctaatgttttctgccaagaagttccatatcgaaatgcctgctaaaatatttctgggtgtttgctttcagaaatattgctatatataatagaaatgtaaaatcaatcagggttgtcaaatcaaggcataaggcgtaatgttaagatttagtaaggactgctagccctgttaaccagttcagcatgcatgcctgaattcatttttctttcttactgccacctaattgtaatatttgattgatgtgaaacagggttgtggtccgacgtgagaatctgaacagctattcatatcctagatatcatcttcctaagattttctttttcagtaatagatttgagattcatggagttaaaattactgcagagtatatcaactttacagtgacatgctatgagcctatgagttatgatcttgttcttttcttttcaagttctccaaaaattggaactacaccaagcagtagcaacaccaagtgatgtatccagcgtcactggcagaatcattcgtgacctatcaatgatggtcatccccattgagcatcacatggttcacagaggccatggcatctttgatttccaacaggttaatccttgtcgtctcatgttttgaatttttcatctccacgtttgcttttgatggtttacactttaagtttgacactaaaatgttcatactccagatgaactggttcttgatcatgtgatcatcagatacttgaaaatttgcgcatttggtactgaaattagactcaaagtggactctgcatttatgtttccaactacccggtccaaaaaatgcttgtagtaaattacaattatcacctaaaaatgttggtggcacataacttaagaaattacgatggttctttcgatataaagtgatgtcatcggaattgcttcatgaattacttgcaaagttgtttagcagttgaatcttgtgcttattgtaattcaataatcttttgatcatcaaattgaccttgaaaatattagcctttactatttctgatgagatatcctttatctttatgattggaatctggattttctttggtcaatgttaatttgacttgacatacactgtgcataagaaaatattttactatcaatactgatcctttatcttggcatacattgttttgtgttttacttgacggatgaagtgctgaaggcgaaagaagttggacagaccttctcggtgtgacacttgacaacacatatgaggctgtggatgtatgagatgtgagcaactgggtgtgtgcatgatcctgattttgtcataagagggaggtagtgaagttaagtcgtgcggaatacactgtaataaacaagtatagtttcacataaaataggcttagcactttcacttatttatatacagtatatatttattctggtgatggattctttggtgct

SEQ ID NO: 15144 - DNA, 1802 bp, Oryza sativa
  ref <308>: DATABASE ACCESSION NUMBER: AK065676
  ref <309>: DATABASE ENTRY DATE: 2001-12-06
gagtggggatttcgaagctgctcttgcttagctgcggctgcgagtgatacggagtagttccggtgatggagcgagcggaggagacgccgagggcgccgtcgacggcgccgtcggcgagggtgtcgatctgggagtcggtgcgcgcgtgcggggtgtgggggaaggaggtggacaaggccgagctgcggaggcaggtcgtcatgccgctgtacgcgcggcgtgcggtcgcggccgccgtgaaggccaaggacgaggccgtcggcgtggcggcggcggcggagaggggcgaggagggggaggtggaggtggaggtggaggcggccgtgacgccggtggtggtgttcgtcaactcgcggagcggcggtaggcacgggcccgagctcaaggtgcggctccacgagctcatcagcgaggagcaggtctttgatctctctgtcgtgaagccttctgatttcattaactacgggttgggttgtttggagaaattggccgaacaaggtgacaattgtgcggagaccattcgaaaaaaattgaggattatggttgctggtggtgatggcacagttggttgggtacttggctgtctcacagatctttataggttgaaaagagaaccagttccacccacaggtatcatcccacttggtacaggaaatgatcttgccagatcatttggatggggtggctcttttccctttggttggcgttcagctgtgaagcgttatctcagcaaggcagctacagctcccacctgcagtcttgacagttggcaagctgtagttatgatgccagatggagagataaaagagttgccatatgcacttaagaaaacggaacctgcagactgcttggaactttgccaggagaatggcactgagttacctgagaaagcttcttgctataaaggagtattctacaactaccttagcattgggatggatgcccaagttgcttatggcttccaccatcttcgtgatgaaaagccatatcttgctcaagggcctgttgcaaataagttgatatatgctggttatagctgcacacaggggtggttctgcacaccttgtacagcaagccctcagttaagggggcttaagaacattttgcgactttacattaaaaaaagtcaattgttctgaatgggagcaagttacaatgccttcaagtgttagatccctggtggtcttaaatttatacaactacggcagtggaaggcatccatggggtgatcttaaacctgattaccttgaaaagaaaggttttgtcgaagctcattccgatgatggattgcttgaaatattcggtctgaaagaaggttggcatgcttcattcgttatggctgagctaattaaagcaaagcacattgctcaggctgcagccatcaagtttgaaatgaggggtggccaatggaatcgtgcgtatgttcagatggatggagagccatggaaacaaccactcctacaggagcagtcaaccattatcgagataaacaaagttccttacccttctctgatgataaatggggagcaatgagatcttccccgatttcaatcagggtcgtattctagatcgttagattatgtatagttcgggagcagctgcagggattagccatggccggagcacaatcgggcaaaatgtactgttgtatcatataaattatgttgtgtcgtaggttatttcagtggaaatcaaatataacttgatttgtaatgtatttttaccgtcaaaacaaacaaaaaaaatcaagtggaaaaacacaatgtactgtaaattactcagatttcccctcctgttatgcc

SEQ ID NO: 15145 - DNA, 3828 bp, Oryza sativa
  ref <308>: DATABASE ACCESSION NUMBER: AK065677
  ref <309>: DATABASE ENTRY DATE: 2001-12-06
ttggcgtcagtcagtcccgtcagccgtcgtcaccgccttgtgtcctctccgcggccagcttttctccgccctttcctgcccgtacggccaccatacgcggcccaaaccgccgcccaaatgccgccgccggcggaggagttcgccgtcgacgacctcgacgagttcgagagtcgcctagacagtttcctcaaccgcttccacgccgacgacctccgccgcatcctcctccccttcccggacggcaagctccatttccccctcgtcatcgacttcgcggagctcctggagttcgaccccgaggtcgcccaccaactctacgactaccccaaggacgtgctcgagctgttcgacgccgccgcgcaacgcgccctcgacaaattcgatgccgccgctcgacgagctgacaagaggaaggcgggcgacgggacaatggagaagaagttcgtgcacgtgcgcgtcaacacctcggggtcggcactcgaatgccctgaagcgtccccgagcattgggaaggtgagggtgaagcacaggggaactctgctcactttgaaggggaccgtgatcaggtccggtggcgtgaagatgatcgaaggcgagaggaagtatcagtgcaggaaatgcaagtgcaggtttacggttcatcctgagcttgaggctgggaatcgtataactcttcctgcatcttgcaaatccaagagtgcaaaaggttgtggaggtgccaatttccaattgatagaagatagcataacctgccatgattaccaagaaataaaaatccaagaaaatatacagcttctaggtgttgggtctataccccgttcgatgcctataattttgatggatgatcttgttgatattgttaaagctggggatgatgttgttgttacgggtcgattatctgcaaaatggtctcctgacatcaaggatgtacgttcaaaccttgatcctatgctaattgccaattttgtgaggagaaccaatgaactgaagtctgatctagacatacctgttgaaattatcaacaagtttgaggaattctgggcagcttccagagctactccactgaaaggaagaaattccatcttgaaaggcatttgtcctcaaatttatgggttattcacagtgaagcttgcagttgctcttaccttaattggcggggtgcagcatgttgatgcttcaggaacaaaggttcgtggagaaccacatatgcttcttgtcggtgatccaggcactggcaaatcccagtttctgaaatttgctgctaaattgagcaaccgttcagtgatcacaactggtcttggaagcaccagtgctggtttaactgtcacagcagtcaaggatggaggggagtggatgcttgaggctggcgctcttgttcttgctgatggagggttatgctgcatagatgaatttgatagtatgcgagagcatgacaggacaacaatacatgaagccatggagcaacaaacaataagcattgcaaaggctggattagtgacaacactcaacacaaggactacagtgtttggtgccactaacccaaaaggacaatacgatccaaatgaatccttatctgtgaatacaacactttcaggaccactgttgagtagatttgatatagttcttgttctcttggatacaaaaaacaaaaaatgggataaaatagtttcatctcatatattagctgagaacactgaagaaaagaaaggcaagacaagtgatccggaagtaatgtggacactgtccatgttgagaaggtatattcactatgtgaagcagcatttcaaacctgtgctgaccaaggaggctgaaagagttatctctagttattatcagcgtcagcgacaatcaggaactcggaacgcagcaaggacgactgtgcgcatgcttgagagtttgataaggctagcacaagcacatgcaagactaatgttcagaaatgatgttacgaaacttgatgctatcgctgccatattatgcattgaatcctccatgacaacatctgcaatagtagatactgctgggaatgctctgcactcgaattttacagagaaccctgaccaggagtgtatcctgaaatgtgattccatagcttacttatccaagaatatcaaatatttaactgatgaaatctcgaactgataatttttactgtagtgccacgtatatggatgttcttgcctatgtctctggtatggccttttgattcgggcaagcaaaggagaagaaaatccttacgcaattgggagttagcgaagactccccattgttataaaatatcattaccaatatgaagatttacaagcaaacgtggcttatataccatgctgcacaatgaatcaagtgatatgccaagggaatatgtgatttgcactagattactacggtcagtttggctctaccaggtggtgtaatccgcccccatcgcccagccggacgtgtcgccgacggtgtacttggtcgccgccgccgccaccacggcgcagctcacgaggagcagagctaccagggccagcgacgaagccattgcagcagccagaatcaaaccaagaaagggaattggcaatgtgtgagtttgtgttgctctgttgagatgcaatgcagagaggattgcaagctagggcccttatgtgcatgaaactgacgaggtgacgagatgagtgagtacaacgtcgcagcagctcttcagctgagagagttggtgaagtggctttcgttggagttggttgggagcaggaaccggtccatgccttgcaaaacgcattgctttcaacagctgcaacatctttctcatgaatcatgatgcacacacgtcgcatgatattcttgcaacgaagcagagaaagatgaggaacacattaattcaactggtagcttggcaatgtcaccagactggccattaatttgttctaccaacattgtcttccttttagaccccataaggacattttccccttataaaaatagtaagcagagtatttctatgcttgcttaatccctgattagaatcagcaatttgcaaatcttagccgccatgaaaaagccacgcgaataattggtgatccgatcatcaactttgggggcagagtaacaggtgatctatagccgtagcagctggacgcctgaactaaatagcaatatatgtttggtgactagccatctcgtactgtcatatgggtcaaagcgaggattttgccaagagatttgatgagagattgcaacggcttctggttaccggtgaagcaattgatttctggttatcggtgaaagcaatcttacttgctgatccagtagttctcgagtcatttatgtgcaagagcgacttgcaaccagaaaattttccagataatgcaacgagatggtccggaccctgtcccgaaggcaaatggaagttttggtggttgtgtgcaggattcatctacaggaggtccaaaagattaaggaacaagctagctatcaattcccggaggtcaatctctaatccggttggtgaatggtgatcacgtacctaacataaaaagattagtctcgctttagggtttggtagacaaagggcagttctgttgttaatcttgtttcgtttgtcaaaggagcatatgctgttctgttcttgtagtccctcaggtaggaagcttcaggcttcagttactactttgcttatttccagtgaaattctctgtgcagaacagtagaaagatgagcacaaacccgggttcagacttcagaagtgttctagtagtccagccttctacactactgccatggatctatcagtccatgacaagatcaatatttagtttgttgtttgcagcacaggagattgcatcc

SEQ ID NO: 15146 - DNA, 1472 bp, Oryza sativa
  ref <308>: DATABASE ACCESSION NUMBER: AK065678
  ref <309>: DATABASE ENTRY DATE: 2001-12-06
gagttcgccggcggcgtcaaaccctagcgccgccgccgccgccatgaaccaccttcgaaaccaaatccttcttctccgcgtccgctcctccagcacctcgctctctcccctctcccctctccaccgcctcttctcctcctccaccgccgccgcatccatcgccgcagaacccttcgccgtcgaggactacctggtcaccacctgcggcctcaccggggaccaagcgcggaaggcggccaagactctctcccgcctcaggtccccctccaagcccgacgccgccgtcgccttcctctccggcctcggcctctcgcgctccggcatcgccgccgccgtggccgccgacccgaggttgctgtgcgccgacgtggagaagaacctggccaagcgcgtcgccgagctcggtgagctgggcatctcgcgctcccagatcgcgcgcctcatcccgctcgcccgtcagtccttccgcagcagctcgctcgccacgaaccttggcttctggctcccggtcttgggctctttcgagaatgtgctcatggcgctcaaggcgaacggagcgattcttggctccgacgtcgagaaggtggtcaagcccaacctggccctcctccagcaatgtgggatacatgtctgcgatttcccccatacacgcctgcccactgtgctctgcaggccacccaaccatgttcaagaagctgtggcacgcatcggtgagtttggcgtgccacagtactcaccggtgttccgcaatgcgcttgtgccatttgcttaccaaaacaaggagaagctcgctgccaaaattggagtccttgaaatgtttgggtggtcagaggacgatctctcgatgactatgaggaagggtcctgtcgtcatgaacatgtctgtggaaaggctgaggaaaaatgtggagttcttgacaagggatgttaagctcgagacgcgttacattgctcgaaggccaatcatgatcagttatagccttgagcgtcggttgttaccccggcatcgcttgctcaggtttctcagtgcaaagggattgcttgatggtgaattggacttctattcagcggttgcattgactgagaagaagtttcttgacaagtttgtgcattcttgcaagtgtagcattgcagatcctgctaatgcttatgcttctagctttgttggggatgttctgtgaatttattgtctgagaggacaacaggaaaatgggctcattcttgtgctgggagggtactgacaggattgttgtgttggaaagatcaagggtttagacttatacttttgctatctccttcgtgctcattaaggtttgctatctccttcgtccattgttgcaaaatttcttataactttgctctaggttatcttgtgttggctagtatcactattcactgattgataaacaggaacactacagcctgtggtcaccctctaggttgatggaatgttgaataacatttccaggagct

SEQ ID NO: 15147 - DNA, 1435 bp, Oryza sativa
  ref <308>: DATABASE ACCESSION NUMBER: AK098936
  ref <309>: DATABASE ENTRY DATE: 2002-08-28
gattccccaatctaggtttttcgcgatggtgtcggcgtcgcgcttcgtcctcctctcgaggctccccgccgccgccgcctcctcccgcttcctccgcccgctcgccgccgcggggagcctcctgccggcggcgcttgcccccttcgccccgcccgcggcgggggccaggtgcttcgccacgcagccggcgacctcgtcgctgcgggactcgtcgccgaactggagcaaccggccccccaaggagacgatcctcctagacgggtgcgacttcgagcactggctggtcgtcatggacccgccccccggcgatccctccaaccccgagcccacccgcgatgagattatcgacggctacatcaaaaccctcgcccagatcgttggaagtgaggacgaagcacggcataagatatactcagtgtcaactcggcattactttgcttttggtgctcttgtatctgaggaactctcctacaaactcaaagagttgcccaaggtccgctgggttcttccagactcgtatctggatgtcagaaataaggactatggaggagagccttttataaatggagaagctgttccttatgaccctaagtaccatgaggagtgggtgagaaacaatgcacgtgccaatgaaaggacccgacgcaatgataggcctagaaactttgacaggtcaaggaatttcgagaggagaagggagaacatgcacaacttccagaacagagatgtgcctcctgggcagggattcaacagccctcccccaccagggcagggcccagtcctgcctcgtggtgctcctccgatgcctccacctccatctccaccaaatccaggtgctcctccaagctaccagccccatgcaccaaatccgcaagcaggctatacaaactatcagggtggtgtgcctggttaccaaggtagagcccctggctatcaaggtggcaaccaggaataccgaggtccacccccacccccaccctctgcttaccagggcaacaaccctggataccagggaggagggccaggttaccatggtggcaacccacctccttatcaagccggcaacccacctccttatcaagccggcaaccctgtctttgctggtggtgcaccaggctaccaaggccaaggaggcaaccctagttaccagcaaggcagcgataactacaatgccggtgcgccggcctataagagggatgagccagggaggaattaccagtagaacaacactgctagaacaaatgatatgtagagtctagtacgagcataacgctatttgctgtctgttttggagtctatcgcatgtatactcttaccctgctttgcaaactcagtttcttatgtgtcgactaattacttcgatgtgtctgaaactggcgattgtttgaggcacttctagcattataaatgtttactcaactagtgttttttgtcc

SEQ ID NO: 15148 - DNA, 4903 bp, Oryza sativa
  ref <308>: DATABASE ACCESSION NUMBER: AK065679
  ref <309>: DATABASE ENTRY DATE: 2001-12-06
gggggtcgttgcttctcggcgtagtgggcaccgatcgatctcgtctccttccgaggcggcgtgggcgtggcgatcgaggcgagccgttgcatccgccctcaccggttagatccgtcctcgctaacccaacgccgacgagaagtttgcagtgctctagtatgtgaaacggatcgatttccatttgagcagcagcaactgctgctgctttgttttggttgatatgggcatggacatgcttgtctcggcagcattggaggaggtgtgcgcccgcctttcgcttggtctcccagtaactgagatgtggacagcactctccagcgtgttcaacatggccggcctcccaatggacctggccgtcaagcgtgtcctctttgcccgtctcattgcactccctgtcatcagcctcgtggttgagggggtgctcgcccacccgccacggatggacatggaggaggctgagcgatatggcgcacgactgcttgcgagccgtcctctcagggacaacttccttgggatttatgaccacaggtgctctgcttccaagctgagtgacatccagaggaagacgttagaattgatcggggcaagcaggacttctggtctcacacaacgcagtctaagcaaagaggccgagataaaaggaaacaacttccattatgttgtgaagacacttaagtcgcaagggttaattgttggaaaacaagcaattgcaaagattaatacccaagctaaaaggaaagctgtttcacaggataaacatgtcatcagcacaaactcattatatctctcaagatatgcgaaaaacttgaatatgaactcataccaaagaattgagattacaaagcccaaacttgagtgcaatgaagaaactaacatagatgccttacaagaagatgagactcttagtgttgattacaagaacgatgtgtccattcatgattatcttccagcaatgaaagccatatgcgacaaacttgaagaagctagtggaaaggttcttgctgtatcagatataaaaaaggatctcagttacaggatgcaacctgggcacagagcatggagaaatgtactgcataggcttttaggtgcacaactcgttgaaaaaatcgctgccaaccttgatgataagattgttcactgcttacgtcttctgaagagatttaatccagatgagtttaagccaaaaggtacaatctcaaactacaaacttggcaagaaaggcctggaaactgatcaagtcatggagcttccattagacaactgtatatatgatatgatcgatgctcaagggccaaaaggcataacccttattgagcttggcaaacgtcttgggggaaagtacaacaattcgaaagagctccatgatcgagtatcatctatgcatgatagattcaatctgactgtggaggttgaagtcgttggcaaaagtaaacagggcagagtttggacttcaaaaaatttttcgctgtacaatgctactctgcgaaattgtgatgtgccagatgatcatgactattgttcagtatggcctctcattccttctgaagaaccgacttctgttagcccatatggttttgtggttaataacaaactcttgtttgaagaagattgtcatgatgaaccacccgtacatcgtctcctgaatagccatgaagcttgtgttggagtttctcaaccagttgaacaagataaagttgcctttcagaggaagaggcattgctggcccacgtcaatttctgatgatcgaagacagaaaaggattattcacatattagagaaacatagttttgtactgatggtggagttgcataaatggttagagagagttgaaaaggaaaatcggaaaatatttgacaggaagacattgattcacactttggataagcttcagcaagagggtacttgtaagtgtattaaagttaatgtccctgtggttacaaactacgctggcagccgttccatattgatgtaatactgaattcttctgttaaagtcatgtcaccggaactcatggatcaaattaggaacagactaagaaattttgattctcaaagtcgttcaggtgcagcagctaaactgaagcaaaagcaagatacagctgccatacatggcttgagggttcaacgcagagtcaaagttaaaaaaatatcaatatcagaagctattcatgacaacggattcataggtgcaaagatgattcgggcaatattgttacataaatttctgtgggtatatgttagtggtttgccaaacgggtccaacgactgtgtcaaagaagggtagcattatgacaagaaccttgatcaatcatgtctgttattttcaatcacagcagctataaagaaaatgcctcttgaactctttctacaagttgtgggatcagcaaaggttcataccttgataaaaaagtgttctcttggaaaaacactttcagagattcctaccgacatatacaatcagctcatggatactcatgccaagggccgactctcgcgcctaataaatattttagataaactcaagttgatcggacttctaaatggatacatagaggattctaatgtgcaaccagatgatttgcctactcattcgctggagctcaggccttacatcgaagaacctactccaaggatcattctgtcatcacacgttaatggaaaccattgtccaaaatttcgacatgattttcagctttcaaagctggaatctgtcgatacttactgggaaacattaaagtacagttatgtaacagcaggcttggctgagacaagtgccttccctggctgctgcatccctgaggtttctcatccacgttcatggagctcagtaagagtaatgactactgaccaacatctggaattacaacagcgtctcatgaatgaaagtgagacgaagtttgccacacgattgcaaaggagttgaatctctctttgcagcaggtgctatgtgcttcctccaggcagcttcatggacaggcaagtatgtctggtacacagaatcagcgaaaatttagttctcgatcaacctctcagaaaaggaagcgatctgctattgagattagcatgaagtttataaagcaaaaggctgaagctagtggatcagctgaacagaggaaagaaataacagatataatctcttcaacatccactgaaaggggattgccggagcatgcgaaattgtctagacattccagttcaatccatgaaagtaaaagcatgccaattctcttcagatctcatgaaaatgtcattaaattcaatgaagctgagattactaaaagaggtgtatgcaagtccttggctatttccaatgcattggagctcctgaaggtgttttttcttagctcatcatcggggtcagaagtgcaagctacattaacagcaacgttccagctttattcagagcgcgaaattttaactgctgtttcctttttgagagagaagaatttcttggttactggaaatggaatgaaacctgcaaccctttctggaaaattttttattgacgcttctcgttcacccttcccatttggttcaggaaaaaaggcttctgagtttttgaaatggcttatagggcagcaaaagaatactacagacagtacagtttatttgtatccagatctacaatgtggggaaattgttcacctcttttctttggtgttttcaggagagctgctcatttcaccttccttgccaagtgaaggagttggtgaaactgatgagcctagcagcttcagacctttcatcaaagattccagtgaattggatgactgtactcacaaacgcaaggctgtggagttaataagcagcaagagtaagaaacgcaaacctttgcccaagatagatactgacttctgctatcgtcgagagaaaggtttccctggtatccaagtggctttgaatcaagagaggattcaaacaagcaatctcatgcaagtgttacatcataaagaatgcctcatgtttactttagccagggaaatgggcagcaaggatgttgattctcaggtagaaaggaatgcaatatatcgaattggttgttgatacacttgaaagatttcagctggccattaaggtcaatgcatatgatggtgtgcagattgttgattcattacataagccaaaatatcatataaccacacttgctgaatacagtcaatgcaactgtttgtgagctccggtttctgagacagaatcaactggggacaccagaaatataatgaaagagaagtatgctgtgcctattaatttgcaggaaactgtaaaaaagcttggtgatggacacattgtttcagttctcaatgttcaaagtaagtcaagctcacatttgcacagtcaaagtcctggagatgatgaaggcacatctacttggcactggggcagtggttgctctcatgtttgcaagagccatatttatcatccaatattaccatggctaaatagtgatggaagcattaatagcactgtctatgaatgtttaagtcatcggattattggatatgtcatgcagtatcctggaattaaggaggaggacgttatcaattggttggatgtactgaatcctcagacatgccggaccttgctgggaaagctgacaattgataaacacctttatgttcgggtgtttgatgaacctgtgcctactgctccgaccacgctgcagaatattttgaggcaaggccacaatagagaaccctccaagtgtggaaggcggtacttcgctaatccaatgagtacatttatgctgtagggcgatgcagatgatggcttgttctttagttattagggagtagtgtaattaatttaagattgtgtaatgtaacttgtattctttctttcacacccgaaagaccgtctaattttaaccctcgactaatgattaatcgaataacatggtttttgtt

SEQ ID NO: 15149 - DNA, 3104 bp, Oryza sativa
  ref <308>: DATABASE ACCESSION NUMBER: AK065680
  ref <309>: DATABASE ENTRY DATE: 2001-12-06
gtgccatggtgccatggccggcgacgaggtggatgcgccgaaggctctcctcccacccagaccggccatcctcgtggcgagcgccggtcagcatctaccaaggtccaagggcaaatggtacgcgccgccatcgtacggtcgatctcgtcgtgcgcgtcctgttcgatgccccgacgccgctcgccgcccgtcctcgcggacgccgccggagccggagccaccggttggtttggtagacttgtcccccttcgcctgcctccgcttcacctcgtcgacgcctcaccccacttcgattcccaccaccactccaccagccgtccatacaccccgatccccaatccccagttccagtgaggtccactgccacttgcagctcgccggagagaaaacgcgacaggttggaactgcaaggtggcgacctggaggtcagggcaagtctcagtgatcatccggtcatcgtggatgcgttgcaggagcgagttaatcctgctgctccgctgctcgccagtgcggcgctgcttctgcctggtgatctcatctagctttgcaaatcaagcatgtgttcctgcaccgataaatcattggtcttgaagctggagcgatggggatggaaccatcaaggttttccttccacgtgaccagcatcgtcttggtagactcatcaggatggcaccataccactgaagttgttgtgtgataagtcaaggacctcaagataacattgggtacatatagaacttggtatatgaccacttattttattcctggaaaagctaagatagtagacgtttcgaagatacctgccgaagtcacgagtaattgaagagaagctgttgctagagtaatccaagagaacaccaccatctctagtagttgtcagtggtataggtacgttaccatgcagtctgttggaactaagattgagtctatctaaagtgtgcaagggaagaacagatggattattttccaagctagtgaacatgttgttagagagtactaacacggacaagctattcttccagttatcccatatccagcttggtattactccatttattctgttgtttgaaaggtccaagtaagacataccttttatatctctcaatgcgcctggaatttttgtaaggttgcaagatgctagtcccaggtatttgattgtagggaagtaatgaaatggatagccatcttctcgatctatcaccgacaacatattgttagagataattaatgattctagtttctccatcttccaaagaaggttaatttccagtgtaccattcaattgatttgattgaagcacgagatttgttagtcttctaagatcaaagaacgatttgggtatgtagcctgtaaggtggttatagcttaagtcgatgaattctaacaacgaggaaaacgggtctgaaatgtcttctagatgtccagaaagttggtttgatcgcagatctagcatttccaacgattgatgagcgaaaagaagcttcgggattctacctgtgtggatgagggacagagagagaacaacagtcaaagtttgttcaaaaaagaaaagcacagaatgtcagaagtcctgatatatgtactcaaatgtgtgttcttaccgctgaggctgttaagtgaaagttccaaatagataagcttagtcaagttcccaatccatgatggtattggcccatagaagctgcaattaaagagcactaaagattccaaacttgtacagtttctgatccaagggggtattggactggagaaattatagccttcgagcatcaagtctctcagtttaattgttccaatccaagataacagtggcttctctatgcctgatccagagagccataatgtatctagagatggaaggctaggtatgaaagtagcaacctgcttgggagatcctacgttgctaaggcccaaaaatttcaatgatttgaggtggataaacgaggctggcatgttaccagaaaagtttgtcctctgaagatttagtgattccaaatattttccaggtgggaaatccggaagttggacaaaaagagtaggattgaaagatacatcaagagacctcaaattttctacctggaatatctttgtgggaaattgcccttcaaaattattgttcgagagagcaaggtcactcaagaaaaagaagtctgcaaagaactcaggaacccttccagaaattccattgtagttgaggttgatcaccactagagagcggagttgggaaaatgaacgatgaatagttccacctaggtcacattgggacaaactaagattctgcagcagagggagagagtgtgctaaagcaacggaccaggttggttcactagtaatgcgcacttgatcaagatagagctctctcaaattgctcaggtttgctacaatggtttgaaaactcggttcttgaaaaaacagataattgaaggaaagatcaagagcacgcaaattcttgagatgtgcaattccaatgggtatctgaccaaagaagcctgcttctgacaaatcgagcctgaggagtttggtgagccgctgaaacccgaaactaggaagaacggtccggttgaaatcgttaccagcaaggctgaggtttctcagagtggtgaggttgaagaccgctgggtctaggccaccggggctctggagattatagtaactgaggtccaacgctgttacctgcccagaggatgtgtcgcaggtgacaccctcccagtggcaacagtcggtgttcagtttccatgacgagaggtttggattaatgaaggagctcttcagctggagaagcgcttcagcttggtgaggatggcaatgaactgggatggtggtgttggcaacagtttggatggagcagtacaatgtgagtagcagcagtatgaggagaagctgtggtagtgtggatgccatctctgtattggtttgccactacacataaccacttgggtgggtggttctcaaggtaatatatgtaggttaattacataggaaaaacagtaggttttaattaaaaagaaaagggaaaaggctggcctgtacatcattaaatttttatatttgttagtatttcctcaatatgttgcgttcaatcatcaatataacctttacctgtt

SEQ ID NO: 15150 - DNA, 2143 bp, Oryza sativa
  ref <308>: DATABASE ACCESSION NUMBER: AK065681
  ref <309>: DATABASE ENTRY DATE: 2001-12-06
gacacaccttggatcgcggcctcacgcgcgtgaggcgccgcaacgcaacgtgcgaccccgacctctcctcctccacctcggcttccccccaaattccatctcctcgcctcggcgaatccgattccgagcactcacaaccggatcggagcgagttccatggcctgaatctcagggggggtgactggccgaggagcgggctctctctctcactgccttaggctgaaatctgctataactttggaggtactaaaacgagtctgagatgggtgtgattagtacggtgcttggtttctctgggtttggctttggattctccgctggtattgtcatcggatactacttcttcatctacttccagccaactgatgtcaaggacgtcaaagttcgcccacttgtcgaatatgactcaatatcgttggacggtatccttcctgaaattcctttgtgggtcaagaatcctgactatgatagaattgattggctgaatagatttttggagatgatgtggccttacctcaacaaggcgatctgcagaactgcactggatattgcaaagccaatcattgaagagaacaggaagacgtataaactagaatctattgagtttgaatcacttacattgggtagcttaccacccacctttcaaggaatgaaagtgtatgtcacagaagaacaagaattgataatggaaccatctcttaagtgggctgcaaatcccaatgtcactgttgttgtaaaggcttatgggttgaaagcaactgtccagattgtggatctgcaagtctttgcttcacctcgtattactctgaagccattggtccctacatttccttgcttcgcaaaaatccttgtttctctcatggagaagccacacgttgacttcgggctgaaacttttcggagcagatttaatggctatccctggtctttacagatttgttcaggagaccataaaaaagcaagttgcgagcatgtatttgtggccaaagacattggaagttcccataatggatccctcaaaagcttctaagaagcctgttggaattctacttgtgaaagtttaagagctcaaaacctgcgaaagaaggatctgttgggtaaatcggacccatatgtgaaacttaagatgtcagatgacaagcttccgtccaagaaaacaacagtgaagcgtagcaatctcaatccagagtggaatgaggatttcaaatttgttgtgacagaccctgaaactcaggcactggaaattaatgtctttgattgggaacaggttggcaagcatgagaaaatgggcatgaacaacattctgttgaaagaacttcccgcagatgagactaaagtcatgactgttaacttgcttaagacgatggatcctaatgatgtacaaaatgagaagtcccgtggtcagcttactctggaggtgacatataagcctttcaaggaagaggatatggagaaagaaggcatcgataatgctgatgtggtggagaaagctcctgatggtactccagctggtggaggactgctttatgttgttgttcatgaagctcaagatcttgaaggaaagcatcacacaaacccatatgcaaagataattttcaaaggagaagagaagaaaacaaaggtaatcaagaaaaacagggatccacggtgggaggacgaattcgagtttgtatgcgaggaaccccctgtaaatgataaactgcatattgaagtctaagtaaagcttcaaagaaaggattgatacacggcaaggaaaccttaggctacattgatataagcctcgcagatgtgatcagcaacaagcggatcaatgagaagtaccacctcattgattccaaaaatggtcagattcagatagagatgcagtggagaacttcatagcaaccgtgatgaagtaggtgaaatgcttgaacttcgtgagatacaggatgatacatatgaatgttgttgctacaaacagagtttggccaatacctgtgattgagttctgtagatatttacttctttgtgtccaggcatctgttttaccttgttgagatattttgttattttttcaaaattgtgttgagaacaacgtagaagcaaccatgctattggcatcggaagtggaattagatgtgagatgtaatgacccattatccttc

SEQ ID NO: 15151 - DNA, 2308 bp, Oryza sativa
  ref <308>: DATABASE ACCESSION NUMBER: AK065682
  ref <309>: DATABASE ENTRY DATE: 2001-12-06
cttgtaatggaaataagcgcaggcgattctttctttagaggggttgcacttttgggagcccaacttgtgtgctaataattttcttctcttagttttcttttgctgatgttaacacggctagctaggccttttgcgtcttgtctccttgcttctgtatcatttctcgcgtggaagaaagcctactgaatgaatatacaatgtttgaccctatctaggcttatggtcccttttgcatagtagttccttttgctgcgtgtagaggatttgttttctactttgaaattgcgacgaaataagtgtacaaatctctgccagctatgtttgttatgatcctttgttgctacaagcaaggttgtttatatacaccttttgttgtagtacaaaagtgagggtctcaactctgaatgggataatctgtcacaatgtacctgcattctttcctttgtttggaccacgtagtgccacattgccatttgtgaccttattaagatgatcagttggtagtaagcctatagaacatcagcattatatcatgccaggatgtggttgcaatattgtggtttctagataacttattctgccggtaagatgtacccttttacacattatagaatctggttggaattttgaaatctcttggaagttttatcattttaattctaaggtaaagtccatttttggcactcaaaacttgttggattccattttttaccgttaacttaaaacccagtcatttctcacactcaactttcaaaaccagaaaaataacacccaaaagctgattccatggtagttttgattgacatgacaactgacatagccttcaggtactaaactttgttggtgtggaactgtggacctaagtggcatccacattagcaagacatgtatagtaggagtctgcactagtgaaaaccatcaccatgtcaataaaaacactgtgaatatggtctagagtgttattgatttgcttttgagagtcgagggcgaaaaaatgaaaaaaaaaactggttattgagtttagcatgaaaaaggacttctagaatagttcaagcaccaaacatggtctttaacctagttgttttaactacctcagaggcccagatgtctatgcactatgctttgttatgttgtgtacattctgtaacacccttcattttctgatgatttgcatatacaaaggaaaccctcacagcctcaccatccatatattaacttctaattagatatggcttgtcattactgttttgtttcttctataaatttcttcttgcaggtcgcatttaaaactggtgattttaaccaccaggtgatcttcatcggtggtttgacggatgggtttttagcaaccgactacttggagcctttgtcacttgcactagaggtcgagaaatggtcactggtacagccgttactttcttcatcatacactgggtatggaatttccagcttagagcaggatgcattggaactagatcaactcatcagttacttgataaacaaagaaaattctgatggagtaatattgcttggtcacagtactggttgccaggatattgtgcattacatgcggacaaattttgcatgttccaaggcagtttctggggtcattttgcaggccccagtaagtgacagggagtatagagcaacacttccagaaactgcagaaatgatagatttggcagcaaaaatgttaagtgagggccgtggaatggatttgatgcccagggaagcaaatccagatgctccgattactgcctacaggtatcactccctttgtgcatatatgggtgatgatgacatgttcagctcagatcttagtgaagatcagttgaggcagagacttggtcatatgtcaacaacacagtgccaggttattttctcaatgggggatgaatatgtcccggaatacgttgataaggaggcacttgtggacagattatgtcgcgcattgggcaacgcggagaaagttgaaatagaatggggaaaccatgctctctccaatagggtgcaagaagcagttcgggccattgtagattttgttaagagagaggggcccaaaggttgggacgatccatggagctagatacaacagccatatgtaacatgtctatcccattttcctcccctagcaaaacgtcttgtttttacatgtttcttgatcatttttttatagtaataattcctatttgttttgctttgttgccttagtaagcattgtgagacacttttgtttattttgtggacatttatgtacaatacttgaatttgtaaattgtagtgaaactatctcaaatctctctttgtc

SEQ ID NO: 15152 - DNA, 2936 bp, Oryza sativa
  ref <308>: DATABASE ACCESSION NUMBER: AK065683
  ref <309>: DATABASE ENTRY DATE: 2001-12-06
ggtcggcacctctagcttgactctatacccgtcgtcttcagtctcctcctcccctctcatcgccactctcctcgtctcctccatgcctcagagtgattagttgagaggaggaatcaagaatcgagggagagggtgagggagatggagatcgaggaggcgggcggcgccggggaggatgagctggaaatggaggctccgagcgtgagcacggtggcgattgcggtgaacgggagcaggaacagcaagcacgcactcaagtgggctctcgacaagttcgtccccgaaggaaaggtcctcttccagatcttgcatgtccgccccaccatcaagatggtgccaactccaatgggcaatttcattccaatcacacaagtgcgtgaagacgtagcaactgcatacaagaaagaagtggaatggcaagcaaacaatatgttgcttccttacaagaagatgtgtgctcagagaaaggtagaagctgaagctgttttactcgaatctgacgatgtgcctactgctataagcgaagaaatcagcaaattcagtgtctgcaagttagttttaggttcttctagcagcatattccgaaggaaaaacaaaggaagtaagactgcgaccaaaatctgtgagtgcattccaagcttctgcacagcatacgttgtctcaaaaggaaaactatcatctgtgcactcagctacatctgatgccatcggaacacctgaatccatttcttcttcaactgtttcatccccaagctctagaagcttttcatccagtgtaccctcagaatggggagacacatatgggtcagcaaatgtgtcattccaccagccatctctgtcatctcagcgtgaccaagcaattgcaaacatgaataagttatccaacaggagagctagcccttcaggcagtggtgggagtgagatctccaaccatgatgatacagtcctgacaagttcacactcgatcaattcagaaacacggttcagtagcagcagcagtgggaattctatctataagagcttcaatagagatcgttcatttgataactctgatcaggcatccgtgtcagatatggcaacaaatctgaaacattctcatgaccaggagtatctaaagcttgagattgagaggctgagggttaaactacggcatcttcagaagcttaatgagttagctcagaaagaatcattggacgccaatcagaaattacataagttgggcatccaggacattgaggatgaaattaagcttaaagagacagaactgacagaagaaaaggtaaggagattgataaggaaaaaagagagagaagaacaggaagttgccagaagagaagatcaattaagaaatgaaaatgctgaaagtgaagcaacaaaacagagtaatggcaatcaggaaggtgatgagaataagacaggagagaggattttcgtgcgctgttttgacgagtataacaggtatacctgggaggagataaaagcatcgactttgtcactgtctgaggatcttatgattggcaggggatcatatggtacagtgtacaaggctaagtttcatcatacagttgcagcagtaaaagttctgaactcccctgaaggctgtggaactcagcaattacaacaggagcttgaggtcctaggtaaaatccggcaccctcacttgctcctgatgctaggtgcatgccctgagcatggttgcttggtctacgaattcatggaaaatggcagcttggatgacatgctgcaacggagaaataatacaccgccattgacctggtttgaccgtttcagaattgcttgggaggttgcaactgctcttatgttccttcacagttccaaaccagagcctatcatacaccgggatctgaagcccgcaaacatattgcttgacaggaacttggttagcaagataggtgatgtaggtctatcaactttgcttccaagtatggatcagtacctgtccacaatgatcaagaacactgctccagtgggcactttctgttacatagacccagagtatcagagaagtggcgtggtctccatgaagtccgatgtttatgctctagggatcgtgatcttgcaattgctgacagcgaagtcaccaatggggattgcccatgttgtggagactgcactagaagatggacacttcgtggacattctggatgcagctgctgggcagtggcctttgaatgaggcacaagaattggctttcctagccctaaagtgtgccgaaatgaggcgcagagaccggcccgacttgagcgatcatgttcttccagcattggagcggctgaaggatgttgcaaccaaggccagagaaatggcttttaatggccaccaaacagcacctccaagtcacttcatttgccccatacttcaggaagtgatggctgatccatatgtcgcatcggatgggtacacatatgaccggaaggcgatcgagctgtggctaagtatgaatgacaagtcccctatgacaaatctgagattgcctcacaagagccttataccaaatcactcgcttcgttctgcaatcatcgactggagaacaaagagttagtagctggtacacattctggcctgcattctccagaatgtagcagttgatgattgattttcttctcaaggtgtaaattttttgcagatctcatgtagaagtagtcttcatgttggttccaaaaataaaaaataaaataaaataagtggtgttcataaagaggttcaagttgtgcagctttatcaaatagtagtagtagaaattgtttcctactagctcataggcaaacaccttccacctcactgtcttagtgaatggtgaacaattatttttttctcctttgccattcataatgatgtgttgtaagcttgtaattagtgctctcaacatttgatctgattgtaggaaatcttaatgaaaattcagtatgaagcttt

SEQ ID NO: 15153 - DNA, 1379 bp, Oryza sativa
  ref <308>: DATABASE ACCESSION NUMBER: AK065684
  ref <309>: DATABASE ENTRY DATE: 2001-12-06
gcttcttgcaaagaatcctgcctcccccgccgacgcctcctcccctcccccgcgatccctccgccgccgccgccgccgaatccggcgtccccagcctaggcgagatttgggggcgcgcgatgaaggagaagcgcgggctggaagccgcggcggccggtggcgacggccaccccgaggccaagcgcgcgcggcctcccgcactggccagtgttattgttgaagcattaaaggtggatagtctgcagaggctttgctcatcactggaaccaattcttcgtagagtggttagtgaagaagtggagcgtgcgttgggcagactgggtcctgcaacaataactggaaggtcttccccgaagcgaattgaaggtcctgatggaagaaatctgcaactccagttcaggacaagactgtctcttcctctttttactggaggaaaagttgaaggggagcagggagccgcaattcatgttgttttgcttgatgctggaactggttgtgttgcatcttctggacccgagtcatgtgccaaacttgacattgttgttctagaaggtgatttcaacaatgaagatgaggagggatggtcgggagaagagtttgaaagtcatgtagtgaaagagcgtgaaggaaagcgccctcttttaactggtgatgtacaagtcacactaaaagaaggtgttggcactgtaggggagcttacattcacagataactctagctggataaggagtcggaagttccgacttggtttgaaaatttcctcaggattttgtgagggtattcgcatccgcgaggcaaaaactgaagctttcatggttaaggaccacagaggagaattgtataagaagcactacccacctgcgttgaaagatgaggtctggaggttagaaaagatagggaaggatggatctttccataagagactgaacaaagctggaatttctacagttgaagacttccttaggcttgtggttcgagatcctcagaagttgcgcagtatccttggaagtggtatgtctaataagatgtgggatattcttgtcgaacatgcaaagacttgtgtcttaagtggaaaatattacatatattattcagacgagaatagatctattggtgctattttcaacaacatctatgcattctgtgggttgatttctggcgagcagttctattcatctgaaagtcttgatgatagccaaaagctctttgctgatgcattggttaagaaggcatatgataattggatgtatgccattgaatatgatggtaaagctctcttgaactctaaaccgaagaaaaaggctgcacccactggacacgttgagacacatcctcctctgagtcaacctgcttcatacgaacaacgcatctcatcagcg

SEQ ID NO: 15154 - DNA, 1464 bp, Oryza sativa
  ref <308>: DATABASE ACCESSION NUMBER: AK065685
  ref <309>: DATABASE ENTRY DATE: 2001-12-06
ggggagtaggataacgttgcttggattggtggctagtgtagtggtggtagccagccaagaaaccatttctttccggtgtattattagcaaccggagagagggtgttgtgaattgggaatttcgggattattgctttgagaagagggcagtgatggctgaggaagaagcaaaaaagccggcggtggtagtggccatgaagggtcatccggggtctggcaagtccacggtggcgcgcgccatcgccaccgcgctctgctgcccactcctggacaaggacgatgtccgggactgcacgctgccacttgagcgcgtcgacggccttgctgtcggcatgctcaatgagctctcctatgccgtgttgtggcggatggcagagaggcaggtccagctcggcttgtccgttgttgtggattccccgctgtcacgccgcgctcaccttgacgcgctcacccgcctcccgggtgcccttgttatcgttgtggaatgccagccaggcaatgaagaggaatggcgccgaaggctggagaagcgaggggctgcagtgccagaagatggtggtgatgggtggcataagccgaagacgtggaccgagctggaaaggcttcgggatgggtaccaaggttgcacagattatgaatttggggatgtgccaaggattgttgtggatacaactgatccgacagccaattcagaggcaatttctgtcagggttgtagagtttattggatctattcttgcttgtgaccattaagtctgctattatttcttatcgagcatcaaaaatggggagtaactctagtttcctggtgctagatggcatcttctgttcttcagcctggggtgcctgttaccttgcaagaactagagccttcctcagagtccttcagacaaggagcatcgcttagagtaactggagttctgcagtcgtatgatttgaactctgcaattgctgttattcaagacggcggtgcaagcctcaaggtagacactcagaacttgagagagatcagcttccgcacaaattcaacctaccagttcatcggtgaactcctgatcaaaccagataacgatgccgttttgcaagcacgcgtaggtaggaatgtcgacggtattgacctgaacctctaccagcaatctttgctcatccgacgacaatatgaagctcaactacggtccaggagagcatgatccaaagccctgtgaatcaggaaaatgttcaatgatctgtctgcttgactgcaatggttcccagttgcaaaggggagcagagtatcataactaaatctctgaaggcagatcatgtcagtaggactaggaccaccataaacattggtggtgagaattgagatgtagagcaaattgtctggttgttttcatgcctggagatttttctgttgcatgactttgttaggaaacatgtacttttcaaatttcatcaaagtgatgcagagaacaggattaacc

SEQ ID NO: 15155 - DNA, 1283 bp, Oryza sativa
  ref <308>: DATABASE ACCESSION NUMBER: AK065686
  ref <309>: DATABASE ENTRY DATE: 2001-12-06
gggcttcgatttgggagtaagctttaccaggagcagtgcgatggattccagcagcgccgagatcctcatcgacctcggtggcttccggctatacaaagatggccacgccgaccgtgccggcggcatggagagtgtgcctgccggctacgacgacgagaccggcgtcacgtccaaggacgtcgtcatcgacgctgtcaccggcgtgtccgcgcgcctctacctaccaccgtgcatccagccagctaccgacgacgacggtaagaagctcccgatcctcctcttcttccatgctggctacttcgtcgtcgggtcagcgagctggcctcctgtccaccgctacaccaactctgtcgtcgcaagcgcccgcgtcgtcgccgtcgccgtcaactaccgcctcgcgcccgagcacctgctcccgacagcctacgacgactcatgggcggcgctcagctgggcggtgtccggcgccgacccttggttccgcgcacggtgacaccggccgagtcttcttgtccggcgccagcgccggcgggaacatagcccacaacatgaccatcgccgtgggcgtgcgcggcctggacgccgtcgtaccggcgccacgcatagagggcacgatcttgctccacccttccttctgcggcgagacgaggatggaggttgagccggaggagttctggggcggcgtcaagaagagatgggcggtcatcttccccggcgcgaacggcgggctggacgatccgcggatgaacccgatggccgccggcgcgccgagcctgacaaagctggcgtgcgagaggatgctggtctgctcggcggggttcgatccgaggaggacaagggatcgggcgtactacgacgcagtcaaggccagcgggtggggacgcgaggtggactggttcgagtcggagggtgagggccaccacttcttcgtcgacaagcccggcagccacgaggccagcaagctcatggaacgagtggctgctttcattgctggccattaaactgtgcttccagctggataatttgcctcgtgtttctaagagcaaggataacagtagagctcactatctactattagcacatcttaaagccaacacatataatagattagctataaggttggctataatttttcttttcctatctctatatctcacttatacatttattatttttgtcttggagcttgtgataagctagctcttgtatgagagccaatacctttgattttttgttacctctctactccatataagcttatagtaagcttatagctcactatt

SEQ ID NO: 15156 - DNA, 3684 bp, Oryza sativa
  ref <308>: DATABASE ACCESSION NUMBER: AK065687
  ref <309>: DATABASE ENTRY DATE: 2001-12-06
ggacatatacatcttcgtgcgatttatttgaggaaacccaacgcttaggtggttgtgaagctgcgcggtcgccggggcaaagcgaaccacatggccgtacgacgagcgccgctgccggtgggaccgagggccgccgccgacggcaatccggcgccgccgggtgagtcgagcaaaggccccggccttgacggcgagttccggcagctggtggacatcgccgacgagggggtcaagctggtcaacgacgccgagctgaggctgaagaagcgggcgtgcgacaaccccaaggacctcgccgcgtggctccggcggctccagagcgccaaggaggacctggacgacgcgctcgatgaattcagagcttccatggcggcgcagcggcggcggccggaacaggatcaggagaggaagaaatcgattcgccattggttctcacgctcatcagctaaccatgaggttgacaagaaaatgaaaatcactactgaaaagctgaataagaaattccatgggatcttacagaatggtcgtgaacttggccttcaaccaatcaaattgcaaagacacagtcgaatatctgaatttcctggggatctctcaccccagtacactcttgtaggagatattgaacaagaaaagttgaagttgatcaacaaattgactggcagcgaaagcaccagtgctgtcattgcaatctttgggttgggtggaattggcaagactatgttggcacgaaaagtacatgatgatctcctcacagaaagtgcattcagcactgttgtatgggtaaatggctccaaatctttcactaaaaagaaattgctacgtgcaattctaagttcttctggtggcaagcctggagaggcaaaaaaaaagagcaatgagcaaattgaggacatgttggttacaatacttggagcaaagaaattcttactggtacttgatgatgtatgggctgaccagattcatcaggattttctaaaagttagcttgcaagcacagcaaggaagccgaattctgttgactacccaggatgagggagttctgaggcaaattgcttctgatgacatccacaaagtaaacaaattgagtttccccgattgttggtctctgctctgcagtagtgcttgcctggatgaacaggattgcgacgcattaacagatattggtataacaattatccagaaatgtaacaaggttccattggctatcaaagttttgggtggtctcctaggaacaaagaacccaagaagagaggagtggcaggaagtgatcagtgagagtgaagggtggactcttgagaacgttcctgatggcatggaggaaatatgtctccccatctacttagcctattacagtctgccatatcatttgaaattatgttttgattactgcttgcagctccctgaaggatttgttattaggccacaaattgttactcagctatggatagcagagggctttattcgagaacaagataaccgcaaccctgaagatatcgcagaacagtattacaaggaattggttctaagaaatcttctgcagcctgagattgggtgctttgacatgtcgaaatgcacagtgcatgattgtgtaaagtccttgctgcaaccttcaactaaagacaagaaatcaacagatagcaccgaagggacaaagttttttagaagcttcaggacagcttttgtctacaagaatccatcaggagatcgcggcctcaattggctcataaatttgagatctctcataaatttgagatctcttgaccttactggtacttgcattaggtacataccgaagtcactagaacatctacatcaccttaggctcttaaacctctcactgacacaagttttagagcttccggaatctattgagagcctcagcaacctgcagttcttgatacttcggtgttgctattggctcgaaaccctgccagaggaaattagtaatctggtcagcttgcggagccttgatttggaagggactacaccacatatagttctgtcaagattatcagccctggagcagctaactgcactgcatggtttcatagtagaccacaatgcggcagtacccgacaatgatcatcagaacggatggcctatgaaagagctgagtcctttgaactcattgcggagcctgcagataatgggcatcgatagagttccagatgaatctagggcgcaagaagctaacctagcaagcaagtctcacctcacacatcttgagttatgtggtagtagcaccagtgattcacaagtctttgtaccagaggaagaacaagatagatggctcagtgtgctttgcggtctccaacctccacaatgcttggaatatctcaaaatagcgagctattatggatcatctcttccggattggatattgcaacttcgaaacctccagcggcttgtgcttaccgattgcaaactctgtgatagcctcccagcattggggcagctacaacaactgaagttcctcacaatcaatggatgtcctaagttacgcatcatcgagtggcggactggtgctacgactaaactggtatttccaaagctagagcagctggacctcagggacatgcaggccttggaatcattggataggtttaaacatggtgacctgctttccctgaccaaatttcacctagagaacagtcccaaattgagatccctcccatctggccttggttactgcaaggtactgacaagtatgaagattgttggtgctgatagcctccaagtgattgacaaccttcctatgctcaaggaattggttgtccaagactgcagagaacttgtcatgatctcaaatcttccagtgcttcaggtcctggtagtcgttgactgctccatgctgcaagatttgaggggagttgcaggcctaaggcatgtccgcctcgtggacagagtgacgaaagaacttccagattggttgacaggccatgaggctcctctgctgcaaacattcaccatagtcggcacgacagaactactcaggaagttagttcccaacagcaaaggctggtcggctatacgtaacatggacagagtttatgcaaatttgcctgatggggccccgttcttggcttacaacaagggcagacctgattttcaaatgattaagacagcggttggccctcagttggaagatcgtccttctgcatatattatcctcagaaagcttgtcaggatggcctcacaaactggccttctggatagcttaaaacggtatttcctccctccacttgccattgttcttgtactcttgctgctggcaaccagagacttcacgctcattggaatcttgctcgccttctttgcggcaatagcatgccttgctgggttttattatatatatattcagaaagcttcagggtgaatacttaaaccatgcagctggacgaccaatggagattataagatagagaattttatgactgggaacatgtactctatattcaggcaataaaataagcttgatttggaggtacaactggtggcagaaattataacaaaaatatcattttgaggttaagcaaaccaaatcttctgtatgatggaatgctcttcacattagataaccggcaggcttgttttttttcattggtacgacagtatgcagttctgtgtattgtaactggtaaaatttgatatacatctactctgtttatgttctccttgttcc

SEQ ID NO: 15157 - DNA, 1510 bp, Oryza sativa
  ref <308>: DATABASE ACCESSION NUMBER: AK065688
  ref <309>: DATABASE ENTRY DATE: 2001-12-06
ggcgagaaaaatccccagcgggagagctcacgaactgttcccttcccatggcggcgctgcctctcctccggtggggcgcttcctccctccgaggaggccactcctccgctccgccttcgagccgcctcttctccgcgctccgccgacctcccgccgccgcccgctgcgagaccggctcgagggtcatgctcaaggggatggactaccctgagctcgagaattgggtgcggtcgcagggcttccggccagggcaggccatgatgctgtggaaatgcctctacgggaacaacgtatgggcgcattgctatgacgagctggctggtttaaacaaggacttcaggaaaatgctaacagatcatgctgatcttaaggcattaactgtgaaagacattcttaacgcgtcagatgggacccgaaagatactgttctctcttgaagatggatcagtgattgaaacagtttgtcattccttgcactagtggcaggacaactgtctgtgtttcaagtcaagtgggttgtgccatgaattgtcagttttgcttcactggaaggatgggcttgagaaagcatttgtctacagctgagattgttgagcaggctgtgtttgctcgtagactgttttcagatgaatttggatccatcacaaatgttgtatttatgggcatgggtgagccgttgcacaacattgacaatgtactaaaagcctcagctattatggttgatgagcagggccttcagtttagtcctcgcaaggtcactgtctccacaagcggtcttgtcccacagataaaacgcttcctacaggaatccaattgtgcgctggctgtgagtcttaatgcaacaactgatgaggtgagaaactggataatgcctattaatagaaaatacaatctcagcttgcttcttggtacattaagggaggaaattcgtttgaaaaagaagtacaaagtgttttttgaatacgtcatgcttgctggagtgaacgacagtgtggatgacgcgaagagactagtagatttagttcgcgggatcccttgcaagatcaacctcatctctttcaatccccatagcgggtcacaattcaagcccactcctgatgagaaaattattgagtttcgtaacattttaattcaagatggccttgttgtatttgttcggctcagcagaggggatgatcagatggctgcctgtggacagctaggagagcctggggactaccagctacccctgctccgtgtacctgagaaattccaggtcgctttgtgactctaaacagtaagtacggtactacaatcctcatagatattgtagaatagctttgacaaaagacatgtaactttcatgcggttcttagaggtcattctctgggccaacctgacgactgacggaatatttttgttactttctttaaggaaaatttttgttgttactacaacaagacagtgtcttcagctggcttatggcatgtaaaagaacatttaggcatagtgccgctaatctgctaagtacc

SEQ ID NO: 15158 - DNA, 1876 bp, Oryza sativa
  ref <308>: DATABASE ACCESSION NUMBER: AK065689
  ref <309>: DATABASE ENTRY DATE: 2001-12-06
gactgccaactgctcatctcgtctcgtctctctctccccccaatccggcgaccccaattccccaaaatccatctcgaatccctagctcgcgggcggccagtgcgatggccgccgccgccgccgccgccgtcccgtgcgtaccattcctgtgcccgcctcctccgccattggtctcgccgcgtctccgccgtggccacgtccgcctccgcctgcggccgccaaggagcagcggcggtggaggcggaggcggagcggggggagacgagccgcccatcaccacctcgtgggtgagccccgactggctcacggcgctctcccgctcggtggcaacccgcctcggcgggggcgacgactcggggatccccgtcgcctccgccaagctcgacgacgtgcgggacctcctcggcggcgcgctcttcctccctctcttcaagtggttccgcgaggaaggccccgtctaccgcctcgcggcggggccgcgggatctcgtcgtcgtcagcgatcccgccgttgccaggcacgtgctgcgtgggtacggttcgaggtacgagaaggggctcgtcgccgaggtttccgagttcctcttcggctccgggttcgccatcgccgagggcgctctctggacggtgagacgtcgatcagttgtaccatctctacacaaacgatttctctcggtgatggttgacagagttttttgtaaatgtgctgagagattagtggagaagcttgagacatctgctttaagtggcaaacctgtaaatatggaagcaaggttctctcaaatgactttagatgtgattggtttgtccttgttcaattacaattttgattccctcacatcagatagccctgttattgatgctgtttacactgcactcaaggaagcagaacttcgttctacagatcttttaccatactggaagattgatttgctgtgcaagattgttcctagacaaataaaagcagaaaaggcagttaacatcatcaggaataccgttgaggacctaattaccaaatgcaagaagattgtagatgctgagaatgaacaaattgagggtgaggaatatgtaaatgaggcagaccctagcatcctgcgattcctacttgctagccgtgaagaggtaaccagtgtgcagttacgtgatgatctattgtcaatgttagttgctggtcatgaaacaacaggctctgtactgacgtggactatttatcttctcagtaaggatccagcagcgctgaggagagctcaagcagaggttgaccgtgttctacaaggtagactccccagatatgaagatctaaaagagctgaagtacttgatgcgctgtataaatgagtctatgcggctttatccacacccacctgtgttgatacggcgagccatagttgatgatgtgcttcccggaaactataagatcaaagctggtcaagatattatgatttcagtgtacaatatacacaggtcacctgaggtttgggacagagctgatgattttattcctgagagatttgatttagagggacctgttccaaatgagacaaacactgaatacagatttatcccattcagtggaggtcctcggaaatgtgttggagatcagtttgctctcttggaagcaattgtggcacttgctgttgtgttgcagaagatggacattgagcttgtgccagatcaaaaaattaacatgactactggggccacaattcatacaaccaatggcctgtatatgaatgtaagtctgcgtaaagttgacagggaacctgattttgcactcagtgggtccagatgaacggaaggaaacagcttcaaagcagaaaagcaaaagatgtacatcgacacacatgagatgtaatctacaagtttaaatttattgct

SEQ ID NO: 15159 - DNA, 838 bp, Oryza sativa
  ref <308>: DATABASE ACCESSION NUMBER: AK065690
  ref <309>: DATABASE ENTRY DATE: 2001-12-06
gagcagcagctcgccatccaagcatcaaagcttctaaactgaagcttaatctatatataaggagagttcattttgattttggtgaggaagaagtagtagaagtgaattagtgatatcgatcagagtgtgaagaagatgtctctggtgaagctgtttgatacgttggcgttcgacgcctggaacccgttcagcatctttgggacgacggtggcggcggacgcgtggctggcgagcgacacgtcggcgttcgccaacacgtacatcgagagccgggagacggcggaggcgtacgtgttccgggcggacctgccggcgggggtgaagaaggaggaggtgcgggtggaggtggacgaggggaacgtgctggtgatcaccggcgagcgcagcgtccggcgggaggagaagggccagcggtcgcaccacatcgagcgcagctgcgccaccttcttcggcaggttccacctccccgacgacgccgtcgtcgacctcgtcagggcgtccatggacggcggcatgctcaccgtcaccgtgcccaaggtggtcactgacaagcagcccgccatcgccgccgccgcacccgtccccgccgtcgtcgcacccgctgtcgaggcgaaggcaatcgaagccagcccgtagtgatgcgatgaacacacacacacacacacagacagtcagtcaatccaacgatccgtatgtatacgttgtcgtcgatgataagttcaaagtgcttgcgagtaaggtgcttgctgtacttttggtttaattacctttggtgtgaaatgctttctcgatgtaagacaagaaagctagtagcaaaatcatactatttgcttgatgc

SEQ ID NO: 15160 - DNA, 931 bp, Oryza sativa
  ref <308>: DATABASE ACCESSION NUMBER: AK065691
  ref <309>: DATABASE ENTRY DATE: 2001-12-06
acgagaatggtggcgagaagaatatgctgatgagcttgcgaaaaagcagaaacgacgtgcacttgctaaatcaaagagcgagcaggcagggttgcaatggtgggagcgggatattgacgatgacttggatgcaaagggacgatccaaatggagtatgatgaagagctggagtcggagaagcaatggcagcactggcaatggcaatggcaacggcaatggcagtattaactggtgggtcaatggtgcaagaagcacccgtgattgggcaagtggggaattcgttcccaagagtagtggcgcggtgagcagcacaccgagcatgcgcggcacggtgtgctatgtggctcctgaatacggtggtggtggtcctttgtctgagagatgcgatatctatagctacggtgtcttgctactggtacttatctcaggacgccggccgttgcaagtgacggcctcacccatgtctgagtttgagaaggcaagcctcatatcgtgggcgaaacatcttgcgcgcgtgagccgcttgattgatcttgttgatccagccctacaggatgtgaaccgtgatgaggttttactctgcattacagtcgcactcctttgcatccaaaggtctccagctcgtcgaccatcaagtgaggaggtactccgaatgctgtctggcgagggagaacctccgcacctcccattggagttctcaccgtctccacctggtgggttccctttcaagtcccgaaagaaagttcggtgagtttgtttagctcttacctagatgcaaaaggtagctttaactttgtcccttaatgtatgtctcttttggttcaagttcctattttatgtattcttttactcactactgtataaagttccctagggaaaaaggtaatgccgacctgaactcaaaattgacaacaacattgcctaattgatc

SEQ ID NO: 15161 - DNA, 1067 bp, Oryza sativa
  ref <308>: DATABASE ACCESSION NUMBER: AK065692
  ref <309>: DATABASE ENTRY DATE: 2001-12-06
gcgtgagttcgcccgccgcctgcgccgatccccatccatcccgtgagctagcagaggcgccgtcgtggtcgccgtcgttcgtcctgctgcttccgccgcatcccgatccgccactgctgaacggggtgctttcgccatgtcgaggctgcgggcgctgtggcaagcctccgttaacgccaccaggcgagccattgtgtggaattcagaagacctaatcccaccaagtgaaaagtacatcttcaattttaattcaaaagatgagctgaaaaggtggcacttgtattcagattccgagtatggaggtttatcatctgcatcattggagataactgatggtggtgctggtggggatacttcatcaactggtctcttttctggcaatctctctttggatatgtctgagggatcaacatggaagataaggcgtagtggtttctgtggaatgagatcaaagaagtttaatggtttcattgatcttgatgcatatgatactatagcgatgaaactcagaggggatggaagatgctacatatctactatatacacagagaactgggtgaattcacctggacaacaggaagataattcgtggcaagcctttgtgtacttaccccaggacagatggcaaatcatgaagatccctcttgattcgtatctacccacatggagaggaaatgtgatcgaagcaaagatggaaatgaaccctgctcgtgttgtgggaatgtctctatccgtaaatgctgagggcggtgtacctggtgcaaagactggaccaggtgattttaggctagaggttgattggatcaaggcattgaggacactctgaatttgtggtttccacaaatcggtctttttgtaggatttctcagggctggaaatttcttaccggcactttttcatgtgataattgctgaatatcacgaggcatggagatgcgtcatgcagtttgtattactcctagtcaatacaatgggacatcgaaaggaggcaactgttcagcgcagatgaataatgaggtctcttttgcttttgggggaaatgaatatacaaatgtatcacctgtttcc

SEQ ID NO: 15162 - DNA, 4030 bp, Oryza sativa
  ref <308>: DATABASE ACCESSION NUMBER: AK065693
  ref <309>: DATABASE ENTRY DATE: 2001-12-06
gccctgcattggtggcagaagcagacccatccacacaatcaaagaagaagagtcagaagaagagaggtgagctggccagcaatggaggcgacggcggtgagcgtgggcaagtcggtgctcggtggagcacttagctatgcccaaaaccgcgatcgcggaagagggagctttgaagctgggcgtccagcgcgaccaaagtttcatcagggatgagcttgagatgatgcagtctttcctgctggctgcggacaaagagcatgatggacatcatcacgaggtcatcaggacctgggtgaagcaagtacgtgacgtggcctacgacgtggaagactgcctccaagactacgctgcccggttgaagaaaccaccctggtggagcctcccttgcacagtacaccgggagaggcgtcgcatcgggaacgagatgaaggagctgagagccaaggttgaggatgtcagccagagaaacatgcgttaccatggtgtgtctgcagctgccccacagtcttcttctgttactgctgctgagctgctgcaatccactgccgccatcgacgacattgatgaggctagacgtgccgccaagcaacaagaaaaggtggacctcgtgaagctcatcaccaacgacggacaaggtggacttagagtgattgctgtgctggaaacaagaagtggacctgctgggacagtgcccgttgttcgagctgcctaccaaaagctcaaaggagagtttgaatgccacgcctgggtaaggctgatgcactcctttgatgcaaaccaattcattgggagcttggtgaggcagttcaaagcgaactctcgcgagggtactggcaagacaccacaaggaacaccttctggggtgtctgttctgaatgagatggaagcacaagattataatctgcttcatgactttactggatatgtgaccaacaagaaatacttggttgtgcttaatggcctgtctacaatagaagagtgggactggataaaaacttatcttccaaacaatcataacgggagccgagtcctagtgtgcacacagcaagctgaagttgcaagctgttgtacttgtaccgatgataagtacaaggtgtctgagattcaacacgaagggtcattttccaaacctctttatgtcttctacaaggaggtggtctctcagccagttaattcagattccactaagatgaaatcagagaccaggtccagcatggagggtgcctctactactagtgacagcaaaacagtaccttctgatggcgtgatacaggaggatggcccgaaggacctgcctgaaagcagtttaccccctcacctcaacagagattccaacactgtgtctgtgaaggaactttctcgcagcacgacacagctcattggtagaggaaaagaaaaggatgacgtcatcaaactgctttctgattgtaatccgatccgtcaagtgatttcggtgtggggaatgggtggcattgggaaaaccactctcgtcaaaagcatctatcagagctccgagcttgagaagcttgggtttgagaggcgtgcttgggtaactgtattgcgtcctttccagcttactgagctccttaggagcttagctcagcggttggttaaagattcccctggaaagaaggtagaatctataccaggacttgcaaggagtggtttaagcacgatgggatctgaagaattaattgacaagttgaagcaagatttaactgggaagaagtacctcattgtccttgatgacctatcgactactactgagtgggattcaataataagaaacttgcctataaacaacaatggtagccggatcatactgactacaagatttaaacttgttgcgcaacattgttccaagaaagaaatgaacatgcacaatattgaaggtctaacagacggagatgctcttgagctattcttaactaaggtacgcatggatggtgatgaatcagaattgaaacctgacttgaaggaggaagcaaaaattatcatcaagaagtgtggccgacttccccttgcagtcgctacagtgggtggtttcttgtctgccagacctcgaaatatcatagaatggagggagtttagtgatcgcatcagtgaagaatttgataacaacccaagtcttgagatgataaagaaaatacttgcatcaagctatgagggtttaacttaccacttgaaatcttgcttcctatatatgtcgattttccctgaagactctgacatcagatatagacgattattgaggcgatggactgcagagggttactcaagagcaacgagaaacaggagcaacgagaaagtggcagaagaacagttcacagctcttctcaacaagagtatgatccaacaatcaaaaacgattgccagtgggaagacaggtttctgccaagtctataatctcatgcatgaaatcatcatttcaaagtctgaagaagaaaaccttgttcttgttctagatgaccacatcacctcgcgctctaaagataaagtacgccaccttgttgtgagcaagagctggagcagagaaaagaacgatatgcaaaatatagtggatgtgtcccacatacgatctctgacagtctttggggagtggaaatcatttttcctttctaagaagatgaggatgcttcgagtgcttgatttagaagatgcagaaggtcttcaggatcctgaccttgtgccaattggaaagcttcatcatttaaagtacttgtctctacgaggatcttttggagtcttcaatcttccaaattcctttggtaacctgttgaacctggagacactagatatcaggggaacatgggttacaaagttgccagcaaccattggtaggctccaaaacctgaaatacgtccatgccggatctttagatgatgaggatgatcagccgataattaaactactgcatcagttcagatcaatccgagaagagatgggaaccaggttcgctgtatcatatatcatgttgttcatcaccgcttggttaagaaacctggatgtatgtggtgttaaagtgccaagagggattggacggttgaggtccattcacacactgagcatcgtgaacattgcacggggaaaggccttgctcaaaaacctcaaaaagctaacccaactgtgtaaactaggtgtgactggcatcaacaagaataactgcaaagagctctgttctgccattgccgaccatggccgcttgcagtccttattactgcgggcagagggtaatgctgggttagaaggttgtttggataacatgtcccagcctcctaaagaccttaagagcctccagttgtacggcaatctggtgactttaccagaatggattaaggatcttaaaattctacaaaagctgagccttcgcaacaccaatctgaaggcagatactaccatggaagtgcttggaaacctaccaatgctagccattcttcgtctccaggacaatgcgtgtgaggaggaagaactctgtttcggtcccgagcgtttcacaggtctgacgtcattggagcttctcaattgggagagcctcaagtcggtgaaatttgaacgaggagctactcctaaactgaaggtgctactgctgcactactgttggcaaatacacaatggtgggttttctggcatagaaactctctcgaccctaaaggaagtttcaatcttgggctataattatgaccagacctacaccgaattcaaggaacaattacagaagcaacttgacatgaacaagaacaaaccaaatctaagtattctgtagtccaaaactgccactggctttcatagaattgctccctccacactcaaatatgtggcattgtgtcattcaggtagtgtttcaaatttcaaaatcatgtataattatgacaatttcaacattaagttttactcccttttttctcctcatgtaccatacgctttaagtaattaagtgtataagtttagtttagtttcatggtgaaaattgtagtacctttaccatttacttccagtggcaaagacaacagaaaacacaaagtggttcatc

SEQ ID NO: 15163 - DNA, 2751 bp, Oryza sativa
  ref <308>: DATABASE ACCESSION NUMBER: AK065694
  ref <309>: DATABASE ENTRY DATE: 2001-12-06
ggcatctcatttccactcgtgccattttcgctcccaagtcccaaaccacggcgacccgccgccatccatccccctaaacccctagctagggtttccaaccaccatggcgaccacgccggcggcagcggcagcggcggcggcggcggggggcgcggcgatcctcgacactctcggggacttcacctcgcgggagaactgggacaagttcttcgcgctccgcggcaccggcgacagcttcgagtggtacgcggagtgggacgacctccgcgccccgctcctctccctcctccatggcggcggcggcgcggagggcggaggcaaggccccggagatcctggtgcccgggtgcgggagctcggtgctctcggagaggctctacgacgccgggttccgccgcgtcaccaacgtcgacttctcccgcgtcctcgtcgccgacatgctccgccgccacgcccgcgcgcgcccggagatgcgctggcgcgtcatggacatgaccgacatgcagttcacagatggatcatttgatgtcatacttgataagggtggactggatgctcttatggagccagaggctggcacaaaactagggatgaaatatctaaatgaggcaaagagagttttgaaatcaggagggaaatttgcttgccttacccttgcagaatcccatgtcctagctctgcttttgtctgagttcaggtttggatgggatatgagcattcaagctataggtaatgaatcctctaagtctgccttccagactttcatggtggtcatggtaaaaggaaagatgggtgtagtacacccaatacaatcactattagaccaatctggtaaattctgtaacatgaaacaggcaaatgatgtgattcattctcttgagaaggaaaacaccatccgggagtcatacagttctggtgttgatattactttgtcattacgcgatcttcagttaggagctgtaggagatctgaaggtgattatcccaggacgacgaaggatgttcattcttggtgatcagggaaattcactttattgctataaggctgttctcttggatgccagaaagcgaactgagacctttgtatatcattgtggagtttttattgtgcctaaggttcgagcacatgaatggctttttgcttcagaagaaggacagtggcatgttgttgaaagtgcaaaggctgctcgtctaattatggtattcttggatagcagacatgcaaatgctgacatggatgttatcaagaatgatttatctccccttgttaaggatctggaacctggaaatcctgaagaggaagctcgtataccgttcatgatggctggtgatggtgtgaagcaacgagagattctgcaagaggtaacttcagaaataactggtcctatggttgtggaagatgttgtttatgaaaataatgatgaagaccaaagttctatgactgaaaagatgttccggcgccttatatttaaaagaaattctggcttagtgcaatctgaagcattgcttgtcaaagattccaccagtgacaaggcagatgaaaacaacaaaaaatcaccttcagcatccaaaaaaaggaggaaccagaaaaaaggtccctcaggatccaagaccgttctgaggattgatcatagctaccttggtagctcttatcacagcagtatcatatctggcttttctttaattgcatctgctctggattctgctgcagtagctggaacaaaagttagcacaaccgtcatagggcttggagcagggactttaccaatgtttcttcgtggatgtctccctttcctagatattaaggttgtggagttagatcccttggtagaggaggtggcaaacaaatattttggcttttcaacagatgagcaattgcaggtgcatttgggagatggaatcaaattcatagatgatattgctgttgcagacagtagggctaccacccagcagctcatgtctactggcaatgagaacaatgcagttaaaattcttattgttgatgttgattcatctgacgtgagctctgggttgtcttgccctcatgcaaactttgttgaggattcttttcttctggcggtgaaaaagttccttgatgaaggtggtctgtttatcatcaatttagtctcgcgatcatccgcagtcagggaaatggttgtttcacgactgaaagcagcctttgagcacctatattcactacatctcgaagaagatttaaatgaagttttatttgcaaccccaagtgaaagatgcctggataacaacaatatggatgaggctgtggccaaactgaaggccatgctgaaattcccagtgaatgtagaatcagatatgaagaagttgcagaagctgcagtagtcggctcagctgcagcgaaatgccattcattttgtcctcagcgaactcaggaaaatgctggtgtaacttccttcaactataggaccaaattacctgtaccaaaggcataggtacaccttccttcgtgttgtattgccaaattttgttcttgtcaaaccgtgccgcgatctgtatagagctacaataggcgagaagatgtctgtcagttttggtctccattgctgagagcctttctaaatcattgacagtgtacgttatagaagtgactcccaaaagttggccagtgcatagaattgcattgcagcttctgagccgtcagtaggttggcagacctgaccgtaacatgtttactacacaattgctactgctggatacgcatgtgattttcattgttt

SEQ ID NO: 15164 - DNA, 1389 bp, Oryza sativa
  ref <308>: DATABASE ACCESSION NUMBER: AK065695
  ref <309>: DATABASE ENTRY DATE: 2001-12-06
gtatttccaattccctgcagatcccttcatctcctccttcagtttctcatcttcaaggccaaacgttgaatcctcctcaattgctagactatttctctaatagctgcagcacccctcttcctttcctctttgtttaaccaccacaccactgccccagccatgccgtgctgctgttgctgctgctgctgcttccgcaacaccgtgctgcagcattgaagctctcccacttcgcttgtacgccattgtcctgctgctcggtacctcgagccggtgccatcgtcgcagcccgagggaggacggctgccatcacgcctgcaagccgcctctctgctggctgccgggaggtcaagccgttgccatcgtcttcttgtttcaaacactgctacatcatcgagaggtccctcaattgccggggattggtgcaacgttgttttgcccatccaccgcctcctgtgctatcttttatcaagctgtccaccagcgccgacgattctctgtcaaccacccgctgctgctgcaacttctcctttgcgccaccaactaaatgccatcatcggtggtgaaccacgttgctccttcatgttcggtcgccgtcgcctgcacgcagaggcgctgctgccgtcgtggaaccagagccgccctctcgccatccacttcggaagcccaagccactgatgccatcttctcctttgctggagctttgttgcttcatcttctctgccatggctggtaatcccctgcactccatccatgtactgttttgtttcctccattcaagatcaaaatttaaatcactaatcatcagttagccccgttttcactgtccctccaattctcggttggttgttcatctcctttgcatataccaacgtgaatttttttgagaattaatattatttttatggaaaatcgcaaaagtagtggtcaaccggagaaaatcgcgaaagtaggtccctgtcgaacgggtgcagttcgatagggcgcctatcgaacggccagagcgcgactggcgaggagatcggaaggctaccgttcgacaggacctgtcgaacagcccccgttcgacaggcagggctgtcgaactgcccctgttcgacaggagggctgtcaaactgcccctgttcgacaggatatccgtcgaactggcgtagttcgacagggtcgcgttctccatttatttgtaataagttatttttttaataatatgtaatttattttagtgtgtaagaaaggaaaatatttttgtaatgttatatgtatatgatttagggttttgataatgtttggtaagaaattgtagtatttttttgttggttaaaatatttgaattatttagtttcattattttttgtatatttgaatgataatttgtcatgattcatttgaagg

SEQ ID NO: 15165 - DNA, 1574 bp, Oryza sativa
  ref <308>: DATABASE ACCESSION NUMBER: AK065696
  ref <309>: DATABASE ENTRY DATE: 2001-12-06
ggatccggagcagcaggtgaggctgcgtggggtttctctcgtcgtccccgccgcgccgccgccgccgcatcctccgggtgggttgccgccgccgtcggtcaccgatcctcccagtcgagtgcttgaaccaaacgccgccttggttgagagatggctttcgctggtagagttgtgaatgcgctcaggaggacttcggtctcgtccaacccgtcgctgctccaggcagtaagatgcatgtcctcaaagcttttcgttggaggactttcgtatgccacagacgacgccaccctcaaggatgtgttttctcactacggcgatgttcttgaagctaggatcatcattgatagggacacaggaaagtcaaaagggtatggatttataacttacacatcaagcgaggaagctgcggctgccgttactgccatggatggcaaggatcttcaaggacgaattgtaagggtcagcaccgccaatgaccgtgctggtggaatacgtggaggtggtggatttggcgctggtggttatggaagtggcggtggatatagcagtggtggtggatatggtactggtgagtatggcagaggtggtggatatgctggcaatggtggatacggtggcagggcttctgaatatggtggttatggtgctgggggatacagcagtagtgggggctataatgctaccagtgttcttcatggaaatgctggtggctacggtagctctggtgtgtcccatggaaatgctggtgactacagaagctctgatgtttacaatactaccaacacctatggcgctggcaacttcagccatagtggtcagtccggtggcagcttcggtggaaacaacggtggaattagtggtggatgatttggtgccgccggtagcagcaacctccacaactctgccaacttcagccatggtggtcagtccagtgatggtggcagcaacggcggcaactctgctagcaactttggccaaggtggtggctttggtgaaaacagtggtggatataacagcggacaatttggtgccgcgggtcacagcaatggcggctactctgccagcaacttcagtaatgctagctttggtgcaaacagtagtgtatttagcagtggacaatctggtgccaccggtcgcaacaacggtggcaactcggccagcaacttcagcctcggtggcagctttggtgcaaacaatggtggaattagcagtggacaatttggtgccgtgggtcacagcaatggaggctactctaccagcaacttcagccgtggtagcggctttggtgcaaacagtggtggatccagcaatggacaatatggtgccgcgcatggcaacaacggcagcaacttcagccacggtggcggctttggtgcacaaatggtgggtatagcagcggacaatttggtgttgcgggtgttggaaatatggtcataaatcggcatattttaatccaaaatgttaagacaataatcatggcataaacagtgtagggtgatctagtgagaacatgtaacagtagcaaactatcatgcgcatcatgaatatcaggaacaagagcatagcatatcagg

SEQ ID NO: 15166 - DNA, 1215 bp, Oryza sativa
  ref <308>: DATABASE ACCESSION NUMBER: AK065697
  ref <309>: DATABASE ENTRY DATE: 2001-12-06
ggaggcctctcctcgacgtcgcccgtacattctccagccgcgccatcgttctttcacttcacccccaatgttgttctagcccccgcgccacccaagatagatagattcatcgcgatcgatcgagcgggaggtagagactagagagggatagtgtgtgctgctgctgctgcgtcggagtaggatatcgcgatcgatcggtcgatcgggcggatgcagcaggggagggggaggaggaggatgatgcagggatcgtcgtactacgccgtgctcggcgttcaccccggcgcgtccgccgccgagatacgcgccgcgtaccaccgcctcgccatgaagtggcacccggacaagatcaccagcggccgcgtggatgcggaggaagccaagagcaggttccagcaggtgcacgaggcgtaccaagtgttgtctgacgagaagaggagggcgctctacgactcaggcatgtacgacccgctcgacgacgaccaggaggaggacgtcgagggcttccacgacttcctccaggagatggtgtccctcatggccacggtaggaagagaggagcccgtgtactgcctggacgagctccgctccatgctggacgggatgatgcaggatttcgcctcgtccgaattgccttcgcccagcggcggcttcttcgccggcgcgccctcctcgccgttcgccgacaccggcgccgcgcagcagcagcgcggggtcggctccgcctccgcgcgcgcgcacgctcatccccaggtggtcggcaactctgcctgcctcagccggatggccttctccagctactgagatcaatttttgccagcggccgcaacatcatcacctgcatagattagctagcctcgtcgacatcgagtgagagtgagtagtcggcggcggtgcggcgccgccccctgctgccgatgaggcgcgtcagcgtcgtgatctcatgaaggtgcatgcagaaaggtggcaaggcagggcactggaacaaagtatttctgtttattttcttgtcttgtttcgatgggatgggctctgcagcgagaactgtctatactgttccgagtgtaccgtgacaatgtgatatcacgggactgtttgcctttgtacagtttcatgataaacaatctgaagtagtagtaatgaactagtgacaatgatgatgatgatcgtcgttgttccgttctgttaggatgatgggacgatccctttggtgtg

SEQ ID NO: 15167 - DNA, 4476 bp, Oryza sativa
  ref <308>: DATABASE ACCESSION NUMBER: AK065698
  ref <309>: DATABASE ENTRY DATE: 2001-12-06
gactcatgcattccatcgaacaccttgcgatcaccctctcaccaccgctagagatcaccattgtgaggctccccagccggagctggaggttggagggagtggaggaatagtcttgctgccgccgtcgccattggggaagccgggtagccgaggagcacacgtcgaacacctgcgaacgtcgccgaccgctagccacctctgcttcgtccgcaccgcaccacgcgtcttcgcccttcgtcgtccgtccgttccatgaaattgtatatcggttagtcgtgaggcaacgtatgcagcttccaggaggtaaaggttgatcaagattatatcaagaataagaactttcctaagcaggcaagtcatcactaatctttgagcatgttgaacccattgcgaacttattttggatttaaaataaagtttgcatgctatatggatatatgtgaatgccctacttcgctatatgccatgcctttgatattgatgatccatgcaatctttgtaatccatgatatcgtgtgtccttattcaatacttgataaatgcttagccatgctactttagaatcatgcatattcatatttatcaaaatgctttatgcttgggcaactaccttagggaaggtagttgagatacggcatgtggagacatgagcaccacattgccatgacattggtgacatgatttgtgaaaggaaaaatgaaactaaacaactgttttcgactggggcggctggaggacttgggtggtgtccggaaaaggctagtgccgtccctggtcagttaaggaccgagccatgaagttaagcatgaaacgacccccgtacaactgtacttctcgtgtgggtatagacctaacggagtaaatagccgagcggaggcggtacccaagccatagtggttttcttgttgtgtgtgaggcagggcctacggtggggcagccattggtaggaccgcgaggggcgggtgcctacagtggtgtcgccatcggtaggactgccatgtgcaaacctaaacttaactataacttaatgaatgtgtgagtctttccccctcgggagcgccagaactcctctcactgctagaaaccttggacgcctagagtgcatgaggactaaagttcatggagcgggtactaccaaagtgaggttattgaaaggctttgccgtggcaagtctcattcgttgggacgtaggctcatgtgttgggcaagtcgcggagtacgggtaaagtgtacatccactgcagtgtgagtaaaccaatctattcgaatagccgtgctcacggttattgagcaccgggacatgtattacacttggctagactctaaattcttaaaatgatgggtgggatattgcatgatgattttgtactggtggatcaacttctcaagatgcgagaaggggtagacccccacaaaaccatgacgaccagtggcaggaagctatcattgggaacacaatggatggtggacagaaccgtcgctgtttaatgaacaatggaattaaagcttgatcagtttatgctaggtcttaggtttgtgaaatgatatttgaaaactcatctttacgcaaagtaatcatagccactctttgtaatacccttacattactgcattttgtgtggtggcttgctgagtacttttgtacttattgttgctctatatatatcttttagcggagtgttgaagagaagcccttgttagtacacttgcgtacctaacaagatgatcggagtgcggttccattctaggtctcgttccccagtcgactgcttgtggcatgtcaaccgggcccttgtattattttgccttccgctgttgttctctgatagttgttggcctacctggccctaatgtaagcatttaactctcttagcctgaattcattcgtgatatgttgtgattcagctatgtatgtgtgtaccaactgctgattctgggattggtactgataaacacagaagatttccgatttccaaaatcgggggtcgacattgacagggccaagtaagctggcaggtggacagctcacatgtcctgggagagcccaacgtcatagaaagatttgagagcggcagggcgacacgagtagtgcgaggtgagaggtgactccatcggagaagtggggctggcgagctcgagcaccggtgtggcgacggaccggcgcgtggaacaaagatcatgatatcttcttctagcatgcaccaacattagctccaaactaagagagatattcgaagatatgcccaagatattccaacaattctgagcaaaaggacacatgaaataaagatggagcaaagttttagttgagatagacaaacatagcacatagtttaagtcacaattcggatgtgcatagtgcttatgatcaacatgtattttgtgttcaatctatccctcataagcagccaaccaaaaactttaattttcgaggtagctctactcttccataaccaaatgaaatattgcggtggctgcagggcactaaagtttaaagcataaaacttctaagatgaatatttcaaattccccagatataagcccatgtatcatattcctatgagatgtttacctcttctaacatctgagataaagactgatactcttcaaaagcttgctgagaaagaggcaagtgaaaattatcttccaattccaaattgaggaaattatgaaccgagatcattgtattgacagcaaataagtattgcctcggtatagagacagagagtggagggtcatcactccaaacatcattccaaaagaacaagaaacaccatctccaactaaacatctggtaactcctctaaaaaatccattagattgtagatatctctccaccaaaaagaacccttaaaaatggacataggaggaacaccatttctataatatgaattccaaataagcttaatccatggcaattctcttctattgtagaatttttccaaatactttaaaagcaaagcttgattctgaattgaaggatttaaaactcccaaacctcccttaagttttggcttacaaactttatcccaagcttcaagatacttcctatttgaattcacctcaaaacccctccaaagacattgttttcttgcactattaatattatcaataactaatttaggcaatttcaaagtgcacatatagtatgtaggtaaagaggagaaaactgaattaaccatatttttcagtttctagggacaattttcattcaaattcttccccttctgattgctcgttatcgcttttgcaaatgttgagagtggaagtctacggcttaggtggctgaatcaagcttagggggagagaagaggaagaaactccctcgaccagatcctaaggaatgaatagattcttttgtttaaagttccggctacctctgcttgtttttagtgtttggaaccggaacagcgttgtgaacctattatgtttctgtcatgggcagagcactctgtgtttatctggtttacttgtcttaatccagtttatggttactttctctctgccttttgctatgaataatcagtttagatcctggaatgtgatgtgctggaatgtaaagggaatgaatgttgatgccaagattttgatgagaaggcaaaaggttgaggagagtggttgtcaggttttatgtttgcagaaaactaagaaacataattttactcttgttgatatcaaaaccttttccctagcgttttgattcttttgtgtttgcgccctctagaggtgcttcggtggcattctagtggtttaggctattgacggttgttagttatcagttttgaccatcaatattcccaaaatagaggagaactagttatgcttgcaatacatatccatgttagaataataatattccactagtatttggttcactaaacttttgtagagaataatcataaagtggaagagaatcgacattgaatcagatgataaatcaatcggacgatgtcgagaatcagacttatatatgaatgggccaagaactctgaattgacacggtgaattgggccaaaattcacaagactgaagtgagcaacaaaagaggaggccaccaaccgaaattgggctggattgggccgtaccctggttcggccgagccagggggttcggccgaacctgacgtgcagccgttggatgcagggttggcggtggacggtggattgcctccctatggcagttggagggtattaccgaccattccaaccgctataactgtcattacctgcctataaaaggagttcactctcttcacttcaagacacacctcaagcaaagctctcttatattctctcaagtttagtttagtgttcttaggctagtggagtaggaatagagtagaaatcggagtccgggtatagctctaatagctttcctttcctctttggtaagctttgtactttatttagaatactcttctttatacatttatggtatttgaatacttcccgagtatatgaataccaattttacatt

SEQ ID NO: 15168 - DNA, 2068 bp, Oryza sativa
  ref <308>: DATABASE ACCESSION NUMBER: AK065699
  ref <309>: DATABASE ENTRY DATE: 2001-12-06
gcttcctcatggcctctccctccctcctaacccgtttccttccagataaggctatataaatacccatcatctccttcctctcttcctcgctctccccacccctctcggcctctcctcggtggtcgacggcttcaccggaccggaccggaccaccgctcgccgccgggcacccccgcgccgcggtctgtatgtcaaagggtacagaaacaatcaatattctgatatagttgctgggaatttcaatccctaaattcaaaatgaccccggtggttcattgctctgttggcaatatcagcctgttccacatcggcagtttcaggccaagccatgaaatccaaataaggaggttccgcagcacagagaggtattcaagagtaccttcacgtaggctgctgcaaccgcaacgagcattcaacttgatcagtatttacaagagaagcagctggtcctctgcccgcaggccaagaactctgtcagcagcaactgttgggactgatgttactgtagaggatccgaatccaccaccttccggagaaacttctgaagaaagctctgaggatacagcacctgacactgctgaagcaagtgagcaagctgaggcaagcacttcttccattcccaaagcaggacgaaacataagaaagagtgagatgccaccactgaatgatgaggatctagttcctggtgcatcttttactgggaaggttaggtctatcaaaccatttggtgtacttgttgatattggagcattcactgaaggccttgttcatatctctcgagtaagtgatggatttgtaaaagatatatcttccctcttcactgtcgggcaagaggtgtcagtgagattagtggaagcaaataaagagacagggcgcatctcattgacaatgcgaacaggtggtgattatgtcaagcctaaaacagaaacacctaaggctgcaagtggcgggaggaataccactgcaaccacgtccagaggctcgccaaggcaaacgagggaaagagatgaagccaagagcatgggcgaaacaaactatgtgcaaggacaatttctggatggcgttgtgaaaaattcaacaagagcagggtcatttgtgaccctacctgatggaagcgaaggattccttcccagagaagaggaggcagtggcattgttcacccttatcggacattctgcactggaagttggtcaacaggtaagggtgaaagtattgaacgtagtacgaggccaggtcacgttgacaatgaaggagggagaagatgatgaagaggatctggcttcattaaacacacagctgaagcagggttggtccagagggaccaatgcatttgagctagctttccgtaggaataaggaaatctctgcatttttggatcagagggaaaagataatagttccagatgtacaagaagctgctgttgcatcagtaggtactgaacttgatgcagaagtaggaattgagcaaagtccaggcaaggaacctgagacaggcaatgctgaatcagttgcaatcgatagttctataacggaggtcaaggagactgatagtatagctgcagtggagaaggatagcgaaattagcaagactgaatcagttgagactgctagttcagttgtaatttctgaagatgatagcacagttgatggcaaactcgttgaaccaactgcttcagtttctgcaactgaaactgagattaaagaagatagctctgagggatctgtcaccactgagcctacagaagctgcttcaacagaatttgtcaccgcagtcgttgaggaaagcgctccgactgctagttcagttgaaacttctgaagatgatagcacagttgatgacaaactcgttgagcctactgcttcagtttctgcaactgaagctgagagcaaagaagatagctctgagggatctgttgcttcaacagaatctgtcaccgcagtcgttgaggaaagcgctcctgtgtcatcagtagcaattgaagttcctgctcctgaagcatcagaggcctccgctcaggagataattgaggattctactactgtggaaggtgccgccgatgatcaaactgt

SEQ ID NO: 15169 - DNA, 1564 bp, Oryza sativa
  ref <308>: DATABASE ACCESSION NUMBER: AK065700
  ref <309>: DATABASE ENTRY DATE: 2001-12-06
gaaacatttctacattaccacatagccttctttgtttctccctccctccctctccaacacaccaatcccatccccagtgttcagtgaccatggcaaccagttattgctccatctccaatcctccattatccaaaacttcctttcccaataaacaggtcccaggttgggtacttcgagcaatcagcaaaggcaagggcaactacactggtggtatttatactacaacaaagaggaatttaagaactgggttccatgtttgtgccgtcaatggaggtcagggcactcgcaatgtgtctggggcagagttcccaagcgattacactgaacttctagcgcagtgatttcaggcaaaagaagctgctgagtcagcttttaaggatgggaagcagctattggtaaagccttaatctgtccgctgtctgacttatttttttattcctttttttgcacaagaaattgtgatgcaatgtatttcaggaaattgagttccctacagcaggactacaatctgtaccaggttctacatagctaacctttatgtatattaccttgttataagatattggtcaggactcaggtggaaaggataccatataagattctattttacttttaggtgacagtgaaggtggaattgagatgactggaagcatgcttcttataagagaattctgtgatcgctttgtccctgctgagaaagctacaagaaccagaatcttcttccctgaggcaaatgaagtttcatttgcaagacaatctgcctttgaaggatgttccctgaagctagattatctaacaaaaccatccctatttgaagattttggttttacaacaaaggtcaaaatgtcagaccgtgtgcgtccagaagacgagatattcctcgtggcttatccctatttcaatgtcaatgaaatgcttgtggttgaagagctttacaaggaagcaattgttagcacagaccgaaaactgataatattcaacggggaactagatcgaataagaagtgggttgctagtgactttcctcaacaaaagagaagctgcgctgatgatgtttgaaaatagtatgcttgtgaaattctagttagctatcatttgtgttggttcatttccttgaccaatcaaagactaccctcctttcttctacccaaagctagcggaactttccaaaacatttcttccaaagctggagacagtttattatattcacaattttaagggactcaaaggaggaacacttttcaggtgttatcctgggccttggaaggttctgagaaacataggtggcagtttcttctgcttgcatgaacaagaagagatgccatcactgaaggaagtggccctcgacatccttccttctgcctagaacttttcatgagtcattccaagcataagccaagaaaatggagaagggaaaaagcctaaaagactacaggttatttctccctatatgttgatggactttcgttgtacataaggagagctaggaacggatgtattgctctgatgtgtacatgcatctgtgcatcaaagtgaatgcatggtttggtgccttgatggcgacc

SEQ ID NO: 15170 - DNA, 1310 bp, Oryza sativa
  ref <308>: DATABASE ACCESSION NUMBER: AK065701
  ref <309>: DATABASE ENTRY DATE: 2001-12-06
gaataaatctctttacctagttcggcttgggcctcgcaccgactccgactccgaccccgactccgactcgccgccgcccttgcgccgcctccgcggagccctcccctccccgccggcggcgtctgcgaagcgactggattggatggcatcgagggttccgtctccaccgtgcgcggcggcgcggtccggttgggctgtcccgatggtctccgtccggccggcgagatccggcgtggcgagaggacgtgctgtggtgtgcgccgttatcttcaggccgtgtatcgatattcataaggggaaagttaaacagattgttggctctactcttcgggattcatcaaacgatggcacggcacttgttacaaattttgaatcagacaaacctccagcagaatttgcaaatatataaagaggatgaacttattggtggacatgtaatcatgcttggtgcagatcctgctagtcaagctgctgccatggaagcactacatgcatatcctgtatgtgtttagtgaaggcaaaatgaacattgaacggctgaagcaacttgtcgatctggttgggaaacataggcttgttttggaccttagttgtagaaaaaaggatggaagatatgccatcgtgactgacagatggcagaaattcagtgatgtctttgtggatgagccaacattaaaacatcttgctgcctatgcagatgaatttttggttcatggtgttgatgtggaggggaaaaggttaggaattgatgaagaacttgtcgaactattgggacgttattcacctatacctgtaacttatgctgggggtgtgtctacaatggatgacctagagaggataaaaagagcaggcaacagtcgagttgatgttacggttgggagtgcccttgatatattcggaggagatttgccctacaaggacgtcgttctttggcacaaggaacaaaatatggttagccaaccatgatatatcagaggtataatgcttaacctgttccatcagctcgattgttatgcacagacctccagggtctagaagtaatgctaatgcattttctcaagtgttgtactgcgaataattcgatgggtcttctgtggtataagttcaagctgaagggttcgattttgttcggatctggaactaggctttacattgaggactggccgagctgtttatcaagcgactgcactatatgtttttgagattaaaacactgttaacatgatatgtaagcacatctactgagttagcccgtctgatggtgaaacataatgggggcctccactagtccacagctcattaatcatactc

SEQ ID NO: 15171 - DNA, 974 bp, Oryza sativa
  ref <308>: DATABASE ACCESSION NUMBER: AK065702
  ref <309>: DATABASE ENTRY DATE: 2001-12-06
ggcactgctctctccgttgtttatccattcgctacaatttgcatctgcaaattaaagttgataactaatcatacaagctagtagcttcagcttgatttcatcttcagttctttctggataacaaatcagaccaactttgtcgatcgatccaaattcagagaaattatctctgagtagtgaattaaaagatggggtctctgatggctggatgggattcacccgttcttggcgatgagaacagagttcttgcgaggaggaacaagtcgctgacgagggaggaggtggaggcgttctggaagcagcacggcggcgagatgatgtcgggctcgccgctcggctcccccgccgccggcggcatggcgcggtcggccccggtgagccgctcgaaggcgcacgcctcgtcgcctcgcggcggccgtatcgacccggcgactcgcgtggagggcttcttcccccacgacgacgccgccaccgccgagagccccagcaagagccacgactggtggacgaggagcaactgggcgttcctgaacgagccgccgcaggaggagatcgccggcaaggcgcagaactacgcgccgcagttccacgtcgcccggatcgccaccggcaacgcatgaacaacgccacaacccctcgaccatcgcatatagcataaattagtagtagtattgatcaatcgatcaaccagtgcgagtgacgtggggcttggcttggtgtgtgttcatagtacgtattacgtttgataattaccccacgctacagcagagtaggactagagagagatatgatggtactagtaaattaaatttgcgttctttgggtcattttgcatcagtgtatgtacatacgtgcatccgtatatgtacatataccgctatgtcgtcctatgtatgcaaaagctgttaagacagcgtgtaaaaaagaagctaccatgtaatggtatttgcatattgcaggatctttcttgggcc

SEQ ID NO: 15172 - DNA, 1267 bp, Oryza sativa
  ref <308>: DATABASE ACCESSION NUMBER: AK065703
  ref <309>: DATABASE ENTRY DATE: 2001-12-06
gtgcaggataagcgctggccatatgtgtcaatccctttggcaagaggtgacagacctgaagattgggttccgacggaagatgcttcagttgattatgacgataactatgatgggattggggacatactccctggccagaatgaggatattgtggatatattctcagcgcgttcttacagtaatgaagggtatcaccatgtttcagaaaaggatgtggaagaatctccaacaggtcttacattaaagaacaaatgggaggatactcactggttttctatttggtggcaacaatttgttgatgctgcaacgttggagagttcagtgtcaagaaagatggattctacctgcttgagtgtcatcggaatctcatggaatttaatcattgcaccttggaaaatgctatttgctttcattcccccttatgaaattgctcatggctggatcgcttttatttgctcactaatcttcataagtggtattgcttatggggttactaagattacagatcagataagctgtgtcacagggtaagtccatatgttatagcattcacagcactggctgctggaacatcatggcctgatctagttgcaagcaagatagcggctgagcgtcaaatcaccgccgactccgcaattgccaacatcacttgcaggtacatttctgcacatctcctctccaattagttgttcatgcctaccttcaaccttttgtaaatttatcttatcgaggcgggataaacggtatatcttatttccgcagcaattcggtgaacatatatgtcggcattggtgttccatggttggtggacacaatgtacaactatctattatataattaaagaaatagaaaaaggagcctccacgttcgctctcatggtctagaaattctcacattaatcggagaaaaagaaaaaacagagtccatatagaaatacaatttagaaatagctaaaattcagaattaaaaaaaataaggaatattaaaagaggagactagagtccatatagaaatacactttagaaatagttgaaattcggaattaaaaaataaggaatattagaagtagagtatagagtccatatagaaatacaattaggaaataatagaaattctgaattaaaaataaggaatattagaagtagattatagagtccatatagaaatataattaagaaaaaaaatagaaattcgaaattaaaaaataagaaatattagaagtagagtatagagtccatataggaatttaaaactaactaaaatttgg

SEQ ID NO: 15173 - DNA, 1858 bp, Oryza sativa
  ref <308>: DATABASE ACCESSION NUMBER: AK065704
  ref <309>: DATABASE ENTRY DATE: 2001-12-06
gtcagaaatgactaatcatttgcaggcaggagtaatttagagagagagagagagggagcgagagaggacagtttggataggagaagagaggagagagggtgcttgctgtggaaggagaggactgacaggcttggagcaagcattccatctcagttctcatattaggtgtgaatgaccaagaaatcaacaatctcaaggagccatgagcacacagagtgtcattgctgtaaagcaattcagtggccctgacaaaatcgcacaagcatacactgttccacagccatcagctcatgtgctctccaacgctaactatgactatgatctctgtggttcaacaaatagtacctcattatcatgtgctatccaatcctcaaacattaagaccgaatcaatcagttcatctagcctgccaaagatccttccatttagtactgactcaaatggtgaaagttcactttctcgcatgtcgcaagccgagttttcggacccaattttgtctagttcttctacattttgtacaagtctgtacacctcatcaccgatgaactctggttcatgccgaaaaaccggttatttgcctttcctgccacaacctcctaaatgtgagcagcagcagaattcagctgggcaatcatccagctctctgatgctccttgatgctgatctcagaaatagtggtcatgctgatgatgaacacacagatgacctcaaggactttcttaacctctcttcagattgtagcttccatgggaaatgcagtgccatggcttataatgagcagatggagtttcagttcttgtctgaacagctcggaattgcgatctcaaacaatgaggagagtcctcggttagatgacatatacgacagaccaccgcaacttatgtctcttccagtgtcatcttgctctgatcaggaggatctgcaggatgcaagatctcctgctaaagttcagttgagttcatctcggtcttcatctggaactgcatcatgtaacaaaccaagactgaggtggacaccggagctccacgagcgtttcgtagatgccgtgaacaagcttgaagggccagaaaaggcaactcccaagggtgttctgaagcttatgaaggtagagggcttgaccatctatcatataaagagccacttacagaagtatcggcttgcgaagtatcttccagagacaaaagaagacaagaagcaagaagaaaagaaaacaaaatcagtggctaatggaaatgatcatgcaaaaaagaagagtgctcaaatggcagaagctcttcggatgcaaatggaggtccagaaacaactccatgaacaactagaggtacaaaggcaattacagctgcgcatagaggaacacgcaagatatttgcagaagatattggaagaacaacagaaagcaagagaatccatatcctcaatgactagtacaacagaaggagaatctcctgaattcgcaccgatggagaaaaccgaggacaaagcagaaacctcttcagcacctttgtcaaagtgtagaattacagatactgatgcagaatgccattcaaaagttgataataaaaagacaaagcctcaggctgatcttgaaatggtgcatgacgaataatcatggtcgcaaccttttacaatatagtgcttggacttgtatgtttgttttattctgatgtgcctccatgagttagtgcagaaattggtctttgcgattttatggtatacttttttgaagactttttttttgtatatattactaactcagatgaaaatggagccagtaaagagatggtgccattggttccctgtatactttatttcactctgtaaatctgattaccataatatgaatacttatcccaaattt

SEQ ID NO: 15174 - DNA, 2682 bp, Oryza sativa
  ref <308>: DATABASE ACCESSION NUMBER: AK065705
  ref <309>: DATABASE ENTRY DATE: 2001-12-06
ggggaggcgacggcgctccgccgccgcagcgtcggaacgaatccccggcggcggcggcggcggccaacaaggggaagaagaagaagaagaagggcggcgctgccggcggcagaggcggtgggaggtggccaccgattttagccgaagaaagatctccatatcaatcgtctcaagggcactaacctcctcacaataacggaggaagaacaatgaagctgcaacggggagtggtccacctaaagaaagtagcagacaatggggagtgatcgttctaaagaaagtggcagccaaccatcaagtacatcaggaaagatggccagtagtatctttgacaaattgcaagtggagttcatcgaccaagatgagggtgtgcaggttgttgcagacaccattggaagctctggcgaggttcctgaaaggtatgtgaggcatgagattgaggccaatattgtcataattgacaacgccaatggttatagtctaccagtaatagacatgtcaagattgatcaatcctgacttctcggacttccttctggcatgattgttggtgatgggtctcggacttccttctggcatgattgttggattgcttcagaatgcttagctactaaatttcaggcactttacactcatacaatggacaatcaaatttcagtcaaatatgcacttcaacagggtttaacagcaagtttggtgccgcgactctctgaaacagctaggcaagagtgccaatgtctgcaggacctgctacaagacttttccttaaacaatgagcgggacattcgcacggggggaatcatgggaaaattcacaactaagaacatttatgacactaggttacccccaggaatttcttctcctaattggaacctaatctggaagtgccgagcacctttgaaagttaaattgtttgcttggcttcttgtcagagaccgtctgtcaacaaaacaaaacttgctgaagaaaaagatagttcaaaatggggtttgcgatgtctgtcaacaaggggatgaaacggcagatcatatgtgttttacatgtccttttgtgcagagtttctgggaacggattagggtgaatccgacaattcaggatgtgtggctactacaccagcttaaaccttctcccaatgtcccggagctccatcatcatgtcttcttcttgctctgtatgtgggcgatctggaatcatcggcatgatgtcgtcttcagggggcaaactccatcgattcgatgctgcctacaaagatgcatcaatgaagcagccctctgggcagaaaatttaaaaatagaggatagacatgtaatttctgcttggaaaaacattttcacctcccccttaagatctctaaacctgatgtaatgaaccttttcactcctttcttgtaatgacaaaattcaggtggggaagctctcccccccggtgatttagtcaaaaaaaaaaaatcctgacttctctgaggaggagatcgcgaagcttggatctgcatgtgaggattggggatacttccatcttgtgaaccatggggtggatgcagggttgctgcaacagatcaaggctgacatcacggaattcttcagactccctctgcaggagaaggccgtggcgatcccacccaatggcttgcaggggtttggccaccactttttctttccaaaggagcagaagctggactgggcagatttgctgttcctcgtcacacggccagttgaggaaaggagcaatggatttctggcctacaaagccttccacattcagaaatatgctcattccccatggatgctggtgtgagagaaccccatgaaatccagttgattccctttctgaaatttggtcattacagggactcacttgacaagtactcgttagagattgcatgtgtctactaagctgttcaagttcatggccatcaacctgggagtcgatgaggaagcactccttggagtattcaaggggcatactcagagtgtaaggatcaaccattacccccactgccgtcaggctgacaaggtgctgggcttttcagcgcacaccgatggcgtcggcttgacactgctcctccaagtgaacgacgtgcaagggctgcagatcaggaagaacggcaggtggttcgctgtgaagaatctccctggagccctcgtcgtcaatgttggtgacattcttgagatcctcacaaatggcaagtacaagagtattgagcacagagcggtaataaaccccgataaggaaatgatcacccttgctgcattccataaacccccgctttcctgcacagttggagttggcccactccaggagcttctaatgaaaggtaaggcgcactacaagacggttgatgtcgttgagttcaccaaaggctactttactgcgaagctggaaggcaggagctacctggagagattgaagctgggagtgtgatgatgtcaggatgggatttttctgcctctcttgatccttttgttttcgtgaaaggctaatgacactgtatcttcctcatcctggtacagttcagctggtatttgccttgaccatacactcaagtgtacctttcactatttatatatgatatttgctattatttgtgtactctatatgcatacgagttgagagtaacagccactaacggagccccacatgacactggcagtctttatcggtagcaataaaaataatttccact

SEQ ID NO: 15175 - DNA, 1601 bp, Oryza sativa
  ref <308>: DATABASE ACCESSION NUMBER: AK065706
  ref <309>: DATABASE ENTRY DATE: 2001-12-06
ggggacccaaccaaccgccctcccttctccccctccccaccaagtagggtttcaccgccgcctcctctgccgccatggcgcgcgccgccgcctccaggctcgccgccgcggcaacctccacctcgacgctcgagatgttctcccgccacctcgcggccgcctcgtcggcgtggggcatcgcttcgtcgcgggctccctatccagggagggagaggaggagcgcgagctggtggtgccctaccaggtcgttccatgccacaaggggaatgaatgcaagggattactatgatgttcttggagtgaacaaagatgcatctgcatcagacataaagaaggcatattatctgctcgcaaagaaattccatcctgatactaataaagaagatgctgatgcagaaaagaaatttcaagaagttcagcatgcctacgaggttttgaaggatgatgataagcgtgaaacatacgaccagcttggagcagaagcttatgagcgccaagcgtcaggtggtggccccgatgatttttctgggagtcatccatttggtgacatttttggtgatatgtttgataatccttttgccatgagaggaggtcgagatgtcaaggttccaatcaaactatcattcatggaagccgtccaaggctgcagaaaaactattgcatatgaggctgatgttttctgcgatacttgcaatggaagtggtgttcctcctggcactgtacctcaaacatgtaaagcctgtcgaggtgctggtgtgatattcatgcagcggggtataatgagtatagaaactacttgttctaggtgtggtggaagtgggaaaattgtgaagaatttttgcaagacatgcaagggtgaacagctagtgaagggaaaaaaatcagtcaagctcgacataatggctggcatcgatgacaatgacactatgaaggtttttggcaagggtggtgcagatgttgagcgcaataaacctggtgatctctatgttactatcaagatcagagaggatcctgtcttccgtagagaaggcaaccatgtgcatgttgacgctattataagcattgcccaggctgtactaggtggaactgtcacagtaccaacccttacgggcaacgtttcagtcaaggttcgccaaggtacccaaccaggagaaaaggttgtcctcaggggcaaaggaataaaagcacggaattccccagcctatgggaatcagtatattcacttcaacgtccgagttccaacggatgtgacacaacgacaacgcgagttaatggaggaatttgataaagaggagtgcaacgaaggggagagagttgcagctgcctccggatgaaattttgccgcacccattcgttggttattatacgtaataagccgatagccgaagccccaattataatgggctcggtatgacgtacatgatgtagtctttagagtgcagattttgcattgtataatatgcacgctaaggctaaataactgtactaaccttttgaccttttatttattgttatggcaaatgtaacagctaatataactaggaacatataataggaaggctatgtgatgtgtaatgccttagctgccgcataaactcacg

SEQ ID NO: 15176 - DNA, 3649 bp, Oryza sativa
  ref <308>: DATABASE ACCESSION NUMBER: AK065707
  ref <309>: DATABASE ENTRY DATE: 2001-12-06
gacatttccccctccttccctcctgccctgcctcctcggccggcgcggcgccccatgtacgtggctcgaccgacggcgatcgccggccctacccctaccgcccgcggcgcacgtcgccttccggctccgggattgttaattaccgtttcgaatccagcagtttgacagcaaagagaaacagagggatcatcgaggaaaaaaaaaagggctgggctacaagcacatccagatccaggctggagtaggaggcagctgagcgagtgttgttccagtggtgcctgccaacggaggtggctggctcatgaacattcacccgtacaaccagacaaccgtacagcaagtgcagaaaagagggacaccaaatttcaatttcagaaagaaggcactcgatatacttcccgttccggtcgaagaagctgaatggagccttttctgtttcatcaccagctaatgcactgttgataagaatgcagagacttacaaatgcatctttattcttcacaagacaggaggcgttggtgctatcaaacacctcaccaagaagcatcttattgatcacctcatctctatgccacccggtcaatttcgtcatggcagcattccactcagagcaccatccaaattcgtcagcaccaaatatgggaggaataagcgggcttggattgtgaataattgctttgtagtctccctcaacccgagtaaatttgtccatgaccaacttatgaacagtcatatcttgtgcaacaaagcacacaccaacaacatggtcgtgaaggtcccggctggcacaggcattcacaaccaagataacagggccatcatctctcttggagccatgagttttcacctcaaatttcacttccttctcttctttgcctgatcaatcaaagaaatgtttagaaatcaatcaacccacaacgcagctgaatgtcaagtattaatgtatgagcatgacaatcaaatgtagcatatctaggcattgaacattagaaagcaaccccaaagtttttttgataaatcgaattgccaaataagcagaaacttgaaaaatactgggggaatagacaaaaaccactatagctaatttacccaccttgcaaagctaaatacagcatcctctggacaactggtacagaagattcctctacaacggtaagtatgtgtcttccaatagcctcatctactctcaaccctgtcaactcagcaaccttctgattccatccattgaccaatccattgctatctacagccaagattgggacagttgctgtttccatgagacgaaccatttcacttgtaactgcctgcaattcagcaagcccatcaagcttgagatcaccaacctgattatctaaactagcggcccttgttggcttgatgtcatcattcagtgtccctctaagtataagttgtaatgagtgaatagcatccatctcatagtcattccaaggcaagctcttcatcttgacaacctcaaggaatgccttgaaggacagcctagggtgcattcttctgctgtcatccttgtctgatggatcatgttttgcacctccccatctgatttcagcagctgtatgtgacctgaaccagaacaggatatccttggaatttattttagctactgccattccacaaatcatatcaccaagagcagcagctcctggatatccagcatcatgtaggctatcagtactcaggccagtggaatccctgtggacatctgacagccagaaggcaatatcacgtatctgagactcagttggagcattctgtagccgccacacttttcccccatacaaaagagcagcaccatcacatttcacaaggtccatgatgttgggagtccctgatactatactcagaggagaggattccctgagaagcatgtcagagagcattgtttgcatcctcaatatgcttttctcgcgtacttgcctctctaattcaaactccttgttaacatggacagcaaacacttgtgctaagaactcacaggcataccgcaatgggaaaggaacatatctggggctctcatggtggcaaacaaggagtccccatagtttcttcctcttctgctgttgtgcaggttgatcagccccaacttcatcatcatcctcattctcattaaccacaacagccatgacaagggatgcaatcgagttcatgttctccatatactgaagatgacaactgtgtggtgccctcagtgttgaaccacataagctaatatccaagtggagcgactcatcttcgataatcttgatagatcttgcacggcaatcacaaatcatccggactttgttcttcatgaaaagaaacctggctgcctgagggatatcagtagctggataatgcaggccaagataaggttcaagaccaggctttgtgatctcagcaaagacttcaccatggtcatcttcatggaacttataagccataactctatcatatcctgtgaggtcaaagagttccttgaccaccgtattgcatagcacctccatgcttccacctggcagtgactggatcttagagattgccttggcagcaagtttgtaagattgcaaagccccagcggcagttgctggaaattctgtaggtttcacaggctcaaagtctaccaccaaacaaccagttgcccgatgaacaatggcatagaaaggcttgcctgaggtcttgcattgaactaggatagggttcagcaaggaaacatcagcaaatcccagtgccttctgcagtgctgtggcacctgggtcagtgaaaagagaccatacattggtgccaatgcgtagctttgggggatcatcaacacttggcactgcatggctgacagttgtaagcatctctggtgcattctcgctgagcgctataacattgaaggtcttctcatcaagggccaacaagcaaccaaatggttggattagctttgctctctgaatgtgatgcaagtaagctatgaccttctcagaacgagcttgctgctcaggtccagtagttctctgtgcttcaaccaatttggagtaatcaaaggagtcgccatattcttcatattcagcattgagttcagcatcaagagttgtttgtgctaatatccttgcccgggagctttggcgggtcctgctggatgaactggaacattgagtaggtcttgaagaagacatcttctgccttgattacctgaatcactcaagagtcttatctgctgtataccactcctgctgaacaagataatataagttgaaaacatcaatcagtaaaacaaaaaagtatagcaatccactaatatcaatagatgcctcaatctagtggataaatgtggactatcaactttgatcaatgcctaaaaccacatgattagacttccttgttgcctgagcagttcagaaaagagaaatgtttttgtctttcaagagcttgagaaatataaaaagttagccctgctagaactcgatggatgaagtaagaacggttgacgaagtaaaataatacaatgttaaagatgctattgaagaacggtcaacaaatcttagagcattagaggactaaagtttctccaaatacaactgcaggcacttgtgttagcaaataagcatgacatctcctgtaaagccaaaacctttctgaggaatttccttcactaatctgtgataag

SEQ ID NO: 15177 - DNA, 2497 bp, Oryza sativa
  ref <308>: DATABASE ACCESSION NUMBER: AK065708
  ref <309>: DATABASE ENTRY DATE: 2001-12-06
ggccgcccgccaccgcgctctccctctccccccaattccatccctccacgccacgatcgccttccgcaaggtttcttcttcagtgcacatgtgaaactgtacttcacctcccatatataattcagtgcagagagcattcttgaataagtatgaacccttattttgttggtcttctcgtcccaattgcggtatctcttctcctacggaagaggagaatggttgggaagatgagggcactgccagttgatgtgggtggagagcccgggtatgcaatccgcaactatcgattcaagcaaccggttgaaactcactgggaaggtgtcaccacgctcgccgagttgtttgagcagtcctgcaaggattatgtcaacatgccgctcctcggcaccaggaagctcatctccagggaacaggaatcatcactagatgggaggtcctttgagaagcttcatcttggagagtatgactggaagtgctacgctgaggtattcaagagtgtttgcaacttcgcatctggactaattcggctaggccatcagaagactgatcgtgttgctattttcgccgagacgcgggctgagtggcaaattgctctgcaggcatgcttcaggcaaaatattacagttgtcacaatctacgcctccttgggagaggaagcactgtgccactcactaaatgagacagaggttactactgttgtatgtggtcagaaagaactgaaaaaaatgattgatataagtgggcagcttgacacagtaaagcgagttatctatatcaatgaggaaggaatctcagctgaagtttctttagctcaaaaaagcactagctggataattgagccgtttgaggatgtaggtagattgggagatacagcacctgttgatgcaaacatgcctctcccatctgacgtagcagtgataatgtatacaagcggtagcaccggattgcctaagggagtaatgatgacccatcggaacgtcctggctacactttcagcagttatgaccattgtgcctgaaattggtaaaaaggatgtatacctggcctacctgccacttgcacacattcttgagttggcagctgaggcactcatagctgctgttggggcttccataggatatggatcacccttgaccctgactgatacatcaaacaaaataaaaaagggaacactgggtgatgcttctgcactcaagccaacactgatgaccgctgtacctgctatacttgatcgtgttcgtgatggtgtgagaaagaaggtggatacaaagggtggtgtagcaaagcagttatttgatgttgcctataatcgtcgacttgccgcagtcaatggaagttggctgggtgcatggggattagagaaactcttgtgggatatgcttgtcttcaaaaaggtgcgagcagttttgggaggaaaaattcgctttgtactttcaggtggagcacctctatcaggagatacccagagatttatcaatatatgccttggggttccaatagggcaagggtatggtcttactgagacatgtgctggaggaacattttctgagtatgatgacccatctgttggtcgcgttggtgctccactaccttgttcgtacattaagctgattgactggtcagaaggtggatacttaacaagtgactccccaatgcctcgaggagagattgtcattggtggtcccaatgtaactaaaggctatttcaagaatgaagctaaaacaaatgaagtctataaggatgacgaaaaaggtatgcgatggttctattctggtgacatcgggcgcttccacccagatggctgccttgaaatcattgaccgtaaaaaggatattgtgaagcttcaacatggtgaatatgtgtctctcgggaaggtggaggctgctctgattgtgagcccatatgtggagaacatcatgatccatgctgatcctttccacagttactgtgttgcacttgtggtagctgcacacaatgagctggaaaactgggcttcgcagcagggagttacatacaccgatttcgtagatttgtgccagaagccagaggctgttaaagaagtgcttggatctctatcaaaggctgcgaagcaagcgcgactggagaagtttgagatcccggccaagatcaagctgatatctgagccatggaccccggagtctggccttgtcactgctgccctcaagctcaagagggaagtgctcaggaagacatatgaggatgatcttgctaaactatacgcctgatgatcaatgctgaattgctgattaagcctactcgacgttttgacacaaccagctaccgtaggacagagctcttgtgagcaaactgaagatgctgataccggcaggaggtagcctgaaattttggagctgtggttgtttgatcttttggagctagcacaattatgtgtagcctcatttcacacttacttctgtgtctctgccatattctcttgtgaatttacattgttcaaaggaaaaaaaaaaggcattct

SEQ ID NO: 15178 - DNA, 1374 bp, Oryza sativa
  ref <308>: DATABASE ACCESSION NUMBER: AK065709
  ref <309>: DATABASE ENTRY DATE: 2001-12-06
ggaagggccccccttcctcctctcctctcaccacacaccacccgaaaaacaccggaggaatattccccacctcgcctctctccagccaccgacatggccgccgccgccgccgccgccgcttccgcctcctcctcgtcgtcgtcctcctcctcggccgaatccgtccccctccccaccacgactctccccatcgacaaggcggcggctgtaggcggcggtggcgaccgggcggtggattgcggggtgtgcgcgatttgcctggataagatcgccctgcaggagacggccctcgtcaagggatgcgaccacgcctactgtgtgacgtgcattctgaggtgggcgtcctacaaacagacgcctcaatgcccacagtgcaaacatccgtttgatttcctcagcgtgcaccgctctctcgatggctgtattcatgactacatgttcgaggaaagcgtttgccttctcctgagggccacttggtttgaacctctgatcgtagaggctcacgaagaggctctggatgaagaagagttataccacatctatcaatatgatgatggcgttgaagatgaccttgacgaggaagcttattacatgagcaggtctccgagcattcgaattggcaacaggaggtggggtgacaatggatatgtcagaggaggcaggaaagaggcaaggccagtgagtcgccagtccttgaatgacactgatgctggtccatccaggactcccaagaagaaagatgtatcagcatcgggatcaggttctgtgtctaaggaagttgcaggaagacgagcaaaacgagctctgaagcgtgaagctgctgataaggcagctgcagaaaagcacttgaagcacctccagaggttgggcctcaggaaggcacccgaagcaacagctgaagcaactccagaggttgaacctcagctgaacgagtgattttcaccaacttctgtagataatggtgctgtgaagaaaactgcagcccttgggtcacccgaataatcttccattgtgaaggactggagcgtggccttgtatcgttggcaaacttgccgatttgtacagtactttagtttcacaaattactcgtagcattgaactgcacatcagtctgcaccagatgcggcgatgcaatgcggtttacctcaatctgataatactttcagttaccgggattcctctgcatgatgcagaggaccctgaactaggagaatgtcagttgctagctctgctagtattctgtgctgcaatgtatcagtttagatagaatgttgcatgtgactatcctccgataaatgaaatgaggaaactggtcttcttgcatgtattgtgtgactatcagttcaatgaatcttctaaccagcgttatctatc

SEQ ID NO: 15179 - DNA, 2665 bp, Oryza sativa
  ref <308>: DATABASE ACCESSION NUMBER: AK065710
  ref <309>: DATABASE ENTRY DATE: 2001-12-06
gagtgacagagccgacatcatcgccgtggagctcatatccatccatccatataaatataaatggcgatgaaacgcctcaccagctgctgctgctgctagtgccaacagctgcatcctcccgtaggcgtaggcagctagctagctagctcgatcgaggccatctccatttccggcctatccctcttcttcttcctcctcctcttcctccgcctgtccggttcttgttctggtgctgctttgctcgacaccatccgattttttggaggcgattgccgtgctgtcaccggaaaaaggaaagagaagaaaagaaaaggctttccttcctcctgtgctgccccgccaacatcgtgttgaatctcgtcgatatatattttgctccgattggtgcctttttctcctggaattttgtgtcctgtttctctgtgtgggtggaaggcctcgcctttcaatccttccatcatcttgctgtccccccctcgattctttgcttcttcttcttcttcgaaagaaagaaattaaatattattacttgtttgatcttttccttttagcaatttctgccaatccccaggttcagtatttagtttccatccgagcagatttcttgttcttcgcttcaaaaatctgcgtatcgaattccatccatttttttgctttgtccaattcgtggataaagaaagagagggggagctacgaatccggcgagatggggaaggtaggggagaaggtgagggcgttcgcgacgaacaggtggctggtgttcgtggcggcaatgtggctgcagtccatggccggcatcgggtacctcttcggggccatctcgccggttgtcaaggccgcgctggggtacaaccagcgccaggtggcggcgctcggcgtcgccaaggacctcggcgactgcgtcggcttcctcgccgggacgctctccgccacgctgcccgcctgggcgatgctgctcgtcggcgccgcccagaacttcctcggctacggctggctctggctcatcgtcaccaggcagctccctgcgctgcccctctccatgatgtgccttcttatctttgttggaaccaatggcgagacatacttcaacacagcttcacttgtgacatgcattcagaacttcccaaagagcaggggcccaacagtgggtatccttaaaggatttgctggcctaagcagtgctattctgactcaactgtttgcagtattgcacacacctgaccatgccacacttgtcttcatggttgcggttggaccgtcattggttgccattggcctgatgtttgtaattaggcctgttggaggtcaccgtcaggtgcgaccatccgacaataacagcttcatgttcatctacaccatttgtttgctccttgcttcatatctggtcggtgtcatgctcgttcaagattttgtgcagctgagtgacaatatgctagtttttatcacggcggttcttttcatcctgcttattttaccaattgcaattcctgtgaccttgacattttcgtcaaaaactgaacatccgatggaggaggctctcctggctgaaccatcaaaaggacaggcaagtacttcacaagaaaaagagccagatgtatttttaagtgaggtggaagacgagaagcctaaagaaattgattcattgcccccatctgaaagaaggaagaggattgcagaattgcaggccaggctagtgcaagctgcagcacgaggtggtgttagaatcaggaggcgaccgcaccgaggagagaacttcaccctgatgcaggcattggtcaaggctgatttttggctaatttggttatcgcttctgcttggctcgggatcagggttgacagtgatcgacaacctgggtcagatgagccaggctgttgggtacaaagacgcccatatctttgtttcattgacgagcatatggaatttccttggtcgtgtcggaggtggctacttctctgagaatattgtcagggaacgtacatacccaaggcacatagcactggcttttgctcagatcctgatggctgctgggcatttcctctttgcaatggcttggcctggaaccatatatgtggcaaccttcctggttgggcttggatatggagctcattgggctattgtgccagctgctgtctctgaacttttcggtgtaaaacacttcggcgcaatgtacaattttctcacagtagcaaaccccacagggtcactgatcttctcaggtgtcatcgctagtaacttgtatgactatgaagctgagaagcaagcgcaccaccagagttctttgtctggacgatctcttttcgacatgagcttcctcgcagagggtcctctgaagtgtgaaggagctgtttgcttctttgtcagctcattgatcatgtcagcattctgcattgttggagctggccttagcctcatcgtcgttcacaggaccaagcgagtgtatgctaacctctatcgagctgtccgctgacttgaaatttccatggatagaagatggtgaatcccccttttgttgttccatgttacctgtattattgtgtacatgattcaagatacacaaagtctacctgtaaagtttcagatcatttcagagattgtattgtaagaatagctattcccaagtggaagtttacatgcactataaagtaatgatcatggggcattcttt

SEQ ID NO: 15180 - DNA, 1541 bp, Oryza sativa
  ref <308>: DATABASE ACCESSION NUMBER: AK065711
  ref <309>: DATABASE ENTRY DATE: 2001-12-06
ggcttctccacgctctctctctcgcgcgcgcaaatggcgtcgtcgaccagcctcgccgcgctgccctcgcagctcgcctcccccgcccgccgcgccgccctctcccggtccgctaccgcgcggccgcgccaccaccaccaccccctcctccgcgcaccgcccaaaggctgcaggctggtggtgacctgcaacgcgcagacggcggtcccgaccagcattgcgcagggcacgcccgtcaggccgaccagcatcctggtggtcggcgccaccgggacgctgggacggcaggtggtcaggcgggcgctggacgagggctacgacgtgcgctgcctcgtcaggccccgcccggcgccggccgatttcctccgcgactggggcgccactgtggtcaatgccgatctcagcaagccagagaccattcccgcgacgcttgttggtattcataccgtcatcgattgtgctacagggcgtcccgaagagcccattcggacggtagattgggaaggaaaggttgctctaatacaatgtgctaaggccatgggaattcaaaagtatgtgttctactctattcataactgtgacaagcacccggaggttcccttgatggaaatcaagcattgtacagagaagtttattcaggatgccggtctggattatctcatcatccgtttgtgtggtttcatgcagggcctaattgggcaatatgctgtgcccatactagaagagaagtcagtatggggaactgatgctcctacccggattgcttacatggatacccaggacgttgctcgactgacgtttattgccatgcggaatgagaaggctagcaagaagctcttaacttttgccggaccacgtgcctggacaactcaagaggtgattacactgtgtgagcggttggctggccaagatgccaacgttactactgtccctgttgcagtgttgagatttactcgtcagttgacacggttcttccagtggacaaatgatgtggctgacagactggcattctcagaggtcctctccagtgacacaattttctcagttccaatgaatgatacataccagcttcttggggtagattcaaaggatattctcaccttagagaagtatttgcaagattacttcactaacattttaaaaaaattgaaggatctcaaggcacagtccaagcaaactgacatattcttttgacaagaaggatatctacaaacctatggatatattttctgatgcagatctgtgcttcaaaacacagatgagtgaatacaaattttcttgtatatctgttgttgtggtatgtgcaagaagtgcatgctattaggttatgtctacagaatcccaactattgaactatcaggtcatgtatataggatctcaactattcaactatcaaagacctggagtttgtgtagatcagacctaaattcatgaattcacagtcagcttctgcttttctataatcacgcgttttagcatgactagtgaaccagaatgtattgtattatcttgggatagactaaagatgaattattgttttt

SEQ ID NO: 15181 - DNA, 1860 bp, Oryza sativa
  ref <308>: DATABASE ACCESSION NUMBER: AK065712
  ref <309>: DATABASE ENTRY DATE: 2001-12-06
gacccaatccgcgtgtcaaaacctccggcctccgcaccgtgcgcgccagctcagcacgtcggcggcggcggcggcggcggcgacggcgaggggagagatggacgccgcgatggagtcggcggtggggccgcacttcagcgggctccgcctcgactcgcgccgcctctcctcctcctccctccccacctccccctccgccgcctccagcaacggctgcggcggcaacgacgcccccgccgcggttaacgggttcgcgccgccgccgcccccctccgccgccgcagccgcggaggaggggagcaagcagcccttcgtgatcggtgtgtcgggagggacggcgtcggggaagacgacggtctgcgacatgatcatccagcagctgcacgaccaccgcgtcgtgctcgtcaaccaggattcattctaccgtggtttaactgaggaagaatctgaccgtgtgcaagattacaactttgatcacccagatgcatttgatacagagcaacttttagagtgcatgggacagcttaaaagtgggctatctgtaaatattcctatatatgattttaagaaccactcgatgctctgaaagttttagaaaggttaatgcatcagatgtcatcattttggagggcattttagtttttcatgatcaaagggttcgtgatttgatggatatgaaaatttttgttgacacagatgccgatattagacttgcccggcgtataaggcgtgatacagttgaaagaggtagagatgtcatctcagtgctggagcagtatgggaggtttgtgaagcctgcgttcgatgattttgttcttccttccaaaaaatatgctgatgtgatcataccgcgagggggagataaccatgttgccatagatttaattgtgcaacatattcgtacaaaacttggtcagcatgacttatgcaaaatctacccaaatgtttatgtggttaatacaactttccagatacgtggaatgcatactcttattcgcgaccgggacattgcaactccagatttcgtcttttattcagatcgtctgattcgtctggtagttgagcatggactggggcatttgcctttcacagagaagcagattgttacaccaacagggtctacttacatgggagttgacttttgtaagaagctctgtggtgtgtcaattattcgaagtggagaaagcatggagaatgcattacgtgcttgttgtaaggggattaaaataggcaaaattctaatacatcgggatggggacaatggacaacagctcatataccacaagtttcccttggatattgctgaacgacatgttctactcatggatcctgtgcttggtacaggtaactcggcaaatcaagctatagaacttcttataagtagtggagttcctgaggagcggatcatgtttctcaatctcatctcggctcctgaaggggtccattgtgtctgcaagcgattccctcgtctgaagattgtaacctcagagatcgaaactgggttgaacgaggagtaccgggtgatcccagggttaggagagtatggtgatcgctacttcggtacagactaatcagggattgatactggcttctttggcgatgtgaaaagatcacattagagctaacattaccgtgagagagatatatactggtgtttggttgtttgtggtataccattggaggtaccgaaatcgtgcgatttcgtgtgttagtgtttgctgctgtgataaaaacttcgggtgttgaattttgaaggcccctgtcgctagttacagcggcgtgtgaaaaaagggaaaaatttgtgacatgtagagcccacttctcgggcctgaatgcggcagatgccgtgtggtttcactt

SEQ ID NO: 15182 - DNA, 2743 bp, Oryza sativa
  ref <308>: DATABASE ACCESSION NUMBER: AK065713
  ref <309>: DATABASE ENTRY DATE: 2001-12-06
ggtccgccatctctcctatccgtccgcttcctcctcctcgcgcgatgagcgtgcgctgaacacgcgggactcgcgctcctccccagcgcttttgctgccgctgccatcacgcgccgattctcctcgccccaccgctgctcccgccggcgctcctcctcctccgccctcttcctcctcgcattccccgttcgccgccttcggagggtcgtccccttccggcgtcgccgccgccgccgccaacacgcgccgcttctactcgctccgcctcgatccaccacttctccatccgtcaatcggctcggtgaaatcatcggccagaaatccatcgctgcatcatccacccaaagccccatccccattctcatccccatcgccatcgtcaatctcgcctccttgatggcgcaatccccgcatcgtcgcaataactgccaaggcaagtatatcatcccctcagcccctcatgccctcgcccttcccccgccgttgtcgccttccaccacccgtatcccgcagcggcgtccgtcgccagctccccttccctgcacgcaggcgctgttggatttggatcgagagccgtcgtccttggatcaaagtcttcgcctcactgccgtcgtcgggcagtggagaagaggagatccagtgtatatgcactgctacagctgtcccaccgcctacggtaccacgtcacgtcaggtggaggaggaaccaaggccatccctcaacacctcaggcacctcatgagttcgactcccacagtgcacgccgccacgtcaggtagaggaggtggtgcttgcgtgtgaatgcaaggtcggtggtgatggcacattgcttggacaccgccatggccccgccctctctacttggtacttgcagtatatggcgatgttgccggatctagcgcatctacacgatggatgaccttgtcatgttcaggagttcagtgtgatactgggttcaaccttcctaagaaggagaacggcagctgcggcggccagtataacttggcctcgaaaaaaggtgatttgccaactccaactattcaggtggtactgcccttctctgcagtgacggaggatgaatttcagaagcagttgactcaggacaggttgtgtctcattattaatttaaatcgatctcacctcaacatcataacatcatgtaacttgcagtctgcaccctcgactaattcagacaaacctatcaagcctgatagactttttgattcccaaggatcaatccttttttggctaaattagcacagtagttggttcaagctgggtgccaacaacaatgcttaggaatatacacatctattgatcccttatgtgcaaagttgctctaatggcctcctatgtggatgtactgttgcccagtgatttgctaaagcactttctcctgttttgcacagcgaagtgagtgcttcagcttcagagccatgttcaaagagcttgtgtgttgaaagattgagcaaacgtgaagtgcagaaaaagcattaagaatttttggagtctaaaagaggaaattgtattcattttgtgtgaattgctgtaagttttttttctctgatttactttatgatgcaacatatctctggtgacactatcttctttaaacattttaaatttccctttgccgcaaaacatcacctttgtgaccatgtttttctgtacggtcaatctttttggctacacgactcagctttggcgagaggccgcatgggataaaccaatgtttctatctaaagtgttctttcaaaatcgtttttgtactgaataaaaaatgaagcttaatggatctgaagctatgtacaggaatcagaagggctatttagcagcaactgcagagtaacaacagatgattgtgcctcttctatttgtgctatttaaaaaacacttttttaacaaatttcatattgtccttttgtatagtcagccagatgcagcgtgttgcatgggacatggagcatgcatgttaccatatgcagttcaaggcatgggattagtgagctttaattgggtatcctgctaagattcatttctgaaaaaacatacaagaatgtcgttttcaatcatgctaactgtaatttttttaacaattgggttaagaccaaaataaaatgatataagcctctatttcttctatcagagatctattacaatttttttgggggacaataacgaataaaacaaactggtgaacaattttctttcccttaaatttgtacaaaatttgttgtgtctttgctgattagctgcaattgtgtgaacctggtggctaacgaggaatgatatggtgtttagagataacattgcttactcccttctaatttaactttttcaaattatttctcaactgatgtagtggaaacctctccttccccaaggagaagcagatggaggctctggtggcacgtctgaaggggcaatagcaaggctgcgaccaagatcaagagttggatgatgtttttcctaccaaaaaaagtttgaagtccgtgttaaagtaagagttgtcaatttctgctatgggagttcttacccctttttgtttagtttgtctatcctttaagtgaccctagctggtcgggatgtgtgaccatgtgagacttcccttttgctctgagctcatgtaaaccttgtaatcccagcgaacctgtcgttgtggctttcaatataagctacggggtaggtctgaggaccttcttgaaaaaacatttattcctatgttgaatgaattgtctagaatt

SEQ ID NO: 15183 - DNA, 1989 bp, Oryza sativa
  ref <308>: DATABASE ACCESSION NUMBER: AK065714
  ref <309>: DATABASE ENTRY DATE: 2001-12-06
gagggccgccttagtctttctcccctctcccctctccccctcccgcccgcctctcctcccctcccccccgcccgggcgccgccacctcccccgccctgcgagcctcgccgaagccccccgcggcttccttccgttccccctccagcgatggcgacctcggcgctgctccgggctctgaggcggccctcgtcggaagccgcgctgcgattggcagcaagtgtcagggtgcaaggagttactggatataggcatttgaataatcggaatctaagtgtctttaatgagttctcaaaacaattgaagggggaggctaaaagtaatcctgagttccagaaatccatgaaggaattcagtgagaaacttagtggggtaaaagaagatcttaaagtaaggactaagcaaacagctgagacaatttacaagagcgttgatgatgttttgactgaagctgaggcaacatctaaaaaggttactgcaaatgtgaaagaaaaaatgtctgccgctacagaagaggtaaaggagagttttagactaggaaaagaagatacttcaagttgtaaggatggctcacctgaaacttcgaaacatgagtactctgagacatcgtcacattcagatgacaagtcacaagctggcacaagtggctatacattgtttaataaactgaggtcaacactttcatctgcttcacctgtgctgtctggtgcatttgcaaagttgagggatactagagtctcaacttatgctaagcagggatatgaaattttcaaagatgagctaagctctagctctagcagaaagaagagaaatcatgccaggcatgcttctgctggaacagttgaaaagagtactcgaactgagttagttattgtaccaacaaagaaatcagtactgggtgaaaagtgggaagcatttaagaataagatgcgaggtcatccagcctataagagagtgaatgaatataccaaaccagtcgtcaacataggacaagaagtagctgaggatgtacgagagcggtgggagacaagtgacaatccagtggttcagaaaattcaagatttgaatgaatctatttttgaggaaaccgcaactgcagtgtctttcagggaaattcggcagagagacccatccttttctttgcctgattttgctggtgatgttcaagaaatgattaaacctgttcttactgcatattccaagggtgatgtgaagaccttaaaaaagtattgcaccaaggaagtgattgaacgctgcaaaggagagagagatgcttatgcatcacagggcatatttttcgatcacaaaattttgcatatttcagatgctgatgtaagagaaacaaaaatgatgggatctacgcccatcattattgtagggttccaaacacagcaaatttactgtgttcgtgatagggaaggacaagtaacagaaggagggcaggacaccatccaaaccgtcttttatgcatgggccatgcaactgatggatagtgatgaggtgccagaggaagagtcatattacccggtttggcggttgcgtgagatccagcaagttggtatcaaagctctcatatagagtaggtcttctcttctcttgctatttctttctcaattggatcagtcattgccaaacatgcattcgctatttgggatggaagagcctaacacttcgaacttatgctgctgtacgatgtgatcctctcagttcagtgcaagcaattttcaacaaatagtttcatataatttatactgatgatagaaacctcttctcaatctctctctctctctctctctctctctctctctctctctctctctctctctctctctctctctctgccccccgctgatgtatctaatgtctactatgttttttttttgtgaagtcagctgttctttttgcatgttggctgaaaaagattgtataagttttgtaacaacatttttttttgtccctacttggaaaagaatgcaccggagtcttgggagc

SEQ ID NO: 15184 - DNA, 1773 bp, Oryza sativa
  ref <308>: DATABASE ACCESSION NUMBER: AK065715
  ref <309>: DATABASE ENTRY DATE: 2001-12-06
gccaagagaccacatacccccaacgaccctcctcccctcccccctcctctccccctcgccgagatatattttcccctcggcggcgactcctcctccacctcgtgagctcgccttcggccgccgcctctgcgcctcgcagatccccacccgcgaccgagcgagctggtgccgcatcggtatcgcatcccgttcatcttctggctggacgaattcaattcacggacggtggtggtggtggtgttgactagggatttatttttttaccattggcggctcggctgcatccccaagtgaagaagagaattcgtacatgattccgctaaacaggagggcgagtcagactaggggtgggatggagtacttcgatgctaggcggaagcctcataatgttgggaaagttattgcagctctggtcctcacaacactatgtatatttattttgaagcaatctcctggttttggtggcagtagtgtgttttctcgccatgaacctggtgttactcatgtcttagtaacaggaggagctggctatattgggtcacatgcttcattacgcctgttaaaggacaattatcgagttaccattgtggacaatctttctagaggaaacatgggagcagtaaaggttctccaagagttgttcccccagccaggaagacttcagtttatctatgctgatcttggagatcaaaaaactgtcaacaagatctttgccgaaaatgcgtttgatgctgttatgcactttgctgctgttgcctatgtgggtgagagtacattggaaccccttaggtactatcacaatattacatcgaacaccttattgattttggaggctatggcgtctcatggagtcaagacccttatttactctagtacatgtgccacctatggagaaccagagaagatgcctattgtagaaaccacacgtcagttaccaattaatccctatggaaaagctaagaaaatggcggaggacatcatactagatttcacgaaggggagaaaggacatggctgtgatgattttaagatatttcaatgttattggatcagacccagagggaagactaggtgaagctcctagacctgaactacgagagcatggaaggatatccggggcatgctttgatgctgcgttaggaatcattccagggctgaaggttaaaggaacagattatcctacaactgatggaacctgcataagagactacattgatgtcacagatcttgttgatgctcatgtgaaagcactcaacaaggcagagccaagtaaagttggcatttacaatgttggcactggaagaggtcgttcagtcaaggagtttgtggatgcctgcaaaaaggcaactggagtcaacattaaaattgagtacctcagcaggaggccaggggactatgctgaagtatacagtgacccaacaaagatcaacacggagctcaactggactgctcaatataccgacctcaaggagagcctgtcagtcgcttggagatggcaaaagtcacatccacgcggatatgggtcaaactaaatatagcttgctgatcaataattctgctgaatcgtcgatatattgatttttttagttagtggtataggatcttggtgcgataccgcttccacagtcactcatttgttatttttttctctttttattttcaaaggtttgttgttattttctagcaaaaccataagcagtgatcttgatatgctggaaatcctggaagccttcctgtaagggcaaatttcattgttttttgacacaaattgctg

SEQ ID NO: 15185 - DNA, 1964 bp, Oryza sativa
  ref <308>: DATABASE ACCESSION NUMBER: AK065716
  ref <309>: DATABASE ENTRY DATE: 2001-12-06
gactcgccgttttcccctcccaaaaatcctccgccgcctgctcatggtctcatggagcctgtggtcagccgccgccttcccctcgagcttgagaagccggagccgctgccttcctctcaagctcgctgaaccagccgtcgctgacgtcgtgtggagccagtggttaccgtcgctgtcttcccagcgagccagcggcagctgccgccaccttcttgcgagttcgatgtccactgtcgccgtcatttcgtctccttctccatcccacgcgagcttggttctgcaagatctgtgccgcatcgagcgcctacaagcacgcggtaaccaacagtcctacatctcatgctctcttcttatcaaccttacataactggtggaaacctctacttgatttttctgtggtgcatggtcaatcaggcctgcttggaagcacaaacgaaaggatcacatatgtatgtgagtatgtctatttgctaattactaccttttcctgcaaatacgcatacaccacttggatgtagatacccattctgcattgcttttcatgttaattaacttgattgggtaaatgtttactacattgatcggccggtatctcagagtacaatcaataagtgactgaagataattcattagccttttatgtctatatatgatcataaaaatggctgcagggtgcatcagacaagcaaaaggtatatggtaagtgatggcacatttcttagggaagggatttacgagttcaatgtcaaaatcctctctatcagtcgcctcacattttcaacttacctaggttgcttccctatttttagctacataagaactatatgtatgtcaccccatcagagttatttatattcacatgttatattctaaatccatatttgttgagatgtgttctataattgatctctatgcagagtatcctatcaaaacattaacaatgttagaccgtacttttagtgggtgttgcatgcagttattattatcaaagctatcaaagatgctctgtgatattaattgtgatcctctttcattatacaggaaatgcacggacagcttgtaaagtaaacttgatgaagagtggtttcctatctccatcaaagtttgtcaaattcacttgtctgctgctgtattgtattgcttacaagctatttttcttataccatcatcccatacgcttagatgcatattgtacacccttgcctcatgtaatcatgtttgcagatatattttggtacatatatagtccagtgactctacgagcaactcaatttactactagaaaaaagatacccagtgttcttctcctttttatttaaatattttagtagctttcattttctttacaaccttacaagcaaaatgtttgatcttgatcatggtttagaaattggccgcctcttcgaaatacaaggtaaattaaccaaacattgacctactatatatgcttgcgtatgtcatatgtagatatactcattacttgaagaaatgcttgacggacatagtctacaggtattatatgcattattggttaggtactaaaaaaatgcacactgattttacttgattttagttttcccatacggccagtaatataaggtctcataggagttgttaaatattcaatcgttttgcccaaatggttcaattgagaagaacttaaagttagctattgcaggtagcctaggccaacagaaagtctgaagttgttatctccttattgtttgcagagatcacatcgcaaccaacttgagttgtatgttacctttagcttgatttggtcctgaaattgttctcacaatttaggaagcatttttactcagtgtatgcaccttaattttcttctagactactatgaagtgatgtgttcatagttgttttcttattaatcttaatatgtaaatttgctgagatgtccttcaaatatgatgacttcaaatacattgtgcatcttttattctctc

SEQ ID NO: 15186 - DNA, 1159 bp, Oryza sativa
  ref <308>: DATABASE ACCESSION NUMBER: AK065717
  ref <309>: DATABASE ENTRY DATE: 2001-12-06
gttcccgtctccgactgcgaccaaaaatcccccgctcgcttggccgctccggcgatcccctcccccggcagcggaggcgaagctcactgtcgcaatcggcgcagctgagcggagcccttgcccgccatgacggagtactgggtgagccaaggaaacaaatggtgtgacttctgtaagatttacatagctaataacccgctaagcatcagaacacatgaaatcggtaagcgccacaaggacaatgtcactaaaagattggcaaccatgcaaaaggagggtgctgccaaagaaaaggagcagcagcaagcagcccgggccctcaagcaaatagaagctaaagctaaaaagagctaccaaaaagatttagagaacagtcaaaggaatgtggacggtgacacttctgcggcacctggagatggatgggaattcgactctacttcaggatactattatgacaaatctactggactctattttgactcaaattctggtttctactattctgacggtttaggtaaatgggtcactcaggaagaggcatacgcatgggcaaaaacctcccaagctaatgctgggcaatcctcaagttcacaaacaaaaccaactgcttcagttgcgactgtccccacaattaaagggggccaagctccaggtttggtcgtcaagaaaccactgaatccgatgagaactgtaaagggtgctccatccgccattgctgttaacaagagaaaaagagaggacggcaagcccaaagtgatctcaaaggaggaggaagccgcccttaaagcgcgtgaagcagcaagaaaaagaatggaggatagggagaagcccttaatgggactatacagatcgtactaaggggcctccccataagaaatgctaatggatggattgttctgtaaaagaagatttgcgagattattagcgttgggtgtcttcaagagcgtcttctgcatcagggaagcatgtctgtagtgtacaatatctctggtaccaacaatatcctgaattggataaattccctttcctgaaactgttatctgtgaaacatgtaaagtactatacattcgtcagcatttcttttgctctttcacactggatacactgtagaaatgacgacctttgcgatcaactttacaggaaaaagaatatctttacc

SEQ ID NO: 15187 - DNA, 3309 bp, Oryza sativa
  ref <308>: DATABASE ACCESSION NUMBER: AK065718
  ref <309>: DATABASE ENTRY DATE: 2001-12-06
gactcgccgcccgccaccgcgctctccctctccccccaattccatccctccacgccacgatcgccttccgcaaggtaaccgccctcccctcgccgccgcggctcggagcttgcatgcatgcacgcatcatcatcatcggctcatcgcagatgtagggtagggacggtggtaagtgcagcgccagcttgtgtggcgaaacctagagagagaacactgttacctgcagttccaactacccgttggattaactatccctctctgtcccataatactgttcatttttttggcctcttctgtttgtcccaaaataagtttattttgatttttgagtgatcattgcatcggagtttataaaaatagagaataaatgtattgagagtaagataaagttagcaataattgcattgtgattcgataaattatgggtattttagattttttggttttgtattttggtacgtgtgggatgaatgaaaaatgggatggaggtagtagcttttgtcaaattctcttcttttgggggcattgcatcgcgtcctacatgctttgatacattgccaaagcaatcacctagtcaatttttattttgtaatgagtcaatcagtaagtggagtggttgcacaattacgatgggccgcccaaagaacgaaccttgcagtttgtttgtttgtttgttgcatatatggattttcctttacatattgcaattctaacctaaaagttcactatacaatgggcccaaaggaggagccttgcaggctgcagcctgtttgttgcacgtggaatttgtttgcatattgcaatctgacctacttgaaatttcagttatttatttatgattctgttcctttaccttgtgagattcatatctttactatgcaggtttcttcttcagtgcacatgtgaaactgtacttcacctcccatatataattcagtgcagagagcattcttgaataagtatgaacccttattttgttggtcttctcgtcccaattgcggtatctcttctcctacggaagaggagaatggttgggaagatgagggcactgccagttgatgtgggtggagagcccgggtatgcaatccgcaactatcgattcaagcaaccggttgaaactcactgggaaggtgtcaccacgctcgccgagttgtttgagcagtcctgcaaggattatgtcaacatgccgctcctcggcaccaggaagctcatctccagggaacaggaatcatcactagatgggaggtcctttgagaagcttcatcttggagagtatgactggaagtgctacgctgaggtattcaagagtgtttgcaacttcgcatctggactaattcggctaggccatcagaagactgatcgtgttgctattttcgccgagacgcgggctgagtggcaaattgctctgcaggcatgcttcaggcaaaatattacagttgtcacaatctacgcctccttgggagaggaagcactgtgccactcactaaatgagacagaggttactactgttgtatgtggtcagaaagaactgaaaaaaatgattgatataagtgggcagcttgacacagtaaagcgagttatctatatcaatgaggaaggaatctcagctgaagtttctttagctcaaaaaagcactagctggataattgagccgtttgaggatgtaggtagattgggagatacagcacctgttgatgcaaacatgcctctcccatctgacgtagcagtgataatgtatacaagcggtagcaccggattgcctaagggagtaatgatgacccatcggaacgtcctggctacactttcagcagttatgaccattgtgcctgaaattggtaaaaaggatgtatacctggcctacctgccacttgcacacattcttgagttggcagctgaggcactcatagctgctgttggggcttccataggatatggatcacccttgaccctgactgatacatcaaacaaaataaaaaagggaacactgggtgatgcttctgcactcaagccaacactgatgaccgctgtacctgctatacttgatcgtgttcgtgatggtgtgagaaagaaggtggatacaaagggtggtgtagcaaagcagttatttgatgttgcctataatcgtcgacttgccgcagtcaatggaagttggctgggtgcatggggattagagaaactcttgtgggatatgcttgtcttcaaaaaggtgcgagcagttttgggaggaaaaattcgctttgtactttcaggtggagcacctctatcaggagatacccagagatttatcaatatatgccttggggttccaatagggcaagggtatggtcttactgagacatgtgctggaggaacattttctgagtatgatgacccatctgttggtcgcgttggtgctccactaccttgttcgtacattaagctgattgactggtcagaaggtggatacttaacaagtgactccccaatgcctcgaggagagattgtcattggtggtcccaatgtaactaaaggctatttcaagaatgaagctaaaacaaatgaagtctataaggatgacgaaaaaggtatgcgatggttctattctggtgacatcgggcgcttccacccagatggctgccttgaaatcattgaccgtaaaaaggatattgtgaagcttcaacatggtgaatatgtgtctctcgggaaggtggaggctgctctgattgtgagcccatatgtggagaacatcatgatccatgctgatcctttccacagttactgtgttgcacttgtggtagctgcacacaatgagctggaaaactgggcttcgcagcagggagttacatacaccgatttcgtagatttgtgccagaagccagaggctgttaaagaagtgcttggatctctatcaaaggctgcgaagcaagcgcgactggagaagtttgagatcccggccaagatcaagctgatatctgagccatggaccccggagtctggccttgtcactgctgccctcaagctcaagagggaagtgctcaggaagacatatgaggatgatcttgctaaactatacgcctgatgatcaatgctgaattgctgattaagcctactcgacgttttgacacaaccagctaccgtaggacagagctcttgtgagcaaactgaagatgctgataccggcaggaggtagcctgaaattttggagctgtggttgtttgatcttttggagctagcacaattatgtgtagcctcatttcacacttacttctgtgtctctgccatattctcttgtgaatttacattgttcaaaggaaaaaaaaaaggcattct

SEQ ID NO: 15188 - DNA, 3864 bp, Oryza sativa
  ref <308>: DATABASE ACCESSION NUMBER: AK065719
  ref <309>: DATABASE ENTRY DATE: 2001-12-06
gaattcttcttgattcttctttgtatttggatttcttgctatcagcaggaactctctctctctctccaaaatgggcactgaattaactgttacaggatggttcttgtcacctattatacgggaaatgcaagatactgcactgtcctacataagggggcaattcagttgggagaaggatcaagaaaaggaccttgagcgtcttgatactatccttacagagatcttggccatcgtggacgccatcgagaagcgggagatcaaggatgggaatcagaggaagctgctccggaagctcaaggatgccatttacagcgccgttgatgtgcttgacagcttccagtacatggccctcaagtctaaagtcgacagccaagctatggtgagtcgcgttacctcatcctgtgtttacttgggtaagcgcgtagtaggtactgataagttccggaggaagctaaccgatatgttgaaaaaattggatgaggttaaaacaactgcggataccttgttcaaattggttagttttgatagtgctactgcaaagctgctcccagtcacacaggcacgtgtaacgtctcctttgaaggaagagaaccacatatatggtagaaaagatgatcttgataggctgagagatttgttgcttatgcaaagtgatagtagtgcacctggacctagtaactcatgtgttcctgttatatccatcattggtgttggtgggattgggaagacaagcctagcacaattagctttcagagatgaaaggatacgtgcgagctttggtctcaggatctgggtttgtgtatccgatatttatgatgagataacattggcaagggatattttagaatctgtaacaggtgaaaattatcgcagtgttactaaattggatgaattgaagaatgttcttcaagaaaagataagtcaaaagaacttttttcttgtattggatgatgtatggtatgatgagaacaggacaaattgggagaatgaattagtatgggacggagttttatcaacattggatactggactgggaggatccaaaattctggtgacgactcgaaccaacaaagccagtgaactcctacgtgctggagcctgtttacaattagggggattgaatagagatgattactggatgttattcaaaagctgtgcctttggtgagaaacatccaggactgtttcaagaacttaaggaaataggaatgcagattgctgaaagattgaatggtttgcccttagcagcaaaggtaatcggtcgcctattgaatgttgatttagattcaagtcattggaagaaagtgctagagagtgacatatcaggtgatgttatgaaggttctcaggttgagttaccaacacttgcccatccacttgcaactatgcttcagcttctgcagcttattcccgaagaactggcgttttgatcccaggaggcttacagacatgtggatttcacagggttttgttcagaaggaggatgagtctgacaatgacatgaatgttgaagatgttgcgaagggctactttaatgatcttgtacaaagatcattcttcgagagatctttgttagaccttccaatagagtatgtcatgcatgacttgatcaatgaccttgccaggaatgtttcaaaggacgagtataccagaattgagagtgagaagcaaaaggagatcccaccaaacattcgccatttatctatatctgcacatttgtgggccggtatgaagaaaacagagatgaaaaacctgcgcacgttacttgtttggagcaaatcatggccttgctggaaattgtcccttccaaatgatgtgttcaggaaatccaaatacatccgagtgctagatttgactggttgttgcctggagaggttgccaacatcagtgaaaaatttgaagcatttgcgctatcttgcttttagggttcctgaaaaaccattgcccacagcattggtccaactttatcacctagaggttctagtcacaagaggtcactcttgtcggggaagtgaatgtttccaacttccaacaaacatgaagaagaacctactcaaattgagaaaagcttaccttttcaatgtagggggtgccacaatatctggttttggtggacaaactcttctgcatggcccaggggaattccatgtcaagaaggagagtgggcacagacttggagagttaaaggagatgaacaatatccgaggaagattaagtgttaggtttcttgagaacgtggaacatcagcaacaggctgttgatgcgcacctagattgtaaagagcacgtcaaacacttgcagctagagtggagtgaccttccaaggcctattacttctgagttggattctgatgtgcttgaggcccttcgacctcaccctgatcttgaccggctgaatatcacaggttacaagggactgaggtcacctacttggtttgagaccaattggatgaaagcactgacttctgtaatccttgagaattgcatgggttgggtgcaattgcctcctcttggacagcttcctctactggaggatcttgtactgaggaacatgcatgctgttgggcagataggtgaagaattctatgggaacggtgaaatgaagggctttccaaagttggaagaaatagtatttgatggcatgcccaactgggagaaatggtctggaattgaagatggttcattgcttccatgtctcacaagactttacatagctaagtgccctaagcttcaagaagcaccacccttaaatgcaagaccaaaagttgaagtggcgataacatctgattccttaccaagttcgtgtctatttgactccctaatggcatcggcatcgtatctgatcttacttgtcaactgctgcagcttcttgagcagcctgaatactgaccaacttagtcatgttgaggagttgaacgtgaagagctgcacagatccaatgccagcttgtggatttatcggacttagctcccttaaggtgcttagaatcagcaactgttcagcgttactatcgtcagtttgtgtggaagcaggtgaagaacttgacacatgttttttccctcagtcactaagtgaacttgaaatagttgatagcaatattcagtccagtttgctaccaagatacttgcaaggcctaactaacctctcggtgctggtgattaatagctgtgattctatggatttgctatctcttgcttatggaacccatcaccttacttctctagaagccataatcattaaagactgtattttcctatcctcattggatggatttgaaaatctgattgctctcagaaagttagtggtagcagattgtaaaaatttctgtttcttgccagctgatctgaatgcattaatatctctcaaaacattagccatttatgggtgccctaagatgaaatttctcccccagaatggcgtaccagcttctctacagttaattttgctgtcactgttgcatccagagttagacagacagcttcaaaggagggaaggtactgaatgggacaagattgctcatgttcctgaaaagaaactagaggtagagctaattgatttgttgacactgtttccatccagttctttctgacgagtgttgtcatttttggacgtgtggtatgccttcctgaaccactctactacatttacttcaaccgaataactactagtcatgctcacaaaaactcatatatgggcattactacctttgcagtttatcagtgccaaactgccaattcctgaagtagaggttgtttcaagctgaatgctatttagaccattttgaatggtacgcaacatctcaactagaaaaactctaaatgtcgtgtataatgaacagattataaagtgactatgtcatttgttttc

SEQ ID NO: 15189 - DNA, 1196 bp, Oryza sativa
  ref <308>: DATABASE ACCESSION NUMBER: AK065720
  ref <309>: DATABASE ENTRY DATE: 2001-12-06
gatatacacaccgggccaccggccggtagggagttctcgcggttttgtcgttcgatcgatcgatcgtgtccatgctgctccggctgaaggccgtcgccgtccatccggcggcgctccttgggcgaccgcgcagccatgacgcaccccagctcgtcggtcgcacgggcgcgtcgacgacgacggcgaggcggagggcggcgaggagcgccgtgacggtgacgatggcgctcaaggaggagccggaaggcagccgtagcggcttcgccggcggcgttccgagctgggaccccgggctggagatccaagtccctttcgagcaaagaccggtgaacgagtactccgccctcaaggatagcgtactctactcgtgggcagagctgagcccggggtcattcttcctgcgcctaggcagcctgtggctgatcaccttcacggtgctcgccgcgcccattgcagctgcaagtttcagtccaggaaaggatccactcaaattcgtgctagcagctgggattggaactctgctcctcgtctctttggtcgttctccggatttatctgggttggagctacgttggtgataggctgttgtcggcggttgtgccgtacgaagaaaccggatggtacgacggccaaatgcgggtcaagccaccagaggtattggctcgtgacaggctcttgggatcttacaaggtaaagccggtgattaacctgctgaagcagacgctggtgggcaccggcgctctgctggtcggcgcggtgtcgctgttcgcgttcgcggcccccgtcgaggacttcctgcactccgtgaacgcaccaccatccgctgcctcctccaagcccagtctcagaagggaggagctgctgcgtctgcccgtggaggtgaggcaagacgacgacctcgccgctgccgccgcggaggccgccgacggacggccggtctactgcagggaccgctactaccgggcgctcgccggcgggcagtactgcaagtgggacgacctgctcaactgacaaaatacttctgtattacccaacggatacggtgtgcagtgtgtcctgaatcctgatatatgcagattggcatgcgaagcctccgcaactgtgtaatcggaacgaaattttgtgaccattggttgcgttaagggacagatagataaatgcttaatttattggatgtttgatcgacgcaacatttgc

SEQ ID NO: 15190 - DNA, 1475 bp, Oryza sativa
  ref <308>: DATABASE ACCESSION NUMBER: AK065721
  ref <309>: DATABASE ENTRY DATE: 2001-12-06
tcaggtccagcacgagtgcacgcacaaggagtcaaggaggacaaatcaatcccccgtagcgcctaggagatggaccagatggtcgtgtactagtgtgccactcgcctcgaggtgtgtgtctcctccccttttaaaaccccccaacgaagaggcaggagcagccgagcaggacgaggaagaaaacccaacccgcgcgaagcacaagcacagaagcaaaagcgaacgacgaggagagacgcgaccaccgccgcgggtcactccccatcccaatctcatccagattggatttgagcggatagaggagggatggatgggaatttcgggagcgaggagcggattctgtggccggcgtcggttcttgccggcatcgccatgtgcgccgcggtatatgacataactcaaaaggttagctctcattgctcaagggttatgacaatataagcccaatgaaaaaggttgaatggaataataggggtttctctacattccatgcattggttgcagctgttgtttctttttacctggttgtgatatctgacctcttccatagcaacataataattgttagaaactcatggctatctgatgccatgtttggggtctcgattggttactttttgacagatttggtgatgattctgtggtatttcccctctttaggtggaaaggaatatctcctgcatcatggactttcgatgtatgcaatctgtcttgctctgttgagtggcaaagcacacatgtacatactcatggttctctttactgaagccaccactccctttgtgaaccttagatggtatttggaggttgctggtaagaagacgcataacctttacttatacaatggattggctctgtttgtcggatggctggttgctcgagtaatcttgttcatatatttcttcactcacatgtacttccattttgatcaggtgaagtccatcttccccctgggcttctacagtatactgacggtgccaccggcgctggcagtgatgaacctattttggttctggaagatattcaagggaatgttgaagaccctgtctaaaaggagacagcaaagtgaaaacggaaaggcagagtagaacttacaaggaaggtggaaggaggttttgttcacttttattgttagtgcgtctaactttcgacaaatcaaagttaaacatcctttgtacttacattacatttgggcgttttctattcattagtagtatatcttttcaattctaattgcctgcgagtgtgagaactttattgtagagtagcctgcatactgcagtcactacaataattctaacctctcctctttttaatcgtccatccaggcaactgtacactatcttataacagcattgtcactcctcgcttggagctgcttacctacagacacacagtaatattgtactatcgaactgtcggcaacttgcagcaattttcgtggacttccacgtgcatttcgtggatcgataagc

SEQ ID NO: 15191 - DNA, 1088 bp, Oryza sativa
  ref <308>: DATABASE ACCESSION NUMBER: AK065722
  ref <309>: DATABASE ENTRY DATE: 2001-12-06
gacttgccccagtagtaactgcctggaaacttccggaagcatcgatctggagagagagagagaggggcagccaagattgaagcgcacgatagtacgaacgcgcacaaatcccgcccctcctctcctcctccccgaaccgcaggaacgcgatttgaatcgatcgatcgatcgatctcatctcccccctttcgcctgagatctgcagcaaacggctgatttgtccccgctgatggaggagaccgcgacggcggcggccgcggcggagaaggcgtcgtcgtataggtactgggtgcgggaggccaccggggacgccgcgccgctgcccgtcccccgcaagctcgacgcgaccgccgccgccgccgccaacgggaacggcaacccgccgccgctcggctccgtgtggaatcaggctggaacctgggaggaaaagaacctcaattcatgggctaacagtaggataaaggaaatgttgggttctttagattcgctagaattccctacagggaaggcatctcttgatggagtgtctaaatgcattggtgatgcctttctagtcaccgttcgtaataagaagagagtagggtatacctatgaactaagcttgaaatttaagggtgaatggttaattaaagaagaaaagatgaaggtcaaaggccatctggacattcctgagttttctttcggtgagctggaggacttggaggtagaagtaaggtttaccgatgacaagggcctcgcatccgacgacaagaggcagatttgcaaggacctcaagtccttcctttcacctatccgggagaaactgcgcgcattcgaagaagagctcaaggataggtaacagaaaatgccatcaaaccggcagcatcagcaaggcaagtaattgccctgctttcccaatattagcgtcgaatcatgtaacgttgtaacggcagcagaatgatcatctgagtttgatattcatgccttgttagatcacttaaggtcccatatttttcgcaatatccgatcgcatgtaactgcgactgaatgttgtagacactttgttgtaaactccggtcgtccagatgaatatgaagttatgaactgtc

SEQ ID NO: 15192 - DNA, 3161 bp, Oryza sativa
  ref <308>: DATABASE ACCESSION NUMBER: AK065723
  ref <309>: DATABASE ENTRY DATE: 2001-12-06
gacttctgtctcctctctccgctcgggcctccggcggagtcgagtcaaggtcgtctcctcctctctcatcatcgagttcacaagggttcggcacaccaaccaccaacagttgggcgcaagttctccaacctcccttttgtagtcggcctacaaatcttccagcagctgacatggaggctgtaatccttgctgtctcaaagattggttcagttttagtggaggaagccaccaaagctgctatagccaagctatctgaaaaagttgcaaatctgaaggaactaccgacaaaggttgatgaaataaagaaggaactggagacaatgaacaatgttataaaaaagatgagtacaacacatcccatcgatgaggttgtcaagggttggattgtagaggtgcggggcctggcccaccatgttcaggatgtaatggacaaatattcataccatgctcttatgttggaagaagaaagttccatgaaaaaggtattcactaaaaagaaatatgtcacagttttcagtgatattgcggaagagattatccagatagagaaaaagattgaaaatgctgggaagcggaaagaacggtggctgcagcagcctgaccttattcctaacccgcttacttatattgaaaggaaacagttccaagactgcctcctggcacaagattatctagtggggattgaaggcaacaggaagctgctgactgaatggttgtactccagtgagcaaggtaacacagtgataacggtatctggtatgggtggattgggcaaaaccgctctggtcaataatgtgtatgagtatgagcgggagaagaacaattttgatgctttttcttggattgtcgtgtcacagacatataatggggttgatctactgaggaaattacttaggaagattggtgttgtcgaaacgacgccaacaattgggtaccctgaacagacaaatttatcagatttggaccctcgtgacttgaaaaatataataaaggaaaggctaaaggatagaaaatttctggttgtattggatgacgtttggaaccgggaagcatacactctgatagaggatgcgttcctaagctgccaaacaagtcgcataatcatcacaacaagacaggacgatgtggcaactcttgcatacccaacacaccgtctcaaactcaaaccattggagcacaatgatgcatttgatctcttctgcaaaaagaccttctataacagcatgcacagcaagtgcccacaggatcttgagaagttggctcacaatatagtggacaggtgcgaaggcctgccacttgcaatcgtatctattggtggcttgttttcttcagtgaaactagagagttatatttggaatgaaatgtacaagcaacttggagacgagctagtgaacaatgatcatatacgagcaattctaaatctaagctaccgtgacttacctggacatcttagaaattgtttcttgtattgtagcctattccctgaagatcatctgttttcacgagataccctcatctggctgtgggttgcagaaggctttgcagtgcgaaaacaacatagcacaccagaggaggtggctgacagatatcttagggaactaatccaaaggaatatgctggatgttgtggaaaatgatgagctaggcagggctagtagctgtaagatgcatgatcttgtgcgcgacctggcactttctatagcaaaagaggagaaatttggcttttcaaatgattatggcacaatgatagaaatggaaagggatgttcgccgtctgtcatcttgtggatgggaaaacaatgatgtactaaaacttaaatttccacgtctgcgaaccctagtatcattgagagcaatgtcaccctccacttatatgctgtcctcaattttgtcagaatcaaactatcttacagttctcgagcttcaagactcagaaatcactgaagtgccagaatccatagggaatttgttcaacttacgttacatcggcttgcggggcaccaaggtcaagacactcccacaatcagttgaaaagctgtctaatctccacactttagacatcaagcaaaccaaaatagagaagctaccaaaaggaatcgctaaggtcaagaagctacggcacctgatagccgatagatatgctgatgaaacacagtcgacgttccagtatttcgtaggaatgcaagcacccaaaaatctgtccaatatggaggaactacaaactcttgagaccatgcaagccagcaaggacttggctgagcagctgagtaaattgttgaaattaagacgtgtatggattgacaacataagttatactgattgtgcaaagctttttgctaccctgtcaaacatgcagcttctttccagcttgcttatctctgcaaggaatgaaaatgaggcactttgctttgaggaactcaggccaaagtccaaagaactccacaagttaattatcagagggcaatgggccaagcagacactcgactacccaatatttcgttatcatggtacacaactcaattatctagcattaagttggtgctatcttggggaagatatgctagggatactctcttcacgcttggagaacctcacttgtctaagactgaacaatatacatggtacaaaaacattggttcttgatgcaaaggccttcccacgcctgaagatgcttgtgctgaagcacatgcctgatgtcaaccagatacaaattatgaatggtgcacttccagtcattgaaggtttgtatattgtgtttctatcaggggtggagagtgtccctcctggcattgaaacccttcggaccctgaaaaaactctggctgctcaatctgcacaagaacttcagagctgactggattgagagagaaatgcaacagaaaatgcagcatgttccagagctactcatgtaggagtgcattgtttcttttttccttctgtaatgatcttggttggtgcatctgcatttatctcttcatagttcttagttatggagctgttggtagcactacctgaaacattggctttcttatccatcgggacctgtaatttgttctgttgttttgggtgcttcagatagtgattctcatctaaggacaaggaaccgtgtccttttacttttgaactgcatttgctaataatgatgtaactgtaattcacctccc

SEQ ID NO: 15193 - DNA, 2316 bp, Oryza sativa
  ref <308>: DATABASE ACCESSION NUMBER: AK065724
  ref <309>: DATABASE ENTRY DATE: 2001-12-06
gtggaaacgatcactcgctcccttgtcccctatcctctcgccgctggggcgctgggcgctgcctgccgcctccaatggctaaacccctcctcctccccgctaccgtcgcggcggcagcagcagctcgcctcccctcccgcctcgccgtcggcgcggccccgccattccgcgtcctccccttcttcctctgcccgccgcctcagagccgcagcctctccttctcccccgtctccgccgtgtccacggccggcaagcgcggcaggtcgccgccgccgccgccgagcccggtcatcagcgagggcagggatgacgaggacgccgccgtcggccgccccgtctgccccggctgcggcgtgttcatgcaggacgccgaccccaacctgcccggcttcttcaagaacccctcccgcctctccgacgacgagatgggggaagacgggtcgcctcctcttgccgccgagcctgatggatttcttggagacgacgaggaggacggtgcgccgtcggaatctgatcttgccgccgaattggacggtctggacagcgatttggatgaatttcttgaagaagaggatgagaatggagaggatggggcggagatgaaggctgacatagatgccaagatcgatggcttctcgagcgactgggactcggattgggatgaggagatggaagacgaggaggagaaatggaggaaagaactggatggtttcaccccaccgggagttgggtatggaaagatcactgaggagacactcgagagatggaagaaggagaagctgtccaagtccgagaggaaacgccgggcacgggaagccaagaaggccgaggccgaggaggacgccgccgtggtctgtgcccggtgccactcactgaggaattatgggcatgtgaagaatgacaaggctgagaatttgatcccggacttcgatttcgatcggttcatatcgtcccgtctgatgaaacgttcagctggcacaccggttatcgtcatggtagcggattgcgcggactttgacggctcattcccaaagagggctgccaagtcgctgttcaaggcgctcgaggggcggggaacttctaagttgagtgaaacgccaaggcttgttcttgttggaacgaaggtggatttgctgccatggcagcaaatgggagtgaggctggagaagtgggtgagaggccgagctaaggctttcggagcaccaaagctggatgctgttttcttgatcagtgttcataaggatttgtctgtcagaaacttgatctcatatgtcaaggaactagctgggccccgtagcaatgtttgggtgattggtgcacagaatgctgggaaatccactctaattaatgcatttgcaaagaaacaaggtgtcaaaatcacaaggttgactgaggctgctgtgccaggaactacattaggaatcttgagaataacaggtgttttgccagcaaaggctaaaatgtatgacactcctggcttattgcatccatatataatgtcaatgagattaaacagtgaggaacgcaagatggttgaaattcggaaagaactccggccaaggtgcttcagggtgaaggcaggacaatctgtacatattggaggtttaacacgacttgatgtgttaaaagcttcagtccaaactatctacataactgtttgggcatctcctagtgtgtccctccatctggggaagactgaaaatgctgaagaactgcgggacaaacattttggcatcagacttcagccaccgatcaggccagagcgagttgccgaattaggtcactggacggaaagacagattgatgtgtcgggggtcagttgggatgtgaacagtatggatattgctatttcggggttaggctggtattccttgggcctgaaaggaaatgccacagttgcggtgtggactttcgatggcattgatgtgacacggcgtgatgcgatgattcttcaccgagctcagttcctcgaaaggcctggattttggctacccatcgccatcgccaatgctataggtgaggagaccaggaagaagaatgagagaaggaagaaggctgagcaaagagatgatctccttttggaagaaagcgccgaggatgatgtggaggtgctcatatagttgacacatgactcactaggaaacatatttttcaagttgatcaatgagaaatcattttcaggatagaaagtagaagcatacatatgttgttaaaagaatagttcttgaatttctttagcgagaggcagcccctgagtgtaataggtaatctttgtgtgagaatgtttacttggaatggaaacatttgttttgtagc

SEQ ID NO: 15194 - DNA, 4174 bp, Oryza sativa
  ref <308>: DATABASE ACCESSION NUMBER: AK065725
  ref <309>: DATABASE ENTRY DATE: 2001-12-06
gtgtcttgagtcttgacaagcaaagaaggaaggaaacctcctcctcctcttcttcggctccaaatcaaccaaacaaacacagcttccgactctctccctccctccctccgcctccgcccatccaatttcttaccccgttcgactccactcgactcgacccgacccgcaggagagcgggcgtcgcaaaccctagctccacccacacccacacgctcatgccccccaaaccctagaccatgcgcgcctccgccgcccccatggagacctccgcctccgcccgcagatccgccgcccccgaccccaagaagcctcgcctcgcccagcaccccgcccccagggatcccagatcttaccccgctgccgccaatggcaacgcccccgccgtcgaccaggcgcaggtggacgagctcgtcgcgcagtaccggaccgccctcggggagctcaccttcaactccaagcccatcatcaccaacctcaccatcatcgccggcgagaacctccacgccgccaagcccatcgcctctctcatctgcgccaacatcctcgaggttccaagtgaacagaagctaccatctctgtatctacttgacagtattgtcaaaaatattggaaaagattatgttaaacatttttctgcaagattacccgaggtgttctgcaaagcatataaacaggttgattcttccatacacaatagcatgagacacttatttggaacatggaaaggagtgttttccccaacttcactccaagtgattgagaaggaacttggctttcaatcatctactaatggatcatcaggcgctgcaccatcaaagcctgattctcaatccaatcgtccatcccacagcattcatgtgaacccaaaatatttggaagcaaggcagcagctccagcaaccaaataagggacaggggatactgggagctggggccaagactactacaatttccgattctggtgatgatattgagaggactagcaggacagctgttgatagaggtgcagggcggcggctggatgctttgaaccctaggactaatgtacagcgggcacaaagggacccttttagcaatcctattcatgaaaagcaagatagagatatgagggtccttggattctccaacatttcgcagcaggctgttgtgggaactggtcttgttcgtgcaaaacctaaaggccaagatggaagtggcggaccatattatactgctggagttggttcttctgaagaacagtttgacaggcgcagcaatttttatgcaaacaaggatgttagaccatcaggatctgtacgtttagatggtgcacttttgccaactcctgttagtaattctgataggattggtaggccgtcatccaacaaaagctggaagaattctgaggaagaagagtacatgtgggatgatgtacgttctcaaggagcagattatggaggtaccagttcaacaagaaaaagagaatggatacctgatgatggaaatgttggaagctttcaaagggttaaatgggcagaggcgggaggacctttggaccctgaccaacacaaattagatagcttccaaagatttggaaatgcgacgggtcaagatagaagaattacaccatatatggatcatgaagagtaccttcatggtaagcacgaagtggaaccaagaattgatagggaaatgctcccggaaggacagccgttctcgtcatctcgtggttcctctctctggttatcccatgaaaaacctctcccagacattgtgtcagatcctaggatatcagcgttttccaatcagccagcggacaggcctaccatttatgctggtaccttgtcaacaagtatcacttcatctgtacctgttgggttgtcagcagcctatgctggacgatcaagcctagaaagtgcagcaacaagatcaactgagactataggacagcaaaagaatagatattggtcaacttcctcaccacctgtacagtcaccttctgcatcatttgcacgccagagttcccctagtcctgtagagcttgattactcttccaaaccattctcacagttgggtcaaaattctctggaagactataaccaaagaactcatgccttggctcaaaaccttgcactttctcagggcagacctaatctgctgggtgctccttcacatgcctcccagcagattgaaaagcacccttccttgctgcagtcaaagccacatctcaggacacttgatcaaccgcaggcaaacttttcacctgaaaattcatcttcagtatttaaatcttcaatccagctgcctatttctgttggcgtggggcatcggcagcctgaagaagtatctctgtctagtgattccactcttatgagctcagatcatttaagtgctagcagtttgttggctggccttataaagagtggattcaaaccgaatgaccccaacgatcttgccagtttgagggcacaacctcctcttccaagtgggtcactcctcatgtttcgacatctttttcagctgcttcctcatccctgcaccttccagctagtgatactctgaagtctcaggcgccaaactctctgcgcccacctttgccccctgggttgccactttcgtcgccgtttgtgtgcccgacaacacagacctcggagaaagctgcaccactctctagtcttctcagttccctggttgcaaagggactgatttcttcgccttctgcagattcaactgtagcgatccgacaacagccctgtaaatcagaactgaacacaccagatgacactgcttcagctccatctctgccttttgtccagccttcagttaaaaaggaaacatccaatcaaaactcatctgccccatctaaggtgctggtgcatcaacctgttgaaatcaagaaggaacctgcagaaatcaagatggtagaccttattggctttgacttcaagcctgagatgctccgcaagtaccatgcacatgtgatcagcaccctctttgatgaccaaagtcatcaatgtaatacatgtggtctaagattcagtcttgaagaagagctctctgtgcacactgcgtgccatggatcgaagcaaagtgagactagaaagactggtatcgcacctgaaaaatggtaccctagcaaaaataattgggtcgatagatcacatgaagtgcagaacagcgccctggagtctgcttcttctgttgcagatttgagctctgaagaggaagtttgtgaattcatggttcctgcagatgagagtcagattatctgtgcactctgtggagagtcatttgatgacatttattccattgagaaggataactggatgtacaaggatgcggtctattttgattcttcgaagacggaaggcagcagtggcgacagtgctgagagtaaagagcgtgtacccatagtgcatgcaagatgtatgtcgataagctcaaatgatggcatggaggttgattagcatttgtgccaaacacaggggcagaagcagtagcaacagaaacagctcgaatgatgagattgaggtggattagctggaaatctggtgcttaacagaagctcaaatgaaatgatgccacaaaagtgggtcagcgtgaggggtgatccgcagcagcaactgcaatgatgctgtcgcggccatgacatgtaggtggattagtgtgaagttgacaacctgacgcgctgcacaagtaaattttggtcaaatgtttgtgttcatccctcagtcaccattaatcgtggataaggtgcttacacagaataaattccaagtccagctctggccttgtcaaccgatcatcctcgcaatcgagatcttcgggggtctgatatttgtatttttggttcaatcgaagggaaatgatctttctgttcatagaaggccagcttgtatgttaaaaaggagtgtattgtttcattacgagggaaagcaataggtgacgctgccattgagttactgttgttttttggcaaacttgtttcatcttccgaggactagagattttgtacctaaaaagaactgataatagaacatcatggaggcagaattaaactagttacttatggcttgcttgcttgatgtgggagttcttcattgtagttcgatgttccttcctccttgccattgtgatgcgtaaaattgttttgtcgtcggaagttgttaattcggcagatgatagatctgagtatt

SEQ ID NO: 15195 - DNA, 1540 bp, Oryza sativa
  ref <308>: DATABASE ACCESSION NUMBER: AK065726
  ref <309>: DATABASE ENTRY DATE: 2001-12-06
gatacttgaagaaatgacaagggatggttgtcaacctactgctccatgcttcaatattatccttactggttgtgttaagtcatgccagtatgatagagctttccgcttgttctatgactggaaagaatatggagtcaagatatctctatcccctgaacagaaaggatgttttggtgacaacttctcatactgtgaagaacatacaagtaacagcagtactctgttagtggttccatttagaccaacagttacaacatataatattctaatgaaggcctgtggcacaaatggagaacgcgcaaaatctgtaatgaatgaaatgaggcgaaatggcctttgccctgaccttattagctggtctattctgatggatatttatgggtcatctcaaaacagggatggagctattcaggcactcagaagaatgcaacgtgttggaatgaaacttaatgtcactgcatatactgttgctattaaggcatgcgttgaaaacaaagacttgaagttggcattgcacttgtttgaagaaatgaaagcacatcaactgaaacccaatttggtcacatacaagactcttttgacagcacgcaataaatatggatcattacaggaagtccagcaatgtttggcaatctatcaagaaatgagaaaggctgggtatcaagcaaatgactattacctcaagaatttgatagtggaatggtgtgaaggagttttgtctagcggtaatggaaatcgagaatattaccaattggatcagaggaaagaatcattcaagctcgttcttgagaaagtgacaacattcttgcagaaagatgttgatcagaaccaaactgtcgatgttcgtgggctttcaaaggttgaatctcgcgttgtagttctctcagttctccggaagatcaaagagaagtatctactaggacgagcagttcaggatgatgtagtaatcatcactggtcatgggaaggcatcaagcgccaaggccgagactagtgttgtcgaggtcgagcatgcaatagttgctgttctgacggatgagttgggtcttgaggttttaattggacctggaagtcgcccggcttcgtccaaacccacagttccagctcgttctaggagtcatttagatctagcttctaaacatttttccaggagaccgcaggggatgataaagatcccgatcaactctctgaatcattggttgaagaggaaagctgtgaggactgtgcagtgacagttcctcaaccttttgcagagtcatcctaagataaggtagtgtatacagatgtacaggttggctggtgctactcagtgacatcaacccaacacggtttcacaagaaggaatttgtggacggccatccagatacggtaaaacatcagaattaaagttattaggttattgctggaaacttgcaatccccgcaattccatggaaactgaaaaacatgctgaccgagtacagtgaaatactccactgtctgtggattttgagcaccattgcctaatatagatttgtaacaagtttgttcgctcaagatttg

SEQ ID NO: 15196 - DNA, 2732 bp, Oryza sativa
  ref <308>: DATABASE ACCESSION NUMBER: AK065727
  ref <309>: DATABASE ENTRY DATE: 2001-12-06
gataccccacaaccagaacatgatagcgtcgaggacgcccgtctcgctccacagcctcctcgtcgccggcggccacggaaagcgatgcgtcgccggcgccggcggcaggaagcgcggccgggtgcagcgccgccacctcacgcaggcgctcgagagcttctggaggcacgctccccgccccgctcctcccgccgccgctgcccgcggcgaggccaaccgctcgtggcagccgccacccctcgagaaccctgcctttgaggagtattacaaggagcaacgaattgttcgcgaggaggagtgggatgacttcatcagtgtgctgcggaaaccattgccagcgacttttaggatcaatgccagctcccagttttttaaggatatttgctcaaagttagagaatgacttcaagagatatttggagagtgaggttagtgatgagtatggagaagatgctatcaggcccttgccttggtatccagggaatcttgcatggcatttgaacttctctcgaaagcaactgaggaaaaatcaagctcttgagagtttccatgagtttttgaaacatgagagtgaggttggtaatataaccagacaggaggctgttagcatggtgccaccattgtttctgaatatacaacctgatcaccatgttcttgacatgtgtgcagcaccaggctctaaaactttccagttacttgagatgattcaccaatcaaaagagccaggtttacttccgagagcactggtggtagctaatgatgtcaacgcgcaaagatgtgacctccttatccacaatatgaagagaatgtgcacagccaacctgatagtgacaaaccatgaagcgcaaaacttccctgattgccgtattgcaaatgacctttcagaaatttataaaaaagactgcaaacctcaaagattagaatttgatcgggtactttgtgatgtcccctgtagtggtgatggaactatccgcaagggtcatgacatgtggagaaagtggaactcaggcatggggaatggacttcatcttctccaagtagatatttctatgcgtggcattgccttacttaaagtgggtggaaggatggtttactcaacttgctcaatgaatcctgttgaaaatgaagctgttatagctgagcttcttcggagaagtggaaattctgtcgagcttcttgatgtttctaatgagctaccagaattggtccaccgtcctggacttagcacttggaaggttcaagataaaggatcttggtttcagaatcatgacgatgtcccttgtgataggaagaatgtaatattaccaagcatgtttccgtcaaataatagcatccaggaagggcaatctgtgtgtgatgacattgaagtcaacacaggtagcaatggaagcttctcaagaaacttcagcattgaaaaaaccaacaaagtttattgtgatacagatggaatttcaaatagcaacaccaccaaacattctgactctactcccaacagtacaagctcaaattttcctctgcatcgttgcatgagaattgttcctcacgaccaagacagtggggcatttttcattgcagttctccataaactgtccccgttgcacgagtgccagatggtggaggtgacaaaaaccgaagttcttgatgatgatgaatcgcttgaagaacagaaaaaaattagcatagatgctcatacttcagaagatagcaacttaactgaagttgctttggttactgatgatgtaaaaaatgatcaagctgaatcagggaatagaatgaataagttgcaagaccaatgcaagtggaaaggggttgatcctgtattatttttcagagatctaacggtgattaaaagtattgtatcgttctttgcgatcaatatatcttttccacttgaaggtcatctggtaactagaagtgccgatcctaataatgcaaggaggatatactatgtatcaaaatcagtccaagaaattttgcaactgaacgtagaagttggagagcagcttaagattgcatctcttggcctcaaaatgtttgaaacacaccgatcaaaggatggttgtccatgtgcatataggctatcgtacgagggcttgccattgctgcttccatacatcagcaagcggatactctgtgcatctccaaacgatttcctgcgccttttacagtacaggaccgttaattttgctcactttattaatgccagatttggggaggaagctgcatcattgatacctggttgctgtgttgtaatcttacgtgaaggtcatcagaacctagatttaggttctataaccatggatcccaccacaattgccatcgtttgctggagaggcaaggcaacactgaacgccatggtttctccacctgatcggaaggagctgcttgagaggatcacacaacgcttcgggctcaaagcattgagagtggaggaagagaacccccgacggcaaaattaattgatggatgatcaacgttgtcacattgagatggatgatcaagaagtcgtgaggacagcaaaacggagctgacacgggtgatggtatagtgtggtggtttaactcatactcgctccgtattaggaaagaaagttgttttggacagtgacatggtctccaaaactagctatgtgataaaactagcttgtgctatttctgagagttacctttggtatagtgtggtggtttaactcatactcacgcagtattcgtaaaggaagtcgttttggacagc

SEQ ID NO: 15197 - DNA, 1223 bp, Oryza sativa
  ref <308>: DATABASE ACCESSION NUMBER: AK065728
  ref <309>: DATABASE ENTRY DATE: 2001-12-06
ggtttccgtgccttttccctcttcctcacctgcctgacctggcctggcctggcccccaatcaaaaacgagcgacctcaaccgacggaatccccaaccccaacccccaaaaccaatccgccgccgcgctgcctcgcctcgctcgtcgctcccaccaccaccacaaacccgcgcctcctccgccgccgcacgcccgcccgccgacgaatcagagtttggatttaatattacaggcgcagccatgttcaacaggctctttggtaagcccaaggagcaggccaatgctagtgcgttggccacgcttgataagttaaatgagacccttgacatgctggagaagaaggagaaagtcttagagaaaaaggcagccgcagaactggagagggctaaggagttctcaaaagcaaagaataaaagagcggctatccaatccttgaagagaaaaaagctttatgaacaacaaattgagcagctagggaacttccagttgagaattcatgatcagatgatcatgttagaagctgcaaaagctacgacagaaaccgttgatgctttgaggactggagctgcagctatgaaagcaatgcaaaaggcgacaaatattgatgacgttgataagactatggatgaaattaatgaacagactgaaaacatgaaacaaatacaagatgctttgtcagcccctcttggagcatctgctgattttgatgaggacgaactagaggcagaactggaagaactggagggagcagaattggaatctcagcttctcgagcctgttgcagctccacctgtgcatccagtgcaggtcccaggcaccaggataccaactcgccctgctccacagaaagcatcagctgaggaggatgagcttgcagccttgcaagctgaaatggcattgtgatcaggttcacaatgaagagacgaaatgtacaaatgattggctgtgctctacggaatttcaacgagtctagctacaatataatttcccatgtgtgtacaatctttggggatagtcagcaatcaaagagagatgctgcttcagtccagtactccagtgttctgttttagtggcttggggggtgtcgtctgttttccttgcacataatttaagttaatctggcacagtaagctccaagctaatccatagtcatgcaatgtgcattgctgtcgcacaatatttttcattgaccatgaagccgtgtaaaacaagttgaagcgattg

SEQ ID NO: 15198 - DNA, 3674 bp, Oryza sativa
  ref <308>: DATABASE ACCESSION NUMBER: AK065729
  ref <309>: DATABASE ENTRY DATE: 2001-12-06
tgccgtagctagcgtgctgcgctcattccacaaagcaaagcaaagcgaaggaaaacaaagggaagagaagactgaagaagaagagagggagagtaaagctgatagcctgatactgaccaggaattggattaggctagctaacagcgcaagaaaagcctccgattcctttcgtcgtcgccggattgcagaaaggatggacagctcaaggttgcaggtcccaacgcctgttcacatggtcaagaacatgttctgagtaatctgttggctcttcttgtatgtgacttgctgagtgagagagaggagaggaggggagaaagagagggccggttgctggagcttctcttcatgatctctgcattcccagtgtttctgaaatccggctagcggtgaactccctgatgaactgaacaatcaatagaagatacaagaaaagttatttccactacagaaagaacgctgattatctgaaatgggaaggcgaagccacaagcggtccactgaacaagaggaaaacaatgtaggctgcgtgtggggcctcatgcgcatgctttatttccggcgtgatgcaaaattcttattggatacaaagcaagtgagcaggaggcatacgttccgggagctggcagacggaaggcattcagttaagaattccagtgattttgtggaaacagatgatgatgatgataacaaagaagaatgcgcttcacagaaacgaacagtcaaaaaacttatggaggacgaattggggaaagtaaatcttttgaaaaaaattccaagcaatgagattcaaagaggattacctgacttgggatatgatgtctccctagatggaggctcagagcatacaaataaaccagtggcagccttaaatcagcacacggacatcttcgcgtcttatttatcgggatcagtgtattctcagggttccaagagcttgaatcattctgaagaatatgatcttgaatctgtcttggcaaattttttaggtgaaatttataggtgccatggtgaatgcccgcatggtgattgcaagaataagggtgaattgtgtccttcactgaagtccttaatccataacaagctcaatgatttaaataatccccatgccactcatggtaatgagcaatctccagagagcaagggagaagggctactgggtgagaatagtcgttctaacagcagggcagctcaattcaaagaattcaaggatgcggtagaaatactgagttcaaacaatgaacttttcctgaagctgcttcagaagccaaattcacatatattagacaatatccgaaaataccaaaatagcaggttaacaaccaagttagaacctgacaaaagtcttggacggtctagtattcttgaagagaaaaggggctcaaatcatgagttggctacaaaagcacagggtaaagagaccaagcatgtgttcttctggagaaaggataggtcagatagaaagcaaaagccagaaagagccaatagaccccagcctgttagcaaaatagttatactaaagccaaatcaaggaagacggattgatgagacagagactacaagttcaagatatttacatcagcaaccatgtacatcgcaagctccagaattcagtggaagggaaagctcaaaattttcaatcaaggaagtcaggaggagattcaaaattgtgactggtgacagcaaaagagagaaaaatgcaatacctgcagagaaccttccaggagattcacatcagctcaaagattctgtcgttgaagataaggatcctagacatctcactgaagggagcttgccagacaaagctgcatcaaattttaagaatggaatcaaaccttcagccagcagtaagcaaaagcaacaaaatgacagccagagtgaaatcagtgatcatacaacaggagcatctatcttctatgagaaagccaagaagcatttagcagatatgctaaagaacactagtcaatctgccagctatccgacagcccaagtatcaaaatctttggaaggaatgctttctcaacctcattacaacgtgtcacctcctaggagtgaccataggggaaaatgccacaatgccttctcacctgaagagccagaagtttgtcttgtaaaagctgttgatgtagaagaaccagcccaagagagaagccaactgcatgataactcagagagcaatgcatatagtactagtgtagcagttgatgatcaggtggcggttctagaagaatgtggcatcaaagaagacacccaagaaggtatcatatatgctactgatgaggtagacaccgtgcctgttgaaggagttggcaaattggattgttccaaaacaatttgcaacatacagtgcatcccagcagaacaatacacagacagccccttgccagaaatattagaaggaactgaaggaaaagaacctgttcaaatgttcatgagctctcctgagagcatggttgaaaatttggagcaacaagatccaaaaacacctgaaccaaaatcatcaccaaaattaccagatggttgtcctgagcaaagcaatgagaagaaagaacagccaagtcctgtatcggttcttgattcattcgatgaagatgacagctctcctgaatgcaaaacaatgaaaaaatatgagctgcacgaagtttcctgtgggaccctgtacttcccagataatgaatcaggtgtaaaggtcttttgggaggataagaatgccaggttagattatataatgctggtgctagagctctcagaattatgtgcagagcaaaatttagaggtgtggtatctagaggatgaattaatcagcccttgcatgttcgaagaactacagaatcaaggggaccgaatagatgatatgaagattttgtttgattgcatctgtgaagcactaacagagatccaagagagatattttagactctcttcttggttatcttttgtcaaacatgacatacggacacctccggtaggagaaaaactcatctcagaagttgacaaatatgttgatggttatctcaagtgtagtttcccaagtacattggaacagataattaaaagggatttggaggttcaggcatggatggacattagatcaaagacagaaggaattgtcgtggagatatgggagtttgtgttagatgaattgatagatgaggcggtttttgatttgtggatttgaagttctgatcagatcccttatcagtgttgctttgtgacgagtataggcagtatgtagatgaactgtagaggttttgattttgatgctgacaataacccattttatgcggaagaataacaagggcactatgttctggcggcccaaggaaagtatcatgtgattggggagacatttactggtccaaatgtctgactggagtggacagtttcttgtgaatgacagctgaagttacaatgctgtgaatatctgacttgttcagtttgtttggatgaaattggccagtctgtaacagccatgcctctaggcacccaggcatacagcagtccgaatttttctcttgtccattgtgtgcatgtttgtgaaccttaccccgatacgcttgtcaacaaagagggctagatcacttcaatgtacatgtttgtatttgtaagtacatgtgtaaaaggctttctaaacaaatcacacaatatacatttccactgaggttttttcttttccc

SEQ ID NO: 15199 - DNA, 1111 bp, Oryza sativa
  ref <308>: DATABASE ACCESSION NUMBER: AK065730
  ref <309>: DATABASE ENTRY DATE: 2001-12-06
gatcggcgaagcaaagcgcaccacgcacacggaaagagaggagaggtcacatcgcggcggcggcggcgaggatgttggcggtgtttgatccgacggtggccaagtgcccggagggcctccggagcccgccggtggccggcggcgccgtggcggccggcggcgcgggcgcgctgatgaagggcttcgccggagcgcacgccgacgcggtcaccgtcagcctgggccccgccggcgccctcgcctactcggcggccaaccagagccccctcgtccccaggttgtttggtgctgtgaatgacatattctgcctgttccaaggacacattgagaacattgccagtctgaagcaacactatggtctgagcaagacagcaactgaggttaccatcctgattgaggcctacaggaccctcagggacaggggccctctcccagctagtcaggtcgtgagagatctcagcgggaagttcacgttcatcctgtatgacactctgtcaaaatccaccttcgttgctgcagatgctgatggtagcattcctttcttctggggcgttgactccgagaaccaccttgtgttctctgacaatgttgaccttctcaaggcatcctgcgggaactcgtttgcgccattccccaaaggctgcttctacaccacctctggagggctgcagagcttcgagcacccgctgaacgagctgaagcctgtgccgcgggtcgacagccagggccagatgtgcggctccaactacaaggtcgacagcgaggccaagaaggactccgggatccctcgggtcggcagcgccgcagactggtccaaccatttctgaggcaaagataccattgagatggcttccattttaccatttcggcatttccagttgtggactctgccctgtatgtctgatgctgaagtactcaagaaccactcctgagacgacgcgctaggttttactttcaggcgtccgtaaaactcttctgcaaacattcagagcattgctatctttctacgtcatagtactgaatactgatacttatgtaatctgatgataccacgttgtggttgaggtctatctctcgtgttctgataaataaagctcaatgaaagcttcag

SEQ ID NO: 15200 - DNA, 3405 bp, Oryza sativa
  ref <308>: DATABASE ACCESSION NUMBER: AK065731
  ref <309>: DATABASE ENTRY DATE: 2001-12-06
ggcgtgaggacgattttcttgcaatgccgttgaattggtactagtagtataagagaggtgggggttttgatgctcatttcttgggtggattggggggagtgcaggtggggaggagatatgggggcggcggaggaggaggcggcggcggcatgggacaaggcggaggccaaggaggagaggataatggtgtcggtgcggctgcggccgctcaacggcagggaggccggcgacagctgcgactgggagtgcatcagccccaccaccgtcatgttccgcagcaccgtccccgagcgcgccatgttccccaccgcctacacctacgatagggtgtttggtcctgattcctctacaaggcaggtctacgaggaaggagcgaaagaagttgctctatcagttgtcagtggaatcaactcaagcatattcgcgtatgggcaaacaagcagtggcaagacttacacgatgaccgggataaccgagtatagtgttctcgacatctatgactacatcgaaaagcatcctgaaagagaattcattttgagattttcggcaatagagatatacaatgaagctgtgagggacctcctgagccacgacaccacacccctcagacttcttgatgatccggagaaaggaactaccgtagagaaactcactgaggaaaccttgagggacaaggatcatcttaggaaccttcttgctgtgtgtgaagctcaaaggcagattggagaaactgctttgaatgaaacgagttcaaggtcccatcaaatactcagattgacaattgaaagttctactagacagtatttgggaagaggcaactcaagcacccttgtagcttgtgtgaactttgttgacctagcaggaagcgagcgtgcatctcagactgcttcagctggagtgaggttaaaagaaggtagccatatcaatcgaagtcttcttacactgggaaaagttgttcggcaactcagtaagggaagaaatggccatatcccctacagagattcaaagctgactcgtatattacagtcttccttgggaggcaatgcaagaactgctattatctgcacagtgagccctgcacggagtcatattgagcaatccaggaatacactattgtttgctacttgtgcaaaggaggtagttacaaatgcacaggtcaatgtagtgatgtctgataaggcactcgtgaagcatctacaaagagaacttgaaagattacaaagtgagattaaatttccggcgccagcctcctgcactactcatgctgaagcattgagggagaaggatgcacaaattaaaaagctggagaaacagctaaaagaattgatggaggaaagagatactgtgaagtctcaacttgactgcttgcttaaaagcgattgtgatgaccatagtgacggccgcgttgcgaagcgatgggatgagcatagtcgttcctcagagtcttttgcacggaatgcgtctgaagaagcattttcagtttcagatacttctggtgttccttaccaggatcaagataatgctgtgtttaatggatcctatgtcttcagtgatgaccgtgatgatattgtattccctgttcaaacagtggatcttcctgaagaaacaaagcatgaaaaatttatgtcaccttggcaccctcccagccaccatagttcttctgattgcatagagtcatatcatatgacagaagcggcttccagaactgcatcagaagtctctgaagagcattgtagagaagtccaatgcatagatatacatgagcatagaagaagcacaagtcacaaattcgaccttttgctgccccaggacaccgagttccaaacacctgaattagagatctccaaagaagcagtccctcaacctgatgaagaccaagaacttgagagcataacaaacagaatggaagatcctaccaggatgtgccctgtcgaggaggagcaacaagatgagatcgtagatacatgtgaatctaatggtaccacagacaatgatgtcaagctatatacatgtgattctaacatttcttttgacattcagaaaccttaccctaatggatgtctgactgtaaaaaggtgtatactgagctccaaggatagggcgttgtctagaagtaaaagctgcagggctagctttatgattattccaaatagttggtttgatgattccgagtacaccagccagacaccacctaatgaaatcttgaagcataccccaagaaggtttgacaaggttaggagaagcttgtatccagaaaatgataacccttcttcagtagaccgttctgagttttctggtgaagtttcttctgatgaagtagtgaaggacatgagcaccattgatgaagtagccaaagacatgtgccccagcgacgcagaacaagaaactctcaccagtgacatcagttgtctcaccaagttgaagaagactgatagtgaccatgaggatgaacttgatgagtatcaggatcagcagtctattagagatggatctacaaccttgagaactgtcaaagatgttggcatagattcatcactgagtgcctctccttctcgttggcctattgattttgagaagatgcggcaagagattattcagttgtggcacgaatgcaacgctcccatcgtacacagaacttacttcttcctcctcttcaagggagatccagcagataacatctacatggaggtggagcacaggagactgtccttcattaggaggtccttcagtgccagccctgcaggaggcgagcttaattctgccgtcgtatcaagcctgaaaaatcttcgacgcgaaagggacatgctctacaagcagatgcttaagaagctcaccaatggggagaaagagcgcgtttacgctagatggggaatcgatctgagctcgaaacagcgaagattgcagctatctcgtctcgtctggacgcagaccgatatggaacacatcagggagagtgcatcccttgttgcgaagctgattgagctgctggagccagcacaggcactgaaggagatgtttggactgaacttcacactagctccccgatctgaacggcgatccttcggccttctaggtacctgaaagaattgcacattgtgaccggcaaaacgatggcccatacgatgacaatgacaacatggaggtagaagaacacgtagtacaggaggttgacttgtttggagaggaattgctccccagcactgatttcactgaagcttctgatgcttcccttctttcatttgtgtgtgtgtgtggttggtttctgatgtataatcatcttacagatatgaaccaatcagccatattgcagcgttacatatgactatccttgtgtcagtttgtctggggaaaattcatcaataaaattcttggaaggctcggttgggttgtatgctttctacatcg

SEQ ID NO: 15201 - DNA, 1767 bp, Oryza sativa
  ref <308>: DATABASE ACCESSION NUMBER: AK065732
  ref <309>: DATABASE ENTRY DATE: 2001-12-06
gaaaaggagctatgaaagaaagctctaaaaaaaggccatgagagaccttaaagattgacctgagatttgcacaggaaatttgcaacaacaacaacacaacgagatatatcaccttgatatatatatctgttgcaattgcaagaaaaattcttttctccccttgcaattattctgtgctcatctcaatcaagctagcatgctgagtagtggaggggagttgaagagctcctccttggtgcatcagatggtgtgggttggcacgggcaacagcagcagcagcagcatcatgggcagcttgaggcagctgccttgttctgaggagcaagatgcagcttcgtctccagcctacatgctcttcctcccccagcagctgctgcttcatgcatcttctaattcatcgccatgtctgaacattcctgaggtgaatctcagcactggtcttcatcctcttgggagcttccatggcgatgtgcagcagcaggagatcatcagcggcatgccagatcagtcatggagacaactgcttcttggtggattagttggagatcacgagaaatacagtgtggccacagctctcctgtccaaagggctagatgatgaggcctctatgcctcacgaggcatcagctgctgcttatgatttctatggacatggcggcggcgccggcgatgggatcctgcaggcatcgccggaggccagcagctgcaagtcgcagctgagccagatgctcctgcaggcggcggcatcctctcctaggtcatgcgtcaccaccagcggcctcggcagcagcatgatggatttctccaacaccgcggcggtggcgccggcggcggagccggagttgacgaggaaacaccatgcaggccagtcagataactcgtcggagtgtaacagcacagagacaggttcagctcttaagaaggctagggttcaagcctcttcttcagcgcaatctaccctaaaggtcaggaaggagaggcttggggacagaataacagctcttcaccagatagtttccccatttggcaagactgacactgcatccgtactgcaagagaccattggttacattagattcctcctgggtcaaattgaggctctcagctacccatacttggggcaatgctgctctgcgaaccccatgcaacagcaaactggaataatggcaggagaaaggagcactgatggcctcttcccggagttcccagctggccaggatgcagaaaaggatggaaagaagcaacaggcgaagaaggacgacgacctgaggagcagagggctgtgcctggtcccggtctcgtgcatgccccacctggccgccgacaacgacgtcgtcgtcggctccgacttctgggccgccgccggcggcggcggcggcggcggcgcgccgcccctcgccggcatgaacctgcggtaggccggccgggcctactgctacacgttcatcttcgatcatatgcacagacgacgacgacgacgcatcggtgaagttttggccaaattaatgcatccacgcacgtactattattttggttttgtttggtttcgtgtgattttaaacgatgattattttctccttatggcgtttatagggcttaattaattagctgtcgatcgattatcgaaatatacataccatcaggagcagtcaatctgtcatgattaaggctgattgctcttgatgctatgcaaagtatatatatgctcataaatatgtactattgcacacactttgctacgtatataatatacatttccttgctgttc

SEQ ID NO: 15202 - DNA, 2171 bp, Oryza sativa
  ref <308>: DATABASE ACCESSION NUMBER: AK065733
  ref <309>: DATABASE ENTRY DATE: 2001-12-06
gatcgttttgctccgctccgtcattcgaatctcgttttggccggaaaccctagttcgcttggagttggccggaaaccctagaagcgatggccgcggcggcggcaggcaaaggcggcggcgggcaggggcgcatccatcggctggaggtggagaacttcaagtcgtataaggggacgcagacaatcgggcccttcttcgacttcacggccatcatcggtcccaatggcgccggcaagtccaacctcatggatgccataagctttgtgctcggcgttcgatccgcccacctccgaggcgcccagctcaaggacctcatctacgccctcgacgaccgcgataaggaggccaagggccgcagagcctccgtccgcctcgtctaccacctccccgccaccggggacgagctccacttcacccgcgcaatcaccggcgccggtggcagcgagtaccggatcgacggccgtctcgtcacctgggacgactacaacgccaaactcagatccctgggcatcctcgtcaaggctcgcaatttcctcgtcttccagggtgatgtggaatccattgcctccaagaatcccaaggagctcaccgcacttctggagcagatctctggctctgacgagctcaggagagaatatgacgagctggaggaccaaaaaaacagggccgaagagaagtctgcgcttatttatcaagagaaaaggaccatcgtcatggaaaggaagcagaaaaaggctcaaaaggaagaggcagagaatcatctacgcctccagcaggacttgaaactagccaagacagaacatctcctatggcaactctacaccattgaaaaagatgcagagaaaatagaagctgaacttgaggaggataggcggtctcttcagcaagtgctggaagagaaccagtcctctgactatgagctttctgcaaaaaagaaggagcaaagtgggtttctcaagaaaatgacattatgcgagaagagtatagccaagaaaaagcttgaacttgacaagaaacaacctgagcttcttagattgaaagagcaaatttctcggctgaaatccaaaatcaaaagctgcaacaaagggatcgacaaaaagaaggatgatagcaagaaacatttggaagagatgaaaagtttgcagagtgctttggttgatgtcacaagagctattgatgagttgaatgagcaaggccaaaataaaagcgacaaactgcaattagctgatgaccaactccaggaatatcatagaattaaggaagatgcgggaatgagtactgcaaaactgagagacgagaaggaagtttttgataaagagcttaatgctggcgttgaagcaaaaaagaatttagaggagaatatgcagcagctgcgtagccgtgagaatgagattttgtcacaagagcgtgaattgcgtgcaaagcttaataaaattcttcattcaatccccaagcatgaagatgagcttgctcacttacgtgaggaacataacaaaattgcaaaggagcgccagacctcaggagttaaataccaaatgttgaagcagaggttggatgagatagatacaaaattacgagagctcaaagctgacaagcatgaaagtgagcaggatgctcgattttcagaaacagttaggagtttaaagcggctattccctggagtccatggtcgcatgacagaactttgtaggccttcacagaagaaatacaaccttgctgtcactgttgctatggggaagttcatggatgcagtagtggtagaagatgagaacacaggaaaagaatgcattaaagtacctcttttgtgacttttactcagctgattcttcaacatttttcttatatcgggagagctcattatattatctgcagtagtcaattgtaatacttattttttttttcaaagcgtacctttggaaattaaaatacgtagaacctcttttaatgaaataaaatgaatagcttcacgtgaactgtaaactgttgaaagaagtttgaactgattccattcaaatggatgtgacggtcacatggagggagagtttgtgagtagggcatttgatagatcaatatcatatttggggattctgttgactcacatccattcaaattagtcccatgtaaatttcatcaaataacttatttgagtaatattaagataacctgactat

SEQ ID NO: 15203 - DNA, 1256 bp, Oryza sativa
  ref <308>: DATABASE ACCESSION NUMBER: AK065734
  ref <309>: DATABASE ENTRY DATE: 2001-12-06
gggtcgccgccccgtctcctcgcttgccggttacaaggacgacctcgtcggggcggcggaaccctccagcctccgggctcgccgccgccgccaagctcgcatcccgcgccggccgccgagctcgccgcccaaccccaaccccaaatcaatcagatcaattcaactatccaagcctaagttgttggatctagaatccatggcgatcgtttacgcggtggtggcgcgtggcaccgtggttctcgccgagttctctgccgtctccgggaacgccggcgccgtcgcccgccgcatcctcgagaagcttccgcccgacgccgagtcgcgcctctgcttcgcgcaggaccgctacatcttccacgtcctccgctcccctccccccgccgccgccgatggcctcaccttcctctgcatggccaacgacaccttcggaagacgaattccctttctttacctcgaggacatccaaatgaggttcatcaagaactatggcagaatcgcccataatgcgctcgcctatgccatgaacgatgagttctctagggtcctccatcagcaaatggagtacttctccagcaaccccagcgccgacacactcaaccgtctccgtggggaagtcagtgagatacatactgtcatggttgacaacattgagaagattctcgacagaggtgagcgcatctcgctactcgtcgacaagacctccaccatgcaagacagtgctttccacttccgcaagcaatccaggaggctcaggagagctctttggatgaaaaatgccaagcttcttgctgtgttgacagctgtcatagtacttctactttacttgatcatcgctgctttctgtggaggcctttctcttccatcgtgtagatcatgatccgctctacagatttacctcaattaaagcatcacaccatgtaacaacaatgcaagtctatcaatgccatgtgtcgtatctgttcagcacccaaagttacaagtgatgttttgagaaaatgatttggtgctgagttttcgttgtcgggagggttgtgctccttcaagttaatatggaacggtttgtacaaaatgggatctatatgtacagtagtatgtcgtttgttgtttgtgttggctaagacttttctgtaccgttgtgcttgcacatgaattggatgttttgcctggtgatatgagtgctgtggtatgccctttccttaactaaagcgaatggcatgtaatattctcaagagaatatatgaatatggtttatgagt

SEQ ID NO: 15204 - DNA, 1742 bp, Oryza sativa
  ref <308>: DATABASE ACCESSION NUMBER: AK065735
  ref <309>: DATABASE ENTRY DATE: 2001-12-06
gatatctagaaaaacagaaaaagaatataagggggaagacttgggccgccgctaaccctaacccctggcgacggcggccgatcgtcgtcgacgaagtcaggcgcggaggctgcgaccggattagccggtcgcccctggatttggagctcccgtgtccgtgtgggggcaatgctagcgcgggcgtttggcctcgtgggcaaaacatggaagcgaacgccgactatgtccgtcgaggcttccgcctcgccgcgccgccgctcccagatgccacagcagcagctttgtcatctccacggcagcacgccgtcacaacggcaaaagttccccgaagaacagctcccgggaggagctccgccaatgctggactatatctccgaacagaacttaagcaccgtagtaatggcaacatggagaattcagctgttgctgctgtcgactctaatggataaccttgctcgcttctgaacttcaatattgaactaagctttgtaaggttggcatgctaaattagttgtttacattcagggatactgttgaggggagttttgacctgaggtttgcagcactgaagagcattggggaggatcgggtcaacgatcgtgagcttaagttactgctaaagaagaaacatgcccccatttgttatgtttggtgtgatccatgcccctggatgcacatttctcaggtacaatattgagatgtggaaagcaactggcatggctcttgataaagtagatctagtctggttgtcagatgaaatacgtcaacatggtgatgagtactggccaattgtcatggatattgcaaggacaaacagtgtgcgtagaataaaaagtacatgcaggtcctcttattactgtttacctagcagattttgtgggagtagaaattcttatgcgattggaaaattaaatgttgatgagattttttacatttgcttgcagtgtgctagcatattatttcagaaggcagacatatggctgttgggaatggaacagcatgatgccaacttattagctagacaatattataagcatttcaaaaagaagaataaggcaattgctgttttggacaatatgcttcctaatttattacaataccctcaaatggagaacaggaggcatccagcttgggctatcttcatggaagatgataaggaggatatatgttttaaaatggaaaaagctttctgccctccaaaactagcagaaggcaatccatgtttggagtacataaaatatatcatcttgccttggtttggaatgtttgaggtggtccagaagaaagggaatggtggcaaaaagacttttctgagcatggaggaacttacagctgattatgaaagtggcgctctgcatcctgctgatgtgaagctggcccttgaaaagtcattgaacgagatattgcagcctgttcgtgatcactttggaaggaatggtgaagcaaaggatctagtggaagctatcggggaatgctacggtgctgactgatattacatgttcactcttggacttaggagtagtgttcttatctttggccatgtaatgaacaaatcaatccctatctatgagcagtcttagaggttccttttgtgccacaaggtcatcagttcagtgcttgctctttcctcgtgggtgtgttagaagggtgtctttttttttcctcatcacaaccttgtttcttgtattttttacctgctatatgaatatgaaacctcccgctgtctcgtgcggttagttccc

SEQ ID NO: 15205 - DNA, 898 bp, Oryza sativa
  ref <308>: DATABASE ACCESSION NUMBER: AK065736
  ref <309>: DATABASE ENTRY DATE: 2001-12-06
gctccgcagctcacacaccgaaacaacacacatcgccactagctccctcgatccgattcggatcggatccatggctaacctcgccgcctccctcctcttcctcctcgccgtcgcgtcgtccgccaccgtgccagcgcatgggcgccgcgacctcctcccgactcgcatcaagctggtgaggggagccgacgccggcgccggcgccgtggccggcggggacaagatggagtgcgtgtacacggtgtacatccggacggggtcgatctggaaggccgggacggacgcgaacatcacgctggagcttgccggcgcggacggcaacggggtggggatcacggacctgccgtcgtggggcggcctgatgggggagggccactcctacttcgagcgcggcaacctcgacatcttcagcggccgcggcccgtgcatggccgcgccgccgtgctggatgcgggtggcgtccgacggcaccggcccgcaccacggatggtactgcaactacgtcgaggtcaccgtcacgggcgcgcacaaggggtgcgcgcagcagctgttcaccgtcgagcagtggctggccaccgacgccgcgccctacaagctcgaggccatccgcgacaaatgctccgccgcaggagcgggcgccgccgcggcgtgagcgagtgacgcggccacgccgtgggaaataagctcgtacgttatctgtggtgagtggcatctgtagactgtgggggggtgttcatgttttgatttgtaaagatggtaatccgcgtgcgttatcatgtacggtggatgctacagactatccgactaataactttgcgagtcgccggtgatgaaccggcgttgtgtttcctcggttacgcatcgtcgtgccgcctcgtcatacagaacaaaatggagg

SEQ ID NO: 15206 - DNA, 1174 bp, Oryza sativa
  ref <308>: DATABASE ACCESSION NUMBER: AK065737
  ref <309>: DATABASE ENTRY DATE: 2001-12-06
ggccctcttgccgtttgtctcactacaacctcgtcttcttcgtcttcctccccgtcgagaatcccgcagccgcggcaaaggccaccatgagagccgccgccatccagacccacgccctcgtatgcgcgccaccgggggccgccgccgccgcgctggccccatggccgcggcgcgctgccggcggcggcgggggaggacccctcctccaccaccaccggctgaggagcgacctgccccacacgcgctccctcccctgccgggctcgctcgccgtcgtcctcctcgtcgtcgaatgtgaattctgggagaggggacgacgcggacaacctgctcgaggatttgctcagcaagcatggcgaggtggtgtacaacgccggtggggctccgggcattgatgccgacgatgacgccgagtgcttgtcctttgctgtctccctagctaaagttgcaagcgaggtgaaggctgcggatattcgtgtactatttgtgaagccgctcgtttactggacgaggttcttcatcatcctcactgctttctcaaatgcacagattgatgctatcagctccaagatgagagacatcggtgagaagcagtttagcatagttgcatctggtgatacaaaaccaaattcatggaccttgctggacttcggcgatgttgttgtccatatatttcttccgcaacagcgagcattctacaacttggaagagttctatggcaacgcaacctccattgaactcccttttgagaagcagttgcagtgactgctgttttcatcttctcctggagaaattgcaggtttccacaaaaaccgagcagcattgcgccatggattctccacgtcttcctgctcatatgtgacgaactgctcggagctatagatttgcatggtctaactcgccaatgtcacctggtgactgctcgccaagttcagaagtgaggcaccatgatgccaacattctccttatctgttgttagactacgtgaatcattgtattaactatcacattagagacgataattattggtgccaagaggagtagaggccaagatgtaacacattgtgccagttcagatttcagacgcgaggatgcagtgtgcaagttcaacttaggcatcctttggaatgaaggaatttcaagggatctttgtagtatttggactaaattctatc

SEQ ID NO: 15207 - DNA, 2180 bp, Oryza sativa
  ref <308>: DATABASE ACCESSION NUMBER: AK065738
  ref <309>: DATABASE ENTRY DATE: 2001-12-06
gacgcccagagaactcgtcgcgccgccgccatcctccatctccggcgacggcggcgctcggacggcgagagggttaggattcgccgaagtgggcggaggaaacccccccccctccacggggaacccgccgccacgacgcccgtcaccccccggcgcgcgcgaggcacgcgagcggaaggaaggacgagatgcggagggcgatgatgggcgtggacgatctgatcgaggaggcgaaggtgcgcaccgtgtggtgggcgctctgcgtcttcgccatctcctacttcctcacgcatacgagtaaatcaatgtggacaaatgtgcccatgtcaattcttatacttgcgtttctccgatacctttcattcaaagtggaattccattggagaggccagcctgttcagaagcagacacatttgtctcaattgtcaaaacgacagttgtctgctcatgatcatcggctttcaactgtggcaccggtttcaagatggagaaggaaagttggttcaccttctgttgaggctgcttttgaaagtttcattgagaatattttgagagactttgtggtggacttgtggtattcatctattactcctgatagagaggccccagagttgatacgtggtctaatacttcatgctcttggagaaatatcaggcagggtgaaggaaatgaatctagttgacttgctaacaagggatatggctgatttgataggacaccatttagatattttccggaaaaatcaatctcaaattggtgttgatgttatgggaacattgtcatctgaggaaagagatgagagactgaagcagcacctaatagtttcacaggaactccatcccgcattgttatcttcagagcatgaatataaggtttttcaagatattgttgggggtataatggctctagttttaagaccgcaagatgctcagtatggttcaaatgatatcaagctcaatgaagcatattctggttttgatgcacaagcaagccaacaaatagagaaacctactagggcatattctgattcttcaaacatgtcttctctaaatacatttgaagatccagcaggaattcctcctgagtggacgccaacaaatgttagtgttcatttgttgaatctggttgacaaggtgttccaactaaagcggcgtggttggataagaaaacaagtactctggatatcaaagcagattttacagttagtcatggaagatgcaattgatgaatggattttaagacagatcaattggctccgaagagatgaagttattgtacaaggaatacgctggattcaagatactctctggcccaatggtgttttcttcaccaggttggatggatatcaaggaaatgcaggtccaagccaatttgataagcacccatctgggagtgctaatcaggctagtggcaacagaaaggatagtgcaagctcttttgaacaacaactggaggcatctagaaatgctagtgaagttaagaaacttcttctaggtggaactccgccgacattagtcagcataatagggtacaagcagtaccagcgtagtgcgagggacatttactacttcctccaatccaatgtctgtgtgaagcagcttgcttatgcaatgatagagcaggtgcttgtgtcgctcttcccagagcttcgtcagctaatagaggacatacatgagaaaggtcgtaaggagcaagcgtcattcacttaccaactttgactgaaaagacgtcttgatccttcaaaaacctggtactgcacaaatggcctttgcttgtttcttcttttactctggcattttgcccatggcgaagctgcctggcacgcaaaaattttgcagatggatttcaacagcgtaaagttggattgaggatgcagttgttgattatccaaccaaaactatgtacagatgtatatcagaagctgtgtaaattagtcctctaatgcataccaagaactacgttcttacagtgatctctgatagtttgatgtatcgtatcattctttaattctttttctctcctcaatgtattctagtcgttcctagctctcttggctgaggtttgtaaaaatatcgaatgttccaattgtataggcgtaccgtatatctgactgtccattcttcagttgaagaactcaatccatgcatcttggcaagatagcaatcaagaacctttgactg

SEQ ID NO: 15208 - DNA, 2923 bp, Oryza sativa
  ref <308>: DATABASE ACCESSION NUMBER: AK065739
  ref <309>: DATABASE ENTRY DATE: 2001-12-06
gtcggaaagctgaaagctagctgagactgagtgccagtatcaagcagaaggaagctaatttaagagaagatcagagtgaaccatcgtcatcaatggcgccggccgctcatcgggatggcgcggcggaggcggtggggcagagggtgttccacttcggcaagggccggagcgacggcaacaagaccatgaaagacctgctgggtggagggcaacatgggcgccgtcctcggcgacccgcgccgcccgctcctcctctccgtccgctccggcgccgccgtctccatgcccggcatgatggacaccgtcctcaacctcggcctcaacgaccacgtcgtcgccggcctcgcccaccgcagcggcgagcgcttcgcctacgactcctaccgccgcttcctcgacatgttcggcaacgtcgttatggacataccgcattcactatttgaggagaaaattgaagccatgaaagcagctttaggtttgaggaatgacaccgagttgactgccagggatttgaaagaacttgttgctcaatataagaatgtttatgtggaggccaaaggtgaagaatttccctcagatccaaagaagcagctgcatttatctgtgttggctgttttcaactcatgggacagcgcaagggcaaagaagtacagaagcattaaccagatcactgggttaaagggtactgctgtgaatgttcagtgcatggtctttggcaacatgggtgacacttcaggcactggtgttctctttactaggaaccctagtactggagagagaaaactttatggtgaattccttgtcaatgctcagggtgaggatgtggttgctggaatcagaactccacaagatcttgataccatgaaggattgcatgccagagccttatgcagaactagttgagaattgcaaaatcttggaaagccactacaaagaaatgatggatattgagttcactgttcaagaaaatagactttggatgctgcaatgcagaacagggaagcgcacaggcaaaggtgctgtgaagattgctgtagacatggtcaatgagggactgattgaccggcgttcagcaattaagatggtggaaccacggcacttggaccagcttcttcatccccagtttgagagcccgtcgtcatatggagacaaagttattgctacaggcttgcctgcatcaccaggagctgctgtaggccagattgtcttcacagctgacgatgctgaagcatggcatgcacaaggaaaatctgtcattctggtgaggactgaaacaagcccagaggatgttggtggcatgaatgcggctgctggaattcttacagccagaggtggtatgacatctcatgcagcagtcgtagcccgtggatggggaaaatgttgtgtggcaggatgctcgggtatccgtgtaaatgatgctgagaaggtggtactggttgccgacaaggtgctttgtgagggtgaatggttgtcactgaatggttcgactggagaggtcattttgggcaagctgcctctatccccaccagcacttagtggtgatttgggagaattcatgtcttgggtggatgaagttaagaaactcaaggtcaaggctaatgctgatactcctgcggatgcactgactgcaagaaataacggtgcggaagggattgggttgtgcagaacagaacacatgttcttctcttctgatgaaaggataaaggccatgagacagatgataatggcggaaacaattgaacacaggcagatagcactagatcgcctcttgccatatcagagacttgactttgaaggaattttccgtgcaatggatggacttcctgtgactattcgactcttggatcctccactccacgaattccttccagagggtaacgttgaggatatggttcgtttgttgtcttctggaaacgtatatactcaggaggaaattcttacaagaatagaaaaactttctgaagtgaatccaatgcttggcttccgtgggtgcaggcttgggatatcatacccagaattgacagcaatgcaagcccgtgctatctttgaagctgctatttctatgactgaacaaggtgttaaagttttcccagagataatggtgcctctcattggaacacctcaggaactcgcccaacaagtagatgtaattcgtgaagttgccgaaaaggtttttgcaaatgcagaaacaaccattagctacaaaattggatccatgattgaggttcccagggctgctcttatagctgatgagatagcagcaatagccgaattcttctcgtttgggacgaacgacctgactcagatgacatttggttatagcagggacgatgttggcaagtttctgccaacctacttgtcaaagggtatcctccagaatgaccccttcgaggtgtttgaccagaagggagtgggggagcttgttaaggttgccgtagagcggggccggaaggcaaggcctgatttagaggtgggcatttgtggggaacatggtggtgagccttcttcagttgcatttttcgcgaaggttgggctgaactacgtttcttgctccccattcagggttccaattgcaaggctagcagcagcgcaggtgatgctgtgatcggcgagtactaatgaagcaaaccgttggtgcatcttgtaaatatacgaagagtaaataatgcttaaataatttatgttacgatggacactcgcaacatgctttgcttgacgaaatgtatgatgacctgcaaatggaggtttgcatgtgtataaataatattttttgtttgtgtgcccacggtaattgctgccataaacatcaaacagctatcagaggttgcatgttaaggcacctgaaataattgtaatttatttcgagaattactcaaatgaaatgtcatgtttttttgtacctatttattgaggaaatgttttgc

SEQ ID NO: 15209 - DNA, 1588 bp, Oryza sativa
  ref <308>: DATABASE ACCESSION NUMBER: AK065740
  ref <309>: DATABASE ENTRY DATE: 2001-12-06
gaatcttatagtgggtcccacatgtcagtctctattacttctcccctttcccacatgagcccgcgtgcatgcggatgaggcggccacggaaggaggtcgacgaagccacggagggggtcgccatgcaagatcggcggtggtcgagacggcggtgggggctgcagccagagctccaaacggcagatccggcggcggcactcggcgggggattcggcgggcggatccggcggtggcactccctcgttgactcccctgtgccgtcggcgggcgaccgagcggacagatggcggaaatcggcggcgaagacgacgttgctgctgcttgcaccagcgagaggcggcggcgatgctgcgcctactcgtgccggcaagctcggcagcgagcgggcatacctctccatcggcgacggcgacgaggagtaggaggcgcatacgacgggaggcgacgacgatgggagtcagcttcgacgaggatttggccgccgccgccgccaccaagattggcgcctccgtcgtgccatccccgttcgccgccgctagctgctttgccgaggcgtgcggcggtgccgacgacgggcgccgggctgagaagggtgtggagccgaggaatccgggcggctgcgacccgcagcgccggtgggttggcgagacgacgctggtgacgaggagagcacgagtcagggacgcggaccggtggttcgacgcctcctccgagttcgacgccgccgtgccgcacagcatcgatgctgcgccgggaggacagcagcggtggcgctaggcggatggggcggcggcgctaggtgaatagggcgctgggaggatgacggcggcaacactgggaggatggggtggcggtgctgggcagatgggacgccgggaggacgtccggcggcggtgctgggcggatggggaaagggggagagagaggatagaggaggtgggacccacaccagatggcaagccgtcctggctagccaactttggtcaatgaggttgggaatttagccagtcggatggtttggagagccatttggctagtttgttggagtaaattttttatccaatttagctaaattttagcttggagaaccatttggctagtctcttatagatgctctagatagtggggcgggaaatgagaggcggcaaggagggaaaagtggcgggatgtgaaactttcagggctctctttcccccattccatttcctcgatctgaaatcaatccccacacaaaacacccacaccaaaccaatccccacaccagcagcccttcccccatccacaatagccatgatgcatcgcctctgctgcttcattgtccgtacgccgcctccaacgagctaagtgttcctgctcaacgacccaggaaagctttggacggagcacgagaagcacgaccttcacgcccctggctaagtctggcacacatggagaagagaagagaaaagaagagaagaggagagaaggaaaaaaggctattatagctagctacagcacgaacttcaatacgttatgtgtgtatgagatgtgagaccatatgttaatgatttatagataactaatgtatgaatgagctgttatattggct

SEQ ID NO: 15210 - DNA, 2740 bp, Oryza sativa
  ref <308>: DATABASE ACCESSION NUMBER: AK065741
  ref <309>: DATABASE ENTRY DATE: 2001-12-06
gatcccccctccctccccttcttctgctctttcccctctcccccacttctctcgtcttcctcttcgactcttgcagtttagtccactccattcccaccaaaattcctctctactcccaaattccccccacccctcccggcgaattccccccctccgccgctcgattcggcgctcgaatccgccgtctccgccgccaattcgctcggtccggcggttcgctgatccactctctcgtttttttgttttttttttaccttcttacgcggcgattcggggtgtatgagctcggtttcgcggcgggttggttgatttgctccgccgcgtcggagggcggcggcgcggggaagaggggggcatgtgggtttcgctggtctggatccgtgggtgcgtgggcgtcacgttcgtcgactacttgggcgggagggaagccgagtagatccttttacgcggtgtgccggggagggaggtggtggttgaggttgaggttgacgaggggttctagggtttcgggggcggggggccatggaggctgcccgggtcggggcgcagagccgccacctgtacggcggagggctaggcgagcctgacatggacaggcgcgacaagaggctgttcggctgggacctcaacgactggcggtgggacagtgaccgcttcgtcgctacgccggtgcccgccgcggaggcgagcggcttggcgctgaacagctcgccgtcttcctccgaggaagccggggccgcgtcggtgagaaatgttaatgctagaggtgactccgataagaggaagcgggtggtggtcattgatgatgatgatgtggaggatgacgagctggtggagaacggcggcgggtcactgagcttgagaattgggggtgatgctgttgcccatggagcaggggtgggtggtggtgctgatgaggaagacaggaatggcaaaaagatcagggtgcagggaggcagtcctagtggccccgcgtgccaggtggagggctgcactgcggaccttactggtgtgagggattaccatcgacgacacaaggtctgcgagatgcatgccaaggctaccactgctgtggttgggaacactgtccagcggttctgccaacaatgtagtagattccaccctcttcaagaatttgatgaagggaagcgaagttgccgccgacttttagcaggccacaacagacgaaggaggaagacccgccctgaagttgctgttggtggttctgcatttactgaggacaaaattagcagttatttattgttgggtctccttggagtatgcgccaatttgaatgctgacaatgctgagcatttaagaggtcaggagttgatatctggtcttttgagaaacctgggggcagttgccaaatcattggatccaaaagaactctgtaaactcttggaggcatgccaaagcatgcaagatggatcaaatgctgggacctctgaaacagctaatgctttggtaaatactgctgtagcagaggctgcagggccatctaactctaagatgccttttgtgaacggtgatcaatgtggcctggcatcatcatctgttgtaccagtacaatcaaagtctcccactgttgcaactcctgaccctccagcatgcaaatttaaagattttgatttgaatgacacttatggtggcatggaaggtttcgaggatgggtatgaaggttcacctacaccagctttcaagacaactgattctcccaattgtccatcatggatgcaccaagattctactcaaagcccaccacagactagtggcaattcagattcaacatcagctcagtcactgtcaagctcaaatggagatgctcagtgtcggactgataaaattgtcttcaagcttttcgagaaagttcctagtgatttacctccagttttgcgatcacagattcttggttggttgtccagtagccctactgatatagagagctatattagacctggttgtattattttaacagtatatcttcgcttagttgagtctgcatggaaagagctctctgataatatgagctcatacctggataagcttctgaatagttccaccggcaacttttgggcatctggtttggtatttgtaatggtacggcatcagatagctttcatgcataatggtcaacttatgttggacagaccacttgcaaacagtgctcatcattactgcaagattttatgtgtgagaccaattgctgctcctttttcaacaaaagtgaatttcagggtagaaggcttgaacctagtcagtgattcctcaaggctaatttgctcatttgaagggagttgtatattccaggaagacaccgataatatagttgatgacgttgagcatgatgatattgaatatctgaacttctgttgtcctctccctagttcaagagggagaggatttgtggaggttgaagatggtggatttagcaacggcttcttccctttcataattgctgagcaggacatatgctctgaggtctgtgagctggagagcatatttgagtcctccagtcatgaacaggcagatgatgacaatgccaggaaccaagctttagagtttctaaatgagctgggctggcttcttcatagagcaaacataatatctaaacaggataaggttcctctagcatcctttaacatatggagattcagaaatcttggtatatttgccatggagcgggaatggtgtgctgtgaccaaactgctgttagatttcttatttactggactcgttg

SEQ ID NO: 15211 - DNA, 3606 bp, Oryza sativa
  ref <308>: DATABASE ACCESSION NUMBER: AK065742
  ref <309>: DATABASE ENTRY DATE: 2001-12-06
gatcctctctttttcttcttcttcttcttctccccccttcctctgcatcgaagctgctccctgcagtcgcaggatcccgaatccgagctcctccccgccattgccgcgggggcgcggcttcttgatctgtggaattcgatcggggggcgcggggggcgcggaaaggtgggatttttgcggcgagatttgggacccatctttggcccgtttcttgtggatttcgttcgagttcttgtggttttggatcgggttggtggtggtggtggagctggaaaaaggtggttaccttggccaccaaattcccaaccctttttctgttcagattcttggcgttttcttgcgcaaattttagctagggttggtgtggattcccgctcgtacccccattagctcgtgattcgtatccaggttcgtgtaaaaatctgggagtggtggagatttgggaggttttctccttcctgtgctctatgaggagcagcttcctgtcggaatcgccgtgcgacgagcagcatatccatggattcaatccgcagtcatggctgcaggtggagcgtgggaagctgcccaaatcgtcctactcgccttcctctatcgagtcgctgataaagatcgcggagccgccggtcgtaccattgtataagcccttggattatgtggaggtgctgtccaggatccatgaggagctcgagcaatgtgtgccgagcgagcggccagggctgtatttgatacagtcccaggtgtttcggggacttggggaggcgaaattgcgccagaggagcctgcattctgcgtggcgctgcgcgaccactgtgcatgagaagattgtgtttggggcatggctgcggtatgagaagcggggggaggatatcatatccgatgtcctcgcgtcatgtaggaagtgttgcaaagagtttgggccacttgatgtcgcatccgagatgcccgagggagactttgagatacttggttcttgtgatatcggcacatcttcgaaagtttcccctgtagtgaccttccaaataagggatgggaaggtgacatgcaataggtgcaagattgcttctctatcgatccctttctggtccatgctcaatggaccattcactgaatctcagcttgatcttgttgatttgtcggagaatggtatctcactggagggcatgagggctgtatctgaatttagttgtacatatagcttagaggatttgcctttggaaaccttgttggagatcctggtgtttgcaaatacattttgttgtgacaggcttaaagatgcgtgtgataggaaactagcttcatttgtttcatcaaggcaggatgctgttgagctcatggcattggcatttgaagaaaatgcaccagtcctcgctgcatcttgcttgcaagtgtttctgcaggagcttccagattgtctaaatgatgagcatgtagttagcctattcctaagtgcaactgaacagcagcaatgcatcatggttggacatgcctcctttttgttatattgcttgcttagtgaggttgcaatgaacattgatccaaggacggaggcaaccgtgtgcttgtcagagaagcttgttcaattggctgttactcctacacagaagcaaatagcttttcatcagcttggatgcattaggcttttaaggaaggaatataatgaagctgaacaccaatttagtgttgccttctcagctggtcatgtgtattccattgctggtcttgctagaattgctggtacaagaggtagaaagggtttggcttatgagaagctcagttcggtcataacatcaagtgtaccactaggatggatgtatatggagagatctctgtattcagagggtgataaaaagttgggtgaccttgacaaagcaactgagctggatccaactctcacttacccttacatgtatcgagctgcatccttgatgagaaaaaaggatgcaagacttgccttagaggaaatcaaccgactattgggtttcaagctagcgttggaatgcttggagctccggatttgtctatatcttgctctcgaagactacaaatctgcaatttgtgatatccatgctatccttacactttctcctgagtaccgaatgttggaaggtcgtgtagctgcttccaaaataggcactcttcttggggcacatgtcgagcagtggaatacagctgagtgttggcttcagctgtatgaacgctggtcatcagtggatgatattggttccctttcagtgatttaccggatgcttgagtcagatgcagcaaaaggtgttttgtatttcagacaatctttgctgctccttaggttgaactgtcctgaggctgcaatgcgcagtttgcaattggcacggcaacatgcagcaactgagcatgaacggctagtgtatgaggggtggcttttgtacgatactgggcattgtgaggaggccctacaaaaagcagaggaatctatttctattcaaaggtcatttgaggctttctttctgaaagcctatgttttggctgactcaggtgttgatccttcttattctgcgactgttatatcgcttcttgaagatgcactaaagtgcccttcagaccggcttcggaagggtcaggctttgaacaatcttggtggtgtttatgttgattgtgagaagttagacgcagcagctgattgctacacgagtgctttgaagatccgacacactagggcacatcaaggtcttgcccgtgttcattttctcaggaataacagggatgctgcatatgaagaaatgacaaagttgatagagaaagctaaaaacaatgcttcagcttatgagaaacgttcggaatattgtgaacgagagcaaactatgacagatttgcaaatagtgacccagttggatccattacgtgtttacccgtacagataccgtgcagcagtactgatggatagtcacaaggagaaagaagcaattgcagagctaaccagggcgattgcattcaaagctgacctccacctattgcatcttcgcgcggcgttccacgagcatatcggggatgtccccagcgctcttcgcgactgtcgagccgccctttctctggatccaaatcaccaagaaatgctggagcttcagaaacgcgtgaacagccaagagccctaacaaaaaattgtggtgccacttggtgcattgcataccatgatttttgcgctcataggtgcgcctcatgacagcccttgactccatccaattttcttcatttctttgttaattactgtaatatgatgtattcagcaagaaaggaaaaatgaaagcactagttctttggaagccatcatcgatgaatcttagcactcgatgactgctggcttttgtaaaagtaatgcctaatcactgaactgttgtctcctggaaatgaaaatcaccgtgcatgatgtaactttcaggcccctattttagctcccaattttttctgtaatgaaccttgcatgcaaattttgcgccattttagacctactttacctgtgggttttacagtcatcagatggtgtattaacatgtgtaaatgacgcgtccattatatttaggggagtttctgctttcccttcagagtaaagtacagcttggttgcacttgcagc

SEQ ID NO: 15212 - DNA, 2416 bp, Oryza sativa
  ref <308>: DATABASE ACCESSION NUMBER: AK065743
  ref <309>: DATABASE ENTRY DATE: 2001-12-06
gacttgaaggttttcggatcgcaacccaaactcgcacaagggagaagagaagagaagcttcgagagagaggtggaggaggagacgagcgcgtggtggtggtggtgttggcggcgatggatcgggttcgcggatgcgcgttcctgctcggcgtcctgctcgcaggatccctgtttgcattttctgttgcgaaggaggagaccaagaagctcggtaccgtgatcggtattgatcttggtacaacctactcgtgtgtcggtgtgtacaagaatggtcatgtcgagattatcgccaatgaccagggtaaccgtatcacaccctcatgggttgcattcaccgatagcgagaggctcatcggtgaggctgccaagaaccaggcagctgtgaacccagagaggaccatcttcgatgtcaaacgtctcattggaagaaagtttgaagacaaggaagttcagagggacatgaaacttgtcccctacaagattgtgaacaaggacggtaagccctacattcaggtcaagatcaaggatggagagaacaaggtcttcagccctgaggaggtcagtgctatgatccttggaaagatgaaggagactgctgaggcataccttggcaagaagatcaacgatgctgtcgtgactgttcctgcgtacttcaatgacgcgcagaggcaggcaaccaaggatgccggtgtcattgctggcctgaatgttgctaggatcatcaatgagccaactgctgctgctattgcgtacggtttggacaagaagggtggtgagaagaacatccttgtctttgaccttggtggtgggacattcgatgtcagtatcttgaccattgacaacggtgtgtttgaggtgttggccaccaatggtgacactcatcttggaggtgaggactttgaccagagaatcatggagtacttcatcaagttgatcaagaagaagtacagcaaggacatcagcaaggacaaccgtgctcttggaaagctgaggagggaagctgagcgtgccaagagggccctcagcaaccagcaccaggtccgtgttgagattgagtccctctttgacgggaccgatttctcggagccgctgacccgtgccagatttgaggagttgaacaatgatctgttccgcaagaccatgggacctgtcaagaaggctatggacgatgctggccttgagaagagccagattcatgagattgttcttgtcggtggtagcaccaggattcccaaggttcagcagctcctcagagactacttcgagggcaaggagcccaacaagggtgtcaacccgatgaggctgttgcctatggtgctgcggttcagggaagcattctcagcggcgagggcggtgacgaaaccaaagatatccttctcctggatgtggcaccccttaccctcggtatcgagactgtcggtggagtcatgaccaagttgatccccaggaacaccgtcatccccaccaagaagtcccaggtgttcaccacctaccaggatcagcagacaaccgtctccatccaggtctttgagggtgagcgcagcatgaccaaggactgccgtcttctcggcaagttcgacctatctggcattccagcagcaccaaggggcaccccccagattgaggtgaccttcgaggtggacgccaacggcatcctgaacgtgaaggctgaggacaagggcaccggcaagtcggagaagatcacgatcacgaacgagaaggggcgcctgagccaggaggagatcgaccggatggtgcgcgaggcggaggagtttgcggaggaggacaagaaggtgaaggagcggatcgacgcccgcaaccagctcgagacctacgtgtacaacatgaagaacaccgtcggcgacaaggacaagctggcggacaagctggagagcgaggagaaggagaaggtggaggaggccctcaaggaggccctcgagtggctggacgagaaccagaccgccgagaaggaggagtacgaggagaagctcaaggaggtcgaggccgtctgcaaccccatcatctccgccgtctaccagaggaccggtggcgccccgggtggcggcgccgacggcgagggcggcgtcgacgacgagcatgacgagctgtagatgatgatgatgatgatctgattcgattgattcaaaggagacagccaatttttgtaagagatggccggttacttttagtggggtgacttactactaccttgggttggggtttaggggtagcaagaggggagagttttatttgcagaacaccagaaaagagactaaatctctcctcttgttacttgtgttgctctcttagtttgttactctgtcgagtgtagaacagctcttccttttgctacttccttctgatttccatgtgaactgtgaagaagaagaagaaacataagtaaattttaattact

SEQ ID NO: 15213 - DNA, 1052 bp, Oryza sativa
  ref <308>: DATABASE ACCESSION NUMBER: AK065744
  ref <309>: DATABASE ENTRY DATE: 2001-12-06
tgggcgaagtcaatccggcgatccccggcgagcgagagatcgaagcaagctgctacacagatctcacgacgtggccgaggcggcgtcggcggcggcggcggcgacgacggagcaggcgaatgggagcagcggcggcgagcagaagacgcggcactcggaggtcggccacaagagcctcctcaagagcgacgatctctaccagtacatcctggagacgagcgtgtacccgcgcgagcacgagtgcatgaaggagctccgcgaggtcaccgccaaccacccatggaacctgatgacgacgtcggcggacgaggggcaattcctgaacctgctgctgaagctcatcggcgccaagaagaccatggagatcggcgtctacaccggctactccctcctcgccaccgccctcgccatccccgacgacggcacgatcttggcgatggacatcaaccgggagaactacgagctggggctcccgtcgatcgagaaggcgggagtggcgcacaagatcgacttccgggagggacccgcgctgccggtgctggaccagctggtggaggaggagggcaaccatgggtcgttcgacttcgtgttcgtcgacgccgacaaggacaactacctcaactaccacgagcggctgatgaagctggtcaaggtcggcggcctcgtcggctacgacaacacgctctggaacggctccgtcgtgctccccgccgacgcccccatgcgcaagtacatccgctactaccgcgacttcgtgctcgagctcaacaaggccctcgccgccgaccaccgcgtcgagatctgccagctccccgtcggcgacggcatcaccctctgccgccgcgtcaagtgagcccgccgccgccgcgagtgcgactccggccgatgcccaagaactagtcattttaaatttataaattataactaaattgtataatttttgccttttttttttaatttgcaagctactggaaaatgttatttaatatatgtataaatgtcgagacaataatattattgcattataaattgacctggtttttgttagcttt

SEQ ID NO: 15214 - DNA, 2368 bp, Oryza sativa
  ref <308>: DATABASE ACCESSION NUMBER: AK065745
  ref <309>: DATABASE ENTRY DATE: 2001-12-06
ttggttcacagcggcaccgatgctttcacctcccaatttaatcagctcggccgaccaccggcaaccacgagccgcctccgcgcctcccctcggcgcacacagcagatcggcgaggtctgagcgcatcgtcctcaacaccgagtagaccggccggccgcggcggccatcatcgctcctaccatggccaaggagctcctcgccttccccggtgtcgccgtaccgtacgtgcagcagtttcttgacaagaacgatggcatactgaagtgatgccaaattgccaactgccaagttttcttgtgcttcttttccaggtgccttagctccgggagcacgatccattctcgatgctaggcagttagctttttctcccctttagctcctttttgctttgtcaggcaggggaggcagttttgctttgcctctataagagacagtgcgattattaggctgggcaagtgttaaaccgttgctgggatttgttggatctatcaaagttggtcgggtggtatctcttgggtgaaatagtactactgccagccagtatagctatacagctagtttgccaggagctcagatggagaggcggctcctggaggcagccatggttggcagtgccacatcaatgaaggagatggctgcacaggatccaagcctgctgcttggaacaactcctcaagggaacacctgcctccacatctcctccatccatggccatgagggattttgcaaggatgtgctgacgctaaacaattctcttctcactgtcgcaaacatggatggtgagacaccactgctcactgccgtgacaaatggacacatgtctttggcctctattctacttgaatgctgctgcacactagggttcagtgaggcaatcttgcaacaagacagaaatggttgtaatgcactgcaccatgccattcattgtggtcacaaggaccttgcactggaattgatattaaaagagcctgccctatcaaaagctgtgaacaaatacagtgagtcaccaatgttcatcgcggtaatgagagattttacagatgtttctgagaaactgttgggaattcctggatctagccatgttggaacatatggccacaatgccttgcatgctactgtgagaaatggaaatgcagttatggctaaaaaaattttggagggtcgtccttggctggggaaagaacgaaccagagagaggaagaccccaatcctgatgacggtaatttgggacaagatagacgtgcttcgtgtgttgttggaacatgatgtgcttttagggtatgaatgctatgatgatggtggtaatctgagccctcttcttgttgctgctgcatatcgaggtcatgttgatgttgctcaagagcttcttaaccactgtccagatgctccctattgcgacagaaatggttggacatgccttcatgaagctgtaaaggaaggtcagacagagtttgtggaatttatcctaaggacaccacaacttcgtaagctcatcaacatgcgaaataacaaggacggacaaactgctctgcatcaagctgtccggatgtgcaatcctaaaattgttgcctcgttgttgtctcataaagacacagacttcacactgaatgatcacaaaactggccagtcagtaatttggcaattatgtttgggttcagagcgtgccaagactttaaactggaatgaagtgtccatgcttatgactaaagctgatcctgaagctgcaaccacgcttcaccgtcagttcgcaaggaaacgactaactgatgaattagcaaggaatgttaagtcactcactcaaacatacacaagcaacacttcgctagtggctattctcatggcgacgataacctttgccgcagccttcaccctgcctgggggatacagcaacgattctggaagcgagggacttcctgtcatggcaaagaagttagcgtttcaagcattcttgatctctgacaccgtagcaatgtgctcctcgcttgccgtcgcattcatatgcatcctagcaaggtgggaggatcttgaattcttgctttactacagatcctttacgaagaagcttatgtggtttgcatacatggcgaccactatagcgtttgcaacgggtttatacaccgtgttggccccacgaatgctgtggttagctgttggaatttgtttcctttcggttttactgcccattctcactaagctgctaggtgagtggcctgtcgtgaagctcagatttcgtttgggtaagactttcaagactgatctccttgatatggtatgacgtcatcaaatttatattatttgttctgctttccaacactacatataagttcatgcaaaatgtatgttgtaatatatacattttattttggtg

SEQ ID NO: 15215 - DNA, 857 bp, Oryza sativa
  ref <308>: DATABASE ACCESSION NUMBER: AK065746
  ref <309>: DATABASE ENTRY DATE: 2001-12-06
gagatcacggcgactgcgaggcgaactcgtcaccacacactcctcctccctcatcgccgccgtcctcacctcaccgccggccaagccagccgcggcggcgcaagatgaaccaccacctctcgctcctccacctacctcgcctctcccccgtactccaccaccacccccgccacctccgcctccatggccgcaccaccgtcttccaagctcgcctcccttcccctcagcgaacgaaccagcaccgcctcctcgccgtgacgaccgcaccaccggagcccgagaagacggaggagcagcagctcctccaccccctccaagaaccagcggagggagaagtcagcggcggtggcggggcagacaggacgtgcgggctcccgacgtgggcgctgatcggggccatcgcggcggcggtggcgctgtcgtcggcggcggcggccgggccggcggcggcgctggggccggagggcccgctggtggaggagttctgggacaacatgcggcggtacgcgctgtacgtggtgacggtgagcaccgggttcgcgtacacgctggcgcagcccatcgtggagctgctcaagaaccccgtcacggcgctgctcatcgtcgccgtcctcgccggcggcgggttcctcgtctcccaggtgctcaacgccatggtcgggaactccgacttcatctacacctacgaccagtagtagaacaacagcaacatcccaatcctttttcacgtgtaatatgcttttcagtttcagctagaacaggtgatgatgatgtgatcaagtttttgcttggcaaatgtagccgtgtttggtgtaaatttcgaacgaaattggaggatttaatccgagtttttgacc

SEQ ID NO: 15216 - DNA, 2405 bp, Oryza sativa
  ref <308>: DATABASE ACCESSION NUMBER: AK065747
  ref <309>: DATABASE ENTRY DATE: 2001-12-06
tctgggtttgggggcactgttttgagatttcagttgttttcttcctttgtttccttgatttttggaggttgttttgcatctgatttagtgtctgtttgccatccagaagaatatggcatctctatatgtttggtcagggtgatatgctctgtttgattgcattgactttgggaatgctttcaattattgatatgctctgattgtttgtttacaagtgttggatggattctttctcatccacttttctgattcggatgaataatataacatattattgtttaattgtgttaaactaaggtgtgctgatgggcttgttagagaagttacttaacaattaatgattgtagttacatgtcttgattacattaatgcattgcacattacagaatggtcctgtacttaattcactctggacttctggagagccaggaacaccacaagtttgagataaaagcataaggcagtgcaagtcgcagccgtggcagatggacgccacgacgagcagtggagcttcctcctctctacccctccaccttatcatagatgatgctcttgcccttgtttctccgttgcagcagtcgtttcagaggtcacagcgccattgctttggtggctctgctcctggagaattccccttggctgcaaacccatcaattgtcctccatgtcctcacatcatgcaatctggaacctgatgacctcgctcacttggaggcaagtagtgttttgttcttcctctccaatgtagaattgatattgccactgatgaaatttgtgcttgcgataggcaacatgctcgtttttccggaagcctgccaatttccctcccgattttcagttgtcaatgtcagaactcgcagcgttggatatgtgccagaaacgggcgatatttaaacctatgactcaacaagaaagagaaatgtttaagcaacgttgcggcgggagttggaagctggttcttaggtttataatggcaggtgaagcatgttgccggagggaaaaatctcaggcaatcgctggacctggtcacagcatcgctgtgacaacaagcggtgcagtgtatacttttgggtccaacagctctggtcaacttggccatggtagtttagaagaggagtggaggccacggattatcagatcattgcagggtattagaattattcaagcggcagcaggagcaggacgcacaatgcttgttagtgatgctggtagggtctatgcatttggaaaggattcatttggagaagtggaatatgcagcccaaggttctagggttgtcaccacaccacagctggtggaatcattgaaggacatatacattgtccaggcagcaatcgggaacttctttactgcagttttatctcgggaaggtcatgtgtatacattttcttgggggaatgacatgaaacttggtcatcagacagagccaaatgatgttcagcctcatcttctagcaggccctcttgagaacattccagttgtgcagattgccgcaggctactgctatctcctggctctggcatgccaaccaagtggcgtgtctgtttattctgttggttgtgggttaggtgggaaacttggccatggttctcgaaccgatgagaaataccctaggttaatcgagcagttccaagctttgaatatacaaccagtagtggttgctgctggtgcttggcatgctgctgttgtaggcaaggatgggcgtgtttgcacttggggatgggggcggtatggctgcttgggtcacggtaatgaggaatgtgagtctgttcctaaggttgttgagtccttagtcaatgtgagggctgtccatgtagcaactggagattacaccacatttgttgtatctgataaaggtgatgtttactcgtttggatgtggtgaatcatcaagtcttggccacaacactataactgagggtaataataggcacactaatgtccttagcccggagttggtgacttctttgaaaagaacaaatgaaagggttgctcagatcagcctcactaactccatttactggaatgcacatacatttgcactgacagattcaggaaaactctatgcgtttggtgcaggggacaaagggcagctaggtaccgaactcgtcgcgcaggaaagcgagagggggacaccggagcgtgttgaaattgacctcagttaggtccaaattgcaacgccacttcatctccttttctctccagatgcactcttctaacgttaactttcaaattgattgcattgcgcgccctttagcttgttggctgttcatcagcctcatcctgctctgcagctaatccttgtgaaaatagttaccatcaattaaacagtctgttgttcatatgattggttcggtttagaaactttgtatatatgattatcatgtaaatataacagtcaggtccc

SEQ ID NO: 15217 - DNA, 921 bp, Oryza sativa
  ref <308>: DATABASE ACCESSION NUMBER: AK065748
  ref <309>: DATABASE ENTRY DATE: 2001-12-06
gagttcgtcactcacacgcggagacaaaaacaccttcacaattcgcgaaagctcagctgcttctgcttcttcttcttctttcggattcgagaagaggatgtccatctcgctgcgcctcgcggtcccgacggcggcgccgcccgtgctgccgccgctgcggcagtctgcggtgcgggcggcgggctcccccgccgccgccgctctgcggacgggcgcgctcaggggatgcgcctcgctgccgctgaagccgcagccgctgctgggggcgggacaggcggcgagcggtcgccggggtggcgccgccgtgtgccactcgtcggcgcacctgagcgcgcggacgatgcaatgggtctccgccggggccaccgcagtgctattgcttgctaaaggcacagccatacacaaatctttccttgtgccactgtttgctctgctagcaccttgcagtgtaatctcatggatcaagagtgactatggtcagtggactgcttttcttgctcttttggtgcgtttgttcttctccattccaggtgagctggagcttccattgtcaactatgctgctcgtgagtgttgctccttaccagttgatgaatctgaggggaactcaaggtggtgcagcactgtctttggcattggctgggtacctcgcttttcagcacttcaccagggttgggggtttagggaaagcatttgatcagggatcaataattgcaaccttggccatcatctgcatcacagttatccccttgatgatgttgttctgagtcagattaagctggcaagccgttgttcattgtgggcattgcaggagctagtagggagtacagaaaaataatagctttgtaatgcaacaccctgtcagactttgtggccttgataaaagtaataatttatgagatggctacagaaatgtttactg

SEQ ID NO: 15218 - DNA, 1112 bp, Oryza sativa
  ref <308>: DATABASE ACCESSION NUMBER: AK065749
  ref <309>: DATABASE ENTRY DATE: 2001-12-06
ggatctggaaggaagggagagagaaaccgaaacgagtcaaacagaagaaacaaacagacacgtaaggaggagaaatttcccctcccttccctgctcttttcgtactacttgcaaggaggagaaagaagaacacgaggaggaaatccaagccaatcgccgcctccgcctccgattccttccgatgaagaagatcttcggcgccaagaagaaccaggagcccccgcccagcatccaggatgccaccgatcggatcagcaagaggggcgactccgtggacgacaagatcaagaagctggacgctgagctcgcccgctacaaggaccagatcaagaagaccaggccaggccccgcccaggaggccatcaaggcacgcgccatgagggtcctcaagcagcgcagaatgtacgaagggcagcgtgacatgctgtacaaccaaacatataaccttgaccaagttgcttttgcatcagagggacttaaagatgctcagcaaacgatgactgcaatgaaggcagccaataaagagctgaaaggaatgatgaaaactgtcaagcttgaagatatagatagcttgcaagacgagatgatggatcttatggatgtgagcaatgaaatacaggaaactctcggaagaagctacaatgtccctgatgacattgacgaggaagaacttatgggggagcttgatgctttggaagccgacatggactttgaatcaaattcagtcccctcgtaccttcaaccagataaggaatcagatctagattctgagcttaacttgcctgctgcaccaacgggtcacacacccgccccaccaaaccggcagcaggaggacgaattgggattgccgacagtgccacaagcatcgatccgtagttgattggattcgttttgtaaaaacataatgtcgtatgcaataacaaattcagtgtatctttgctcatatactactgcaatttgttaagattggaaatagctttctcattgttttgtttagggtctatatgtaagagcatttgttactttttgaagtacagtgtaaatttaattggctgctggggcatacatatataagtccttattctgtgttggtgatgagctgcccttgcatc

SEQ ID NO: 15219 - DNA, 1601 bp, Oryza sativa
  ref <308>: DATABASE ACCESSION NUMBER: AK065750
  ref <309>: DATABASE ENTRY DATE: 2001-12-06
ttttatctgcgcaagaacggtgatctcaagactgttgctgatcttgagaatgaaggaacacgcaagactgacaagcttgttgccaatttggctagccaggttgaggtcaagaaaaggcatgtggaggagcttgaatctcagtacaatgagaccacagcgtcacttgaaagggtgatggagcaaagggagcagcagctccaggcttacaatgaagaaattcgtaagatgcaagaccttgcgctcagacattcacagaggatcatggatgagaataagaagctgcgttcagatttggaatccaagatgcaactacttgactcaaggtccaaggagcttgacaagctagctgtccaaagtaactctgacagaatgaaccttgagaaagagaaggaaaagaacgatattaaaactaagcatcttaagatggcaacattggagcaacaaaaggcagatgaaagtgtgctgaagcttgtggaagaacacaagagggagaaacaagctgctctagacaagattctcaagttagagcagcagttgaatgctaagcagaagcttgagttagaaatacaacagcttcagggcaaattggaagtaatgaagcatatgccaggtaaagaagactccgaagcgaagagtaaaatacatgaactcagtgaggagctaaaagataagtatgctgaaatggaatcaatagagtcactcaatcaagcactggttatcaaggaaagacaaagcaatgatgagctgcaacatgcccggaaggtgctgatagaaggcttccaagatattatagttggtcgaacaaatataggcatcaagagaatgggtgtgattgatttcaaagcatttacaaatgcttacaaacagagatccttagaagagggtgcagatgttagtgctgcagagctttgttctctctgggaaaatgagattaaaaattcagactggcacccttttagggttgtcatggtcgacggtaaagagatggaaattctttctgaagatgatgggaaactttgcgaacttaaagaagagcatggtgaagaaatctgtgccatggtaacaaaagcactgctagaacttaacgagtacaaccccagtggccgctatcctgtaccagagctttggaacttcaaggagaaccggaaagcaacactcaaagaggtcgtccaatacgtcctcaatcagtggaagaagaacaagaggaagcgttgagcccaggggtataactcctaatgatgagtcggctagactgattaaaagcattgttatggcatggacattgtgaatgcctgctaattttagactgaggggttcgatctatctgtgtttgtatgttgctgttgaaccaatgatcctctgtaggtatggtatgctccatatctatgtggttgggcgctgatctgcaaattaacttacagaaccactgcgaccaagcttgcagttcatatggagtatattgatttgttttgcaatgcttgcgtgattcttgacccagtaaactgttctgaacattctgccagtgagatacgtaacttgtttggactactgttgttaatctttcctccatgtgcatgctgatcaggtagtacattttattg

SEQ ID NO: 15220 - DNA, 881 bp, Oryza sativa
  misc_feature (360)..(360): "n"=any one base of a, t, c, or g
  misc_feature (494)..(494): "n"=any one base of a, t, c, or g
  misc_feature (622)..(622): "n"=any one base of a, t, c, or g
  misc_feature (627)..(627): "n"=any one base of a, t, c, or g
  misc_feature (633)..(633): "n"=any one base of a, t, c, or g
  ref <308>: DATABASE ACCESSION NUMBER: AK065751
  ref <309>: DATABASE ENTRY DATE: 2001-12-06
gccgcggcatagtccaaattcggtgagtatgaggaagctacatccatgtcgccaacgcaggcgcctcgtcgatcacggcatgatcagagccgacgttcatatgcaagccggcggcagcggcagcgagcggcaggatatctagcggcagagcccccacgcaggagatgttccttcatggccaatgaagcagcaacagccagctacagcagtgggaattcgcagtgcagtcgggagcactcactcactcgacgctcagccccaggacacaatgaccgcagatgcgagttgctgtccagcagcgcagtatacagggcctacctcaagagcaaccagacacacaacagcagacacccagcagcnaaggaggtcactgaatggtgaaccatctgatgattcacagctacaagacgcaggcataagctgcctgcctcaccacacagttctcagtcagcagtcatgcagctcacagcactcacacagcagcagcacgctgncacggaaggaggacgacgcatgacaagagtagcagccacagctgactcactgcgtcgtgactgcgtgctacctacgcgactcgtccaccttgcttgatcttcttctcgcgttcgcgctcctcactgcntccancagagnttaccttactactccgcagttctactcctccctgctcgaagagatagcgcaggaccacgacgactagctctcctcacatccggtaaacggcagtaacttgtctacgcgaataatgctgtcatatcgaatcgccaaaatctccctcgtccttgtcgaaactgttatgaatcggtagtgacaatagcatcgatcgctccgtcatgacaccggtacccgttcacagttgtcgacagcagcttatatgcacc

SEQ ID NO: 15221 - DNA, 1737 bp, Oryza sativa
  ref <308>: DATABASE ACCESSION NUMBER: AK065752
  ref <309>: DATABASE ENTRY DATE: 2001-12-06
gaatccatccccactccccgatccccatcccctccgggctccggcggcgccgtctccgatcgccctcgactgagccggcggagaggctcgaggggagggaccccaccgggggaatccagctcggttcgacctgtcggcggcgggagcggccgccgtccacccatcgcagccggctcgacctggcttcagaagttcagatatggacacagggcgttcttcccagttgaccgagcgagtacggcgtatgcctgcttcctccaactctggcattctccccctggaggtgctgttcgacgtcctggtgcggctcccggccaaggagctctgccgcctccgcatcgtctgccggccctggcggtcgctgacatctgatccccttttcatgaagacacacgtggctcaccaccgagagacgttcttcttggccagctttaaggatgacgagacgcacatccatatcatggattttgcaggcaatgtgattaagcagataggcataccagctggccacaaggtgttatgcacacgcctcgatctggtttgtgtagccacaaataagaacagctgccatgttcttaatcctgtcactggagatgtctacaacttgccaaagagtccagcagaggagcacacgtaccatgtcaatctgcgcaagcctttcacctcatttgcatttgggcatgttgcctcaacaggagagtacaaggtgctccggatgttcaaccgtcctggatttacggaccttgggataccacagctttgtgaggtcatcaccgtcaagggtggcacaggccaggcacgttggaggggaaaacagagccgtgagttctttgttgaatgtcaaaaggcaaacagcggtgtcgtggttaatggggtggtgtatttcttgatagacagtgtatatgattcaatgataattggtggtgatggtgccggcattcatccagacttcatctgttcttttgaccttgaggtggaggaatggagggaagatatccagggaccaattagcaggaactttgtatatgacatggacttcccagatgagtatatagcaatttgggatcagcttagtttggctgagctgaaaggctacttagttctagtataccaccagagttaccgatcctcgaccatagacctgtggtatttaatagactatgagacccgcacctggattaaacaatatagcattcaaattgaatcattcgttcctgttagggagtgcaaggtaaagccactgctggtattggatgatgggaggatagtcgtatggctaggatcgaccggactgctactcatatatgatccaagaaccagcacttttgcagaagtggagatgagacgtctttctgaagttggtctgtacacaggaagcgtactgagtttataaaatggtgatgtggtgtagtattgtactccataatgttttgctactctcttcaaatgccagttaatcagcttttagaaatgatctttgggcacaatcattaatatacttggtcggatccttgtgtcttgttgtattggggcctgtaagatcattgtaaattcttgaagatgctatatctctctctcattttgtactgtcttgtgtaaatatagtgttaggtgtgtacttgtcagcatatgtcatctgacattatttagagttgctgcaactttgtatcatagctgctagccagttggttggatacttgggttatgtgtaaaaggatgtggcctgaaaatatttct

SEQ ID NO: 15222 - DNA, 2214 bp, Oryza sativa
  ref <308>: DATABASE ACCESSION NUMBER: AK065753
  ref <309>: DATABASE ENTRY DATE: 2001-12-06
ggcttgcttccacagttccacttgcatcttggagccattcacacgctcccaccatgcatcccaagtcatcactgctgttcttcctcatgatcggagcattgctcaccaatgccatggcaaaccatgcaccggctccagccgccgtcaactgcgtgccacgagagagggaagccctgctggccttcaagcgaggcatcactggcgaccccgcagggcgcctcgcctcgtggaaggaagacgaccatgactgctgccggtggaggggcgttagattatagccctttggagttcaacgcggtagctttggtcggccggataacgtcttctttgctttctctggagcatctagagcaccttgacctcagcaacaacaacctcacggggccggatggccgtttcccggtgtttgtggcctcccttcgcaacctacaatatcttgatctctctggtttgggattcactggtatggtgccatatcagcttggtaacctttcaaagctggaatttcttgacctttcgggaacaggtatgcaatcagcagatatatcatggctaacacgtctacaatggttgaagtacctttacttgtcatcagtaaatcttagcgcgatatctgattgggctcatgtagtaaacaagatcccatcactaacggtgctttctctctctggttgctcacttacacgtgtagaccactcgctcaaacacgtaaacctcactagacttgagaagctccatctctctggcaacgattttagccaccctttgtcatcttgctggttttggatcttgaaaaccctcatctacctcgaccttgaatcaaccggtttatatggtcgatttccaaatgcaataaccaacatgacgtccctccaggtcttggatttttcaagaaacaataatgcgggtattttggaaccaattctgctaaggaacctttgcaacttagaaagtctgaaccttcaattgggcctcttgtctggtaacatgacagagctgctagagagtttgagtcattgctcaccaaacaaattgcggaaattatatttgtccaacaacaatattacgggaactctaccagctcagagtatgggccaatttaccagcttagccaatattggtttctctttcaaccagctcacagggcacgtgcctcctgagattggtaaactagctagtttgactcaccttgacctaagtgaaaataaattaacaggaaccatcacagatgaacacttcggtggtctagtgagcttaacatacattgatttatcttacaacaaactcaagattgttatagaccctgaatggttaccaccatttaggcttgaaactgcgtattttgcatcttgtcaaatgggtcctctgtttcctgcctggctccggtggtcatccgacattgatatgattgatatttcaagcgctaatataatagacgagtttccagattgggtctctacagcattttcaaaggccatatatttggacatgtctaataacaaaatcagcggtaacctgccaaaaaatatgaaaatcatgtctctggaagaactctatctaaattcaaacagaataatcggtgaagtaccaacgttgccgacaaacctcacctatttggacatctcaaataacatactatcagggcttgtcgcatcaaacttcggagcgccaagactagatactatgaatctatcctcaaacagcatccaaggccagattccaagttcgatttgcaggttgaaatatttgagcaccttggatttatccaacaatcttttgaacgggaaacttcctcgatgcattgggatgagaaatctccagaagcttctactaagtaataataacttatctggcacattcccatctttactgcaaggctgcacactgctacgttatatagacctatcatggaataggttttatggaagattaccgagttggattggagacttccaagaattagtttctctacaactgaggaacaatactttttcttggtaatgttctttcactgaacatagcaagaattactctatgtatatgttaggtgcctcaaggaaagtagtcgtattcagaggtacagcagcgttgatgagaatgccgtgccatgttcaatgatgaggatcaaactgcttatctggtttgggcctcctgaaaatacttgcatcaaagcaactatataataaagttagaggtctgtcagtaaccttctgc

SEQ ID NO: 15223 - DNA, 1137 bp, Oryza sativa
  ref <308>: DATABASE ACCESSION NUMBER: AK065754
  ref <309>: DATABASE ENTRY DATE: 2001-12-06
gttcttccccaatctcgccgccgtcccccaccccgaccaaacctgaggtttcctttctcccctccgtgtcgacgaaggccttcgtcgaccctccgccgccgccgccgccgccgccgaccttgtcactccggccgctgctcggcctcactccaaaagctccgaccagcagccgccgtccacgatggccgagtaaatcttgcggctggcggcggcgagatggtggtggtgtctagcggcggcggcggcggggggaacgcgtgggcgaaggagatgaccatccgccgcaggatggccagcatattcaacaagacgcaggaccatttctcgtgtctgaaagactacaacgattatctagaagaggttgaggatatgactttcaacctgattgaggggatagatgtcgaggagattgaagctaagattgccaggtaccagcaggaaaatgctgaacagatatacttgtcccgggctaaaagggctgaagatcttgccgccgcacttaaagcaagcagaatgaaccctggaaaggctgctgccagtgacacggctgctggaagctcccagggcattagcagcagcgcaggagttcagggccagtatgcgcctgctgctgttgggatgtctcagccccggccgacaggtatggccccccaaccaatcggcggttcatcggatccacttcagggagacgatgaggagaccatgagattacgagcagagcgaggagctcgagcaggtggatggactatcgaaatgggcaagagaagagcactagaggaagcgttcagcagcatattcatctgatgatcagattagatgcagcaatacctttgtccgaaggatacctgatgaactcatcgcagcctttcggacgactgaaagatgttttctgctacaaatatgactggctatggtccaattctgaatttttaagtatagtgaagattgagaccgatcagcgccaagtggcctgctgattggaaagatcatcactttgcaagcagtatagttgcatgttgctgcatctattcatagcatgaatgtggtgttttttgcccttgtaaaactctgggaaagattttgatactgagagttcgtctgttctctctatgatgcagtgctttgttgatgtgactt

SEQ ID NO: 15224 - DNA, 998 bp, Oryza sativa
  ref <308>: DATABASE ACCESSION NUMBER: AK098937
  ref <309>: DATABASE ENTRY DATE: 2002-08-28
cccgctccgctccgctccttgcgccgccaagacgagtcgcggctgaacataacaggggaggggcggcgatctccctctccatctccatctccatctccatctccatctggcgagcagagcaggggaggggaggggatcctcacctggaaagtgtgggtaaagcgcagggcaacaagaaatggcagcattcctgaggtcaaaatgttcgtcagttggacgtaccttgatgggaggccttgggaacaatctatttggagccgttaactcatctgttgaaacggtgtcaagaccatctcattgtgatcctatctttcagcaaatcagaacattcatccagatgagaacaaacctaaaggtggtagacaactctggtgccaagcgcgttatgtgcatccagtccttgagggggaagaaaggagcgaggctcggggacactataattggatctgtcaaggaagcacagcctcgtggtaaggtgaagaaaggagatgtggtctatggagtggttgtccgtgctgctatgaagcgaggacgcaacgatggcagcgagatccagtttgatgacaacgcgattgtccttgtgaacaacaaaggcgagctgattggcactcgtgtatttggtcctgttccccacgaactcaggaaaaagaagcatctcaagatcctagcgttagcggaacacatagtttgagatgcttacatacctggcaacctacctgttagttctgcagaatgaaatgagcatggtgctgtctcaagagtattccaccgttgttttgatcagttctgtttgcaataatgtaccctcaaaagattaaatgagctgatgccctgcagtcagtcctagacaaatcagattctgtactactatttaacctctgtagtattgcattccattcagatggaaacgcatacattgcttatgttctcttgttaaacctgaaactgcaactgaactcttgtgctttctgatctcaaagtgtttcggttcatgtgtt

SEQ ID NO: 15225 - DNA, 2625 bp, Oryza sativa
  ref <308>: DATABASE ACCESSION NUMBER: AK065755
  ref <309>: DATABASE ENTRY DATE: 2001-12-06
ggtcgattccaaatccccttcttcgattgcagtgttgcgcctcgcgaattccaaccccaagatcgctcgcacggccggccgccatggagagccccacgtcgccggcgtcgcggctggacttctacgacttcatcggccgcatgcgccgccccgccgccgccgacctcttccactccatcaggagcttcctcgcgtccctctcccagggcggcgagcccaacgccgaggtcgacggcggcagggtccagaccttcttcgcggagatggagaccgccatcagggaccacccgctttgggccaatgccaccaatcaggaaatcgacaacgcgctcgaggtgaccccgccctaacccttgcgcttgatttgctttctgattcaattgaacatcttgcgtctctcttgttatgcgcgattaggggcttgagaagtatatcatgaccaaattgttcgatcgagccttcgcttcatccgcggaggatgtgaaatccgacatggagatttcggagaagattggtctcttgcagcactttgtcaggcctcatcacttggacatacccaagcttctgcacaatgaggcagcgtggctggtaagacaacaatgacagatctttgagtcattatttcattgttccgggtgttagcccaaaattcagaacttcccatgtgatttttattgttcctgcacgcggcctgtacaagttcacaacgcattgttacctaatgctaatggtcaatagtctgcgactgtaacattgtgaacaatgaacttatgagttatacttataccccctagtaatatttttagatgcactctgaaagctttgtatattgatcacggtgtaaggtaaattgcaaattatcgtgttgggttactttgaattatctcttatataaaaccagcattagcttgcattttggtcaccatgtagaatatatgataaaaatgcatggggtcaacatttaagcgattatctttccctgtattcttcctatgattggttcattgctgtaattttacatctgcttgacataaaagaatactgccacctgccatcaacacaccaatgcccaagttaactctgaccttgggatgtttatgccattctagcttgcagttaaagagttgcaaaagattaattccttcaaatcaccacgagaaaagcttagttgcatcatgagctgttgccaagtcatcaataacttgctgctaaatgtgtcaatgtcaaatgatcgaacactatcaggggctgatgattttcttcctattcttatttacattacaatcaaggtaagcttacttttgttcctatttattctttctctaatttttctcatccagattgacatgattacatgctgacagatcattgagtacttatgggggaaactattttgattcctcgaggggatgtcacctcgtttgcttaaaaaaacatctaaatgattatgaaaaattctggaaaaatttgacaacactcatataacatatctatacaactccacaaaatcttaggttgaaactcaactcacgtcgagatataaaaaaggacaaattcaacgtatgaacagagaacagtagcgtactgttcacatctaaatttatcttttttgtttctcaatgtgtagatcgaattagaacttgatttttggtagaccgatagatatcactatactctacggtctacattgtcaatttttttcagaatttttcgtaactatttatatcgaatttggaagaaaaaggtatacgaggggacatcccctcgagggattagaatccaatccctacttatggttcaagttttacaatcataaattttatgaatctcgtatcatatgtacagttaacattagggtgtttttacctttattctgtacagctaaattgggtaacattactgataaattgcattttgttacttgctaatgtgacaatgcctattttttacaatgtaactagtatagatgtttggtgtattaatgggatctaatggtcttatggggtaaatttgattgtttctgtttgttattagttaatattactcttatatgccgcattgttaccaaagcttattttctttttggttcattaaggaatatgagtttctctagagagcatatgatactagtcagttgaaagctgttagttgtcaccaatgtctctgtgttactttgtgcattctacttagggaatcctatccctaatatatgcaactttttactatatggagttcaactgaccaagcacctaaaaaattgatgtaggccaatcctcctcagttgcactcaaatctaaagtttattcagctcttcagaagagaaacaaggcttatctctgaagtcgaatactatctcacgaacctcatttcagcaaagatgtttataatgaatgttaatggacactcactgtccatggaggaaagtgtgttccagacacatatggagtctgcaagacttggtaaccacatatctgttgctagcactaatagttcacaaggattgggtacatccacaccaggacagaacgaggaatctggtgatacagaaggtctgtttttaacattagtggatcagtttgtttcagaataaagtttcacctcaattaaagtattagtcttttttgc

SEQ ID NO: 15226 - DNA, 890 bp, Oryza sativa
  ref <308>: DATABASE ACCESSION NUMBER: AK065756
  ref <309>: DATABASE ENTRY DATE: 2001-12-06
gaattctgcgcggcgatgagggcccaacgaccgtcgtcggcagctgctggcaatccggtgcttgctcttctgtttctatgggtccttggctggggacatgtaacggcggaaattgatatcgccaacatgacggcgctacataaacatgtttcgttcttcgaccggaacaaggatggcattattactccgtcggagaccattgaagggattgttgcaatcggttgtgactatgcatttgctagagactttgccgcccctgtgcatgctggtcttggtcctaaaacaagccccaaggacgcaccattacctcacttgtcgatatacataaagaacatctataaaggaatgcacgggagtgacacaggtgcactagatgctaaaggaaggtttgttcctgcaaagtttgaggaaattttctcgaaacacgcaaaaaatagaccagatgcattaacatccttggaggtcaaagagatgattctagcaaatcgagatccagatgacccacaatcatgggctgcacctatacaggagtgggggctaatttatggtcttgcaagtgataagaacggatattttcacaaggatagtgtgagaggtatatatgatggtagtgtgttcgtcaagttggaggaagagagggcatcttcacaaagtacagtttgccggagcctatcatttaggagtactgtataaagtaattgggaaatgaagttatcccaaatacattgtattgcatcataggtattgttcgtgtacttacaaaatgccatatttggagaagcactggtgtatggtagtggagttatagttgcatgactttaatcattatgatttaaatcttggtttatatgaatattatgtatatacggatgcactcttaataagatttg

SEQ ID NO: 15227 - DNA, 2190 bp, Oryza sativa
  ref <308>: DATABASE ACCESSION NUMBER: AK065757
  ref <309>: DATABASE ENTRY DATE: 2001-12-06
gattgggtagctcgcggaaccataacctcttgatccttgtagctaggattcatcgtccatttctcttgctatcttgcctaaacactcgtatataacattcttcgcaacaccaagaaagatctcaaccttaacttcagatcgatcatcctcaacaatttgaggagagagagagaggggtggtggctgtcgcggctgcctccgttgccttccatcgccactcctgatatatcatcagttatcatcaccgggtatactcccatggcctcgccaccttcgccagcagaatatcgttcttatcgatatgtacttgacgataatctatcatctccgacaccagcaccaggtccatcacaaccacctccatctccaccgccaccgccactgccatcgccaccaccaccatatccattttcatctccatggtcatcaccgccatcgccacaagcaccaccaccacaaattctgacggcgccaccactacctgcgcaagcactgccactagcacaacccaagaccaactcctcgacgaagacgatcgccatggcagtagtagttcctacgctcgcggtgtgcgtggtcgccgcggcgcttctatggctgtggcgccagcggaagcgccgccgcaagaactcaccgccgccggcaaacaatgacagcgaccagtactcctccgacgggcagcggcagcacggcaccgccgacctggagagagccgtgaccggcggcgggccgcggcggtaccagttccacgagctcgccgccgcgacgcgcgacttcgccgaggaggagaagctcgggcaaggagggttcggcaacgtctacctgggccgcctcgccgtcggcactggcggcggcgaggaccaccaggaggtggccgtgaagaagttctcgatggactccatgtctcagggaaggagggagttcgaggccgaggtgaggatcataagccagctgaggcatcgaaacctggtgcagctgcatggttggtgtgatagccgcaaggggctcttgctcgtctacgagcttgtggcaggaggaagcctagataagcacatctataacaccgacaggatactcacctggccagagagatacaagatcattatgggattaggagctgcgctacgttaccttcatcaagagtgggagcaatgcatcctgcacggcgacatcaaaccaagcaacatcatggttgactcgtcgtacaacaccaagctaggggactttgggctggcaaggctcgtcgaccacggcaaagcgtggcaggccacaaggtccgtgctcggcacggccggctacatcgacccggagttcgtgaacacgcggcggccgagcaccgagtccgacgtctacagcttcggcgtcgtcctcctcgagatcgtctgcgccaagccgccggtggtcttgcaggagaacgagccgagcttcgtgctgctgaggtgggtatggaacctgtacagccagaacgcgatcctcgacgcggtggacgagcggctgcgtgtcgttggcgtcgtgcgcgacgagcggcagatggagcgcgtgctggtcgtcgggctgtggtgcgcgcaccctgacctgagtgagcgcccgtccatcgcccgcgccatgaacgtcctgcagtccgacgacgcgaggttgccggatctctcgccgcagatgtacaagtccaaggcgtcaccgcctccaagagatgtcgccgtgggggtagattacggcggtgtcagtacaggtagcacgttctcaggcagtggtgttcccacatcggcgaccacaacaaccacgcgttcctccggatcatttgttggttgatacaatctttgtgggtataaatacatttgcttattatctgttatcagaaaagggagaatattagttctgagcatcgggtagctatttctatcaatggtataaattttagttgtatgagaaatacattagttatttctaaattatagcaacttattatattcaaataatttccatgtttgtagcaaattgctaattatttgttttgatttttgatatcaatttaatagggcttcccatttggaatgacataatgggcatccattttagacaaatcacctcttacaatcactagtctctcagttcctgctggaggcttttgtatgttaggcttttcaaggacccatatacggctgttatatattcgatgtcaatccttcgtcc

SEQ ID NO: 15228 - DNA, 3606 bp, Oryza sativa
  ref <308>: DATABASE ACCESSION NUMBER: AK065758
  ref <309>: DATABASE ENTRY DATE: 2001-12-06
gagcttcttggagccttgacggaatctgggcgttgacctctaacctctaatcagagtctagcccccaatcctctcctcctatccagtgtcatctcttgtttgctcaagctctctccagcatggtggaagctgctgctattgcttttgccaagagctcagccgtttttgttgggaagaaagttgcagagacagtgatcagttatgttgtgaacaaagcccttgatcgccttccgctggagaatgaggatttgaagactaagttgaagagtaagctctccaaaactcaagcaatgttatatggcattactctgcaggagatccaggacaaccaagggttggttgaatggctttggcagttccgcgatgccatacaggaggccgaggatgcacttgatgagcttgacttctttgacttggagaaggtgtgcaatcggaaggcagaatcttcatcatccttggtccctaaattcatgagattgcagctgtctgtaagttctaataactccaacagcagtagaaagaatctcaagaatgctctgatgaggttagaatctgtctttgatgatgctgcaaatttccgagtggtaactgggcatggacttcacacttcccctcaacgtaatgaagggcgcatacaagatacgaccaaccgaaatgagacaacgagagtgttagcaacacctgtatttggaaggcagaaggaaaaagatgagataattgaatggctgggtgttgaggctccagggagagatagcaaactctcagtgtgtgcaatagtgggtgggggtggtatggggaaaacatctcttgctcagcttgtctgtcaagataagaaggttcaggatcatttcggcgacatgattatctgggtgcatgttcccaagcgctttgaacctgtagtgttggtggcaagaatgttggaatccattaacaggaacagagttactgcatcttctttggacatactgcaattagatctcactaaagagttggttactaagagatttttactggttctggatgatgcatgggaggatggggaaaatgagctatgggggcaatttttatctcccctgaggaacattattgcaccaatgggaggtagaatcttgctcacgacccgaatggggtcagtggctgatgctgttaaacgccaaatgccatcaaatgaatataaatgtgttgtactggggggtttagatcacagagatattatgcagatcttgaaccatcatgtgcctcctaatgaagatttggaacttcgaagtgtagctgaatggattgtacacaacctcgaaggatgtccttttgtagcaaaagtgattggtcagtacctcagagacaacactgatcatagcaattggaatgacttcttaaataaaaaaagtatgtcatttagacgatattgcacctagggttatggagatgctcaggttgagctatgaagatctaacctcagaggtgcagctttgctttcagtactgcagcatatttccatcccattacaaattcaggatggaagagcttaccgagatgtgggtgagttcaggattgatactgcaaagcacaaaggggaatagtggccaggagaaaattgctcgggaacacttcaatagtggctcgggaacattgggggacctgacggtgatggattgcctcctttcttggttaccttagttgtaaaagactgtctagatctgttgaatctacctcatctaccttatagtctaaagcatttggggataaataaagttggaataccttgtctgccagccagtaatcatatggcattacaaaacgtttctacagttgatccacagctgtgcagtcttcatgtagattcttgtcctaatttgtgttccttcggatcatgtatcgtagaagagcaacactacaaagctcttactagcttgaaagtcgtcggctgcagcatgctctagaagctcccaagtgaagaacattttagaagaatatccacaatggagagtattgaaatccttcaatgtcagagtttgtcgaccttgggtggcctaggagcacttgcttccttgaaaatactgaaaatacagcagtgcactcatctaactgctacatcttcaggtattccggtagcaccagctatgcagtcttctcttgtgcttgacacccttgaaattgataaccatcttttgcttcttcaaaatccatttagaaacttctgcctcactagaagacttgtatctaatggatctgaaatgcttgagttgcctcaggaatggttattgcagaatagttctcagttggaacatatagaaataaacaatgcaaatctgctcagatcactgccttcaactatggacactctgcactccctgaggagtctggttctgtgtaatgctcccctcctcgagacacttcctgctatgccccccaatctgtgggctcttcaaataagtggttgttgcactcgtttaaaggtggggtgtaaaaccaatggttctgaatgggagaagattttgccaatccataaagttgatataaactaacatgttattaggcaagagaatattccatctcacccctagaagagaagatggttcccaactctagtggccttatttggcaggctggggttaggcaaaaatccaggccctttccctagccatgaagaggaaaacaatccacgagtgagggcgttctcgaatttcagaacttttgatgcatgctgtgcgccctatcaaagatttgatattacattaatattataaagccatcattttaactctatactgagcaattaaactcaagtgagcgattttattttattaaaactaggaaggtagcccgcgcattcgcgcgggcatgcatattagattgcgttagaaacttataagaacagaataccaactggattgtttgtgttgtaggtcaaaagtatgatttccaaaaacattcttcatgaagcgtcgcggttggcacctcgcctccatttgtcatctttgctctagggaggaagttcttcatgaagcgtcgcggttggcacctcgcctccatttgtcatctttgctctagggaggaagttcttcatgaagcgtcgcggttggcacctcgcctccatttgtcatctttactctagggaggaagagactttgctcacatctttcaaggttgttcttacacacaagaagtgtggagtagtatcagagggtggttagggcttcgttgctcaacgccgatggagagtcttccctcttggtggtgtgatgctcgcaaagcaatcaagaagcgggacaggagagcttttgatgagagcttttgatgcgggcatcatcttggtgacatggctaatttggaaacagcgcaatgctcgtgtctttgaggggcatgcagtgttgtcggtgaatctttgtgccgcaatcgaggatgagtggaaatcgtggcaagaagcgggcttgacttcctctctttgagttgtaaagtggaggcgtgggttttccctcgccgttgttgtatacataaggattgttttattttgtagtctgtggttgcacgtcgttttcttgggtgtgctaggtgatctgtaaattctttcccccctcttaatatactccgatcggttgttttccg

SEQ ID NO: 15229 - DNA, 2061 bp, Oryza sativa
  ref <308>: DATABASE ACCESSION NUMBER: AK065759
  ref <309>: DATABASE ENTRY DATE: 2001-12-06
cagagtggagctgttgagcaccgacgcccctggctaggaacggcggcagatctggcggctcggtgcgaaagctgaacggcggcagttacaagcccggccgtcctccaggcgcggtgatcctccaccgccggccgacctcatccccatcctttctcccgccgtctggtcgccgctatttgaggtgcgccgggcggtggctcggtggagcggttgagcgacggctgtcggctaggagcagcgacagagttggaagctcggtgcagaaggtgaacggcgacggtgacaagccggccgtcctccattcgtggcaatccatcaccatcggccaacctcatccccgtcttctctcttgccgtctggtcgtcgccattcgagatgtgtcgcccgggttcgtcgtcgctgcataatccacctgccggcctggatctgccctccctctctggcgcacctgccgcttgtctcctctcactgctgtcgtcgaggggatggggcccttccggccgccctcctcccaggtatagggcgtcactatcctcatccaggaagatgcaggtcagtgcatacctgttctaccacttagacatctctctgtatgttttgtgttctcgattatgttttgtggtcgaaggttgtatgcagtgatctaggatttgttttccgcgatgtgtcaatgatagagtagaagcagatcgagagatgctgattttgtactagtatgtagtgaatctgaatgtatgattacatttttttttcctgttgatgtcacgaaacactgtagggcagcatttagatatcagagaattcatgagactttcaactataatcctatcaaacttcttgctggttcattttttatatgtgatctggatttggtttgtgtaacactaacatccactgagattctgaatttttcaggcttctatacatccactggtttctgtaattgataggttagcaggcttttctaattgattttttcgtgaatgccgcttttgctggatcagcatcatgcgtgaatagtcctgttgccaggctgttgtttttgcaatgcatgaagcacctaattttgatgctctcatcagaatttttatgtgttcagtcgtgaaattgtttatgcaacatgtatgttcaaaaaactgctcccatctgtatttcatttgttcagtgatatatttgtgtgtgcaatgttcggaacaccgccaataccaccatcatcaggttctttgatatttatgatagattaaaatttaagaagtttgtgtgtgcaatgttcggaacactgccaataccatcatcatcaggttctttgatatttctgatagattaaaaatttaagaagctcgattcaatagcagttctctgaaatttcgtggctcaacaaagcaaatcgattgattttctctgaattgctcactacatatggtcctatagtacatattttttctctgaatattttgacgcaacaaacttcacactaaaatttctgaattttttggttgaacaaagcaggtggttgatcctggctattgttcttcgtggtcgtgggtaacctgcttctgctgaggagaagatctggagattctcatgtccttttgtctcagttctggattgctgcaacaatgtgtctatgcttgcgttttcttgatctagatctcgaggcgagaccgtactggtgttattgcatttaatttgttttttttcccgattcttgggtaaatgcttcacttgggcttgttgagtttccaggaaagagatccaggaggggagcactttgggggtgatttatccttgattctaaaatgggaggatagctggcaccagcgtggtggtggtgtttttcttggatcacgatgaatatgtgtatttgtctagttgtggtgtttggcgagttgggatgttacgtgcagcagtatttttctcttttttccccttatcatgagaatatgtgtattttgtctcccatgtgtaattttgttggtcacttgatagaacaaaaattcaattattatgacataaccatgttcttgttcttgttaatatagtgaaaaaaatattatttac

SEQ ID NO: 15230 - DNA, 2197 bp, Oryza sativa
  ref <308>: DATABASE ACCESSION NUMBER: AK065760
  ref <309>: DATABASE ENTRY DATE: 2001-12-06
ggcgtctccgtctcatcccttctcgcctcttattattcttcttcttcttttctttatcctgtggaaggcgttcttgggtggggagagatcaagaaccggagctgtccgtggccggtggttcgcctgtcccgagctcgattagttaccctttgtctcggttcttggtgcgtggtcaatcgggactacagagaattggagtttcttgtgggagtttcagggtcacttcgaggtgaaagcggactgagcgggaggcgaggcgatcgacggcgaactgaattcctagtttgttgcaggctcaagctttggttttctgaagtactggaaacgttctcgattggcgaaaagtttgtgagatttttgtcttctggctacagaaaattcgaccctcagataacctcgagtcatgggttggttaaataaaatatttaaaggttcagtaaatagagtttcaaggggccattatgatggaagctggcatgaaggtcattcatcagataacgccagaggagcgtatgatgaaagtgataatgaagatatagatcgtgctattgcactgtctttatcagaagaacaaaataagggaaaagctgttgatatcgattataatttggaggaagatgaacaacttgcacgagctctccaggagagccttaatgctgactctcctccacgtcagaatattcctgttgagaatgttccatcagagcccccaagagagctgcctccgattctatttgcctcaagtggatccagaacttgtgctggatgcaaaaacccaattggtcatggacgttttcttagctgtatggattcagtatggcatcctcagtgcttcaggtgttttgcttgtaacaagcccatctctgagtatgagtttgctatgcatgaagatcagccataccacaaatcatgctacaaagattttttccatccaaaatgtgatgtctgcaagaactttattccaacgaacaggaatgggctgatcgaataccgagcacatccattctggatgcaaaagtactgtccttcgcatgaagatgatggcactcctaggtgttgcagttgtgaaagaatggagccgatggacatcaaatacatcacattagatgatgggaggaaactctgcttggaatgtctcaattcttcaataatggatacaccagagtgtcaacagctgtatatggacattcaggaattttttgaaggtctgaacatgaaagtggagcaacaagttccaatactcttggttgagagacaggctctaaatgaggctttagaaactgagaaaaatgggcatcatcttcctgaaacaaggggactatgtctttctgaagagcaaattgtcagaacgatcttaagaagaccaataattggaccgggaaacagaattatagatatgatcacagcaccatataagctggaaagacgatgtgaagtgactgcaatcctgatattatatgggttgccgagattacaaactggctcaattctcgcccatgaaatgatgcatgcttatctacgtctgaaaggatttcggtctcttagtcctcaggttgaagaaggcatatgccaagttctttcccacatgtggctcgagtcagagatcatctttggttctagtatcgacatatcagccacctcagtggcatcttcgtcgtcgtcatcttcaactccaaccacatcaaagaagggcgcaaagaccgaattcgagaagaagctcggagcattcatcaaacatcagatcgaaacggattcatctgaggcatacggagatggttttcgagctgccaatcgggctgtcgaaagctatggcctgagaagtacccttaatcatatgaaaatgacagggtctttcccatattgatcattcctcaattgtgaggattgatgcatatttggagattattggagttacatataccctcatcatggtagcattaatttacagtaaattgagaaaagaaagaagaggattgaataggacataaattgcaccaatgctttcttgttgtctttgaaataatacatgtaagtcttcctatagagaggttttatagtttttcacagtgaacacatccttggaaaagaacaggcaatcagaagataattttgctgagttatgtacttatgtaacaccttttgtatctgaatgtatttatttcattcactccaataatttcatttttatttttgaagg

SEQ ID NO: 15231 - DNA, 2759 bp, Oryza sativa
  ref <308>: DATABASE ACCESSION NUMBER: AK065761
  ref <309>: DATABASE ENTRY DATE: 2001-12-06
gaggtaagcctacgcgtcgacccagccaaaagctatagcgattcggctctcggtttaattcgatctcgagttgtgttaattttgttgatgagtttggatcttttttagtgcaattcgatcgagtttttttttaaaaaaggggagttgcttgtttgtttttttggttggtgatgatgagctcaggtagctgcggaggaggaagaagaagaggggttggttgttgttggccggaggagcaccgccgacgatggtgacagtggcgccgccggcatgggaatagcggcgccaccgtgtcagccagggcagaccaccacgttcgtcataagccaacccaccagcagcaagagctccccggcggcgatcgtcgtccggccgccggccacggcgagttcttcttctatgtcccactcccagggtttccaccagcccagcagcggcgccgtcttcggcttctcctccgcatggcttcgacggccgcccccggctccggccaagaccaccagcagcacgagcagcagcagcagcagcacgtggcgcagcagagccgccgcgacaagctgagggtgcaaggcttcgacccggcggcggcggcggcggggcacgggttgctccccatcgagggcgacgagcatggcgcggagcccggcgccatgtacgaccacgcggaggcggcggcggccggggcgtcgaacatgctctccgagatgttcaacttcccgtcgcagccgccgacgggcccctccgccaccgagctgctcgccagccagatgaacgccaactaccggttcgggttccggcaggcggcgggtttggccggcggcgaaggcggttggttcggcggcggcggcgcggccggccggactgggttggtgctcggtggggccagcttgggttcgttaggtgagacgtcgtcgccgaagcagcaagcgagcggcatggcgggcctcgccgctgacccggccgcggcgatgcacctgttcctgatgaacccgcagcagcagcagcagcagcagtcacggtcgtcgacgtcgccgccgccgtcggacgcgcagtcggcaatccaccagcaccacgaagcgttccaggcgttcggcggcgccggtgcagcagcgttcggcggcggcgcggcggccggcgtggtggaaggccaggggctctccctctcgctgtcgccgtcgctgcagcagctggagatggcgaagcaggcggaggagctgcgcgtccgcgacggcgtgctctacttcaaccggcaacagcagcagcagcaggcggcggcggcggcggcgtcggtgcagcagcagctcccgatggcattgcacgggcaggtcggcgtgctggggcagcagctgcacggcggcgggtacggcggcccggcgggcgtcgccggcgtcctccgcaactccaagtacacccgcgcggcgcaggagctcctcgaggagttctgcagcgtcggccgcggccagatcaagggcggcggcggccgcggctccgccccatcgtctccttcctccagaaccagcagctcgtccaggagctcaggccagacaagcagtacaacctccacatgctccaggaccgcttccagattggtcctgagcagattgagactctgtatcagtttgccaagtttcagtttgactgcggtaattactcagatgctgctgtctacttgtatcaataccgtgctttgtgcacgaacagcgagaggagcttgagtgccctgtggggaaagctggcagccgagattttgatgcagaactgggatgttgcactggatgagctcaaccgtttgaaggagattattgattcaaagaacttctcatcaccactaaatcagctccagaataggatatggctgatgcattggagtatttttatcttctttaaccatgaaaacggcagaaatgggatcatcgatctgttcttccaggataggtacttgaacgcaatccagacaaatgcaccccatcttctgagataccttgctacagcagttgtcgtgaacaaaaggagaaggaacatgcctaaagagttgattaaagtcattcagcaggagcagcacagctacaaggatcccatcactgaattcttggaatgcttgtatgttaactatgattttgatggtgcacaacagaaactcatagagtgtgagcaggtcatattgaatgatcctttccttggaaagcgcattgaggaagggaattttgtcactgttcctttgagagatgaattccttgaaaatgctcgtctgtttatctttgaaacttactgccgtattcatcggtgcattgatattggcatgctttctcagaagctgaacatgagctacgatgaggcagaattgtggattatgaacttagttaggaattcaaagctcgacgccaagattgattcagtgtctggaactcttatcatgacgaccaatcatgttaacatccatgagcaggttatcgaaagcttaaagaatcttaacatgcggactttcctgctagcaaagaacattgtggagccggctcaagcagcacaacaggcagctcggtgagattgacagagaagaccacagttttgaggcgcccggaattatttaagtagagacaatcctctaaacttttggagttttgttgtttagcattgactccgttatcagtacctaagatcatctaggaggtggtttctcgttcgctacagcatatgccgacgttttctttctattttgtacttggaatcctgtggctgaagttaatcctttcgttggtact

SEQ ID NO: 15232 - DNA, 1876 bp, Oryza sativa
  ref <308>: DATABASE ACCESSION NUMBER: AK065762
  ref <309>: DATABASE ENTRY DATE: 2001-12-06
ggggttttggacgccagcggaacggaatgtggagaggtgggtggggcctcgtggagattccggagttcgggggaatggacggtcttgattgactaaggacggcctcgagattcgtgctcgcggaacttgccgacgcggcacggcgacaggtggcctctcgctctccgtccggactcccggactcttcctccgccgccgccgccatggcgatgggcgcggcggtccggcggatgcacgccgcaacggcggcggcggcggcggcgcagcccccgcgcctgacgaagcttgcgctgcacccgcccagatcggtgagttcctcctcctccgctctcggcggctaatttctttccgcttagatcccgtgcgctttgcctgttccttgcttccttcctactgttggttggtggtacttcgtttggtgtcgcgaagccaagtgcactttcggttccaaactcgctacatcgccgcattggaccacctgctgtattgctgctgtgccgtcgacttcacttcatccattcatttactgttgtaacttaccttgatccttctgtttgagtaatgggattgcgaagtgactagctggaactcgaattggttctgagagtattgctcttttcggcaacggggaatgtagcgaattcatcatacattcatactgttcatccgtgggtgaccagacagcgaagtatgaaaagaatcgctagtgagcactacaattggtccccgctcttcatttttccaattgggtgctggaaatcttgtgaaatcttgcgtgcgatccaggtggagctccaaatcagtggcagcgaatagtcagtcatctttatcccaaatatctcggatcatgtccttgtcaaagttcctgccatggacataatttgaagatatttgttggtgattgtttggtcgtgtacacataatggcatcagtcacaattggattgagcttacaagccacaattaataatgaaaatctcacattgactgaagtgctatagccatcccatgataagtgctctagtttatgtgcaattttattgtagaaattactgacataattttcttttcattttttctcattaatatgatcttgctgaacaggtgttcctccatattgctgcatgatgcctcatgccttgatcagggtattggtgactattgagctatatttactgttcttcacaggtggaggttgaattcactgatggtagctcattccatctgtcagctgaatttctaagagtacatagtccagcagctgacagcaaaataatatcagtatctggtgagaaggttatatttgggcgacggtatgttggaataatgtcagctgaatcagtaggaaactatggaattcggatactatttgatgatttgcacaagacggggatcttcacatgggattacttgcatcatctgggttctaaaaagttcagtctgacgcgaaattatatcagaactttgagaaagcatggtcttagccgggatcctcagagaaggaaatgatgaacacaaaccttcactcagattcagattgtgacacgaggaaaacttatgtacgctttccgtaccaagtctcagtaacagtaatgactgctgctgccaatgctggagagcactagaacgagaaatacagaatgtatgaaaccagataatcaactgctgaatatagtaacagttttaggaatggcgactgaatactgatgatactctagggttcattctttgaggtttaagaatgagggctgctgttttggaggctgatgtttcagcccatccaaaaagagctgcgtgtagtgcgtgagatctacgcgtgtatctgacggagaaaaagaaacatacgacgtttcaattggctggaatgtttttgactc

SEQ ID NO: 15233 - DNA, 2761 bp, Oryza sativa
  ref <308>: DATABASE ACCESSION NUMBER: AK065763
  ref <309>: DATABASE ENTRY DATE: 2001-12-06
gggttggcggcttggcgcggccacagaggcatcccattcccacgcggcctcgcccaagaatcctcctctccggcctcgacgcatgctcctgtttttggaaggaaacgaagtgaagaaaaagatcagaaaaggcaactagaattccaacagcctgttcattgttctgtgaaaaaggggcagttcttttgcagtgtgtatccatttattcgctgtttcttttggtggtttttttggaggcggaaaaaaaattctgttcgggtgcctgttcctgcgtgtttcgagggtttgctcagaggaagcagaggatcgaagggggaaagattgtctctctttcttttttttttcgcatttgggttctgagattgttccgcaacagggacctttcttgcctgtgagattctgaatcgcccgaggctggaaagattgaaacttcacggcgaggtctgcatgtttggctgaagacggagggggataaaggaagcagagggtcggtctgatgatgcagttccgcaatcttctttccttttgcgtgttcaggtcttgatgagatatattccttcctgtcaagtttctcaattttgacgtgaattccgagtccggggcatcttgaggaaaccgaggaagcacggcagatacaagggtttctgttggggctatcggatcatttctcatctgtttctgcttatcttctcttggtttcgcgattgctcgagattcaaagattgggttttgattgtctggagattgaagaagctagtaccattgttgggtacttgggttcacggctcaagggtcaaagaaaaggggcagacatggctgttcagatgatttagcaggtcattgtgtaggaacagttgtcaggcgccaccttgctttttcctgtattcatctggtctgggttcttcgaactaaggttgtaaacttgcctggtgattaaacgaatctgtctgacaatgttctcctctatcatggcaaagaagagttacaaacagcggtgcaaatctgagaaggtccatatgggctgtatgtcgggcctcatccacatgtttgacttccgtcgcagtccaaaacttatttcagatgggacgattaggaggagttcagtcagaagtgacctgaaaggttctgaagatttccatggaatcatcttttctgatgaggacaaagactatggggttaaaacaattcatgccagcaggccaagtattaaagcactgatggaagaagagatggccagtggaacgcagatcttgaaggaaacacaaaggaacatatttgggatacgttctgatgatttgaagtctgtgaacctgcaggaaggatctgatgttgacctagacttggctacaagtctcatggaattatacagaaatcataatggcagtcgcgatattatcacttcggaagtatcagatcactcttccagtttgattgacaaagagcacaatactgatgctagtactcatcctaaacaaatctcctgtagtatagagaaagcacttgaagctgtggctgaagcagtaataacccatcaatctgcaaacgggaaatacacaagcagcagctacgaagctaggcccaatgaatttcttgatgcattacaattgctgagcgcaaacgaagagttctttctgatgcttctgaaagacccaagctctaggatgttgcaatgcctgcagaacctgtacacggcactaggaaatcccatgttagaactggcagaagatgacaaacaaacaaagtcgaaagttaccattaacagtctagagcagtctgaggtttcgaaatacagcgtgcaaaaaacacataattttttcttgaaggaggataagctagtcatgaggagaccaccaaaactgaatgatagtcctcgtggcgttagcagaatagtaatattgaagccaagtcctggaagaagtcagactagtctgatttcaagtagtgcaatgtcgtcaccagtacaaactcgtgctgatttgcaaggtcaggaacaaagtgacaaatatgctcgccatttctcacttagagagcttaaaaggaggctaaggcttgccattagtaacaatcgaaaggatgtcatgagtagtactttccagaaagatgattcaacacaacagttcattctcgagagtatgtcgacaagtatggactcttctgaatgtgaaaaggctgagaaaccctcaatagttgacaagaaaacaatccctgaagatagtggaagtggcatggggaatgatgccactcattgtgctagctctttcttctacgaaaaagctaagaagcatctaatcgagaggctagacaatcaaaagaatgacacttctcagatcgtacacaaatcagaaccctttgggaaattactttcatattcggagaatgatacgttttctcaaactgattgtcctcaagaggatgttaaactgtcagaggattcgactgcttcatcagcattactgacgactgaacaagaggatatttcatcaaattctgacccaccaatgaagtttggggagctaataccattggacaccagcacatcggctaacacacagctggatgaatttaagacagaccatgccagtcatccagtcaaagagggcactatctcgcaggagttaactagtgaagggattgacagcatgaatgatgcaacagataccccccaagtctctattcagatcgaaacttcaactgaaagcttggaacaaataaataccgaccaatgcttcgcagaagagtcacaaaccatgaatgcattacc

SEQ ID NO: 15234 - DNA, 1823 bp, Oryza sativa
  ref <308>: DATABASE ACCESSION NUMBER: AK065764
  ref <309>: DATABASE ENTRY DATE: 2001-12-06
gctgactcgcgatttcgcgccgtgccgccgcccgtccggtcgtcccggcatcccgtctcgtcgcctccctagtccggcgacacgccgacgccagaatgccacgccacggcgccgcaccagcccgccaccgccactggacgccagcgcgctgaagttgaaaacctgggcctgccggcgactgtgcggcagcagtgaaggaaaagaagtggggcgtggggtggaagcggcgaaggcggggggcggcatcggcgaaggcggggggcggcatcggcgaaggcgaggtgcgacagcgtcggaggctgggtacagcagcgatggagggggggggggggtgcggtagcagtggtttgtcctggtactctgccgtcgagatctacagtctgcctgcctccggcgtggctcgcctatcgacgagctccattggcttcccttggagttcaaccattgaagagctccactgattggcctgatggatagacgatggatacatggtgcacttttcacaccagattatattgatggtgttcgaaatttcatgaaatttgttgaagagcgatttcctggggatgctgcaattttgtgtccatgtagtcggtgtattaaccagaaatccatggctcaaagagatgtggagaggcacatattgctcaatgggatgtctagtacatatacaagatggattcatcatggagaggccaatgatgttcatgttttggaggaaccagtagatgtggatccacattctaatcctatagaacatgaaaacaatgctgcagatagagttgaagatatcttaacagacctcatgggggctcaagtaccttgtaataatgcagcaaatggagatggcaacccatctagtaaccatgagtctgttttcaaaactctgatggaagaggcaaagcatgagctatatcctggttgcactcaattttcaaggttttcatttgtagtcaagatgctccatttgaagtcatactacaggatcagcaactcagcattttctgcacagttgaaagtcttgcgcaaagcgttcccagagaacaattgtcttcccaattcatatgaagaagcaaagaaaatgctgcgtactttaggactgggttatgtgtcaatacatgtttgcccaaacaattgcgtgctatttagaaaggagtatgcagaacttgatacttgtccagtttgtcaagcatcaagatggaaagatcctgtgaataagaaggttccagaaaaagtattgcggcattttccgttgatacctaggcttcaacgaatatttgctaccaagaaaacagcagaggaagcacaatggcataagttgaatagggaacccaaagagaaggaaatgtcccatcctgcagatggagaggcatggaaagattttgacaaatgctggccagattttgctgaagatgcaaggaaccttaggcttggcctggctacagacggtttcaatccgtttggcaatatgaagctcgccaggttgttgatgcttctgaagttgctcgacttatgaagcaaaatcgacctgctgaagatggtgaatcgtctggtgatgagatagaggacgacacggctgtggaatattggagtgaaggtgaagttgccccagttgaggtagatagcgatgatgagtagttcctgttgtgacatgtgtatgtgatgcccctattggcattttatgaacttatgtttgtcaacttaagtcagtgcgacaagtattgtctttgtgagctgagatcttttgtgacatcctgtccaaattgtgtgaattatatattctgtcagcatgtgaaaggccatcatgcctatatacttctacc

SEQ ID NO: 15235 - DNA, 2572 bp, Oryza sativa
  ref <308>: DATABASE ACCESSION NUMBER: AK065765
  ref <309>: DATABASE ENTRY DATE: 2001-12-06
cttattgagctcaagggtgagagcatcagctacaacaaggtccatatttcagatcttgttcaagacttatctggaacagtcaaacttctacctttaatgtccaatggtgtcatagctttgcaagcatcttctactgtttcccttctgaaacttaaaggaatcgatgggttggaagtaattcagagctttgaacaaccagctgctgtgagtgatgcgttgacaatcacagaaaaagacgaagcttttgccgttgtgcagcatacaggttctgaaatcgaatttgtcgtcaaatttacaagtgatgtcaccggtgaagttattagagaaaaaattaatatagatcaacataggggcaatattcaaaaggtcttcttgaataactatatccgaacagataaatcacatggttttcgagctttggttgtaatggaagatcattcactcttgttggtccaacaaggggaggttgtttggagcagagaggatggacttgcatcaattgttgatgtaacaacttctgaattgcctattgagaaggatggtgtctcagttgctaatgtggaacataatctctttgaatggctgaagggacacatgctgaaactcaagggaactctaatgcttgccaatgctgatgaacttgctgcaattcaagcaatgagactgaaaagctctgagaaaaataagatgacaagagaccataatggatttaggaaacttcttattgtattgacaaaggctggaaaagtgatagccctgcacactggagatggacgtattatctggtcaaacttgttgcagtcccttcgttcctccaagtctggtgaaatgccttctgccttaagaatatgtcaatggcaggttccccatcatcgtgtgatgcatgagaacccatccatacttatcattggtagatctggagcagatagtgctgctcctggtgtcctatctgttcttgattcatattctggagaagaacttaactctctgaagttagaccactctgttgtccaaattatcccattgacagtgaaggattcatctgaacatcggcttcaacttattgttgattctcactcccgtgctcatctctatccaagatctccagatgccatgaatgtatttcttcatgaaatgccaaatacatatctctacactgtagatattgagacaaatgttatcagggggcattcattacaaaagtcatgtgacaattcagctgatgagtactgctttagcacaaaggagttgtggtctattgtttttccttctgatacagaaagaattgctatctccgaaacacgaaagatgaatgaggttgtccatgcacaagcaaagatcatagctgatcaagatgtgatgtacaagtacttatcaaagaatttggtttttgttgctactgtgtctcctaaagcttctggtgaaatcggatctgcggcacctgaagaagcttggcttgtggcttatcttattgatgctgtaaccggacgtatattgcaccgtgtgactcatcatggagctcaaggccctgtacatgcagttgtaagtgagaattgggttgtatatcattatttcaatctccgagcccacagatttgaaatggcagtgattgagatatatgatcaatctagagcggacaataaagatgttatgaagctgatacttgggaagcataatctgtcagcaccaaccacttcttatactcgtccagaagtaatggtgaaatctcagtcatacttctttaccttttctgtcaaagcaattgcagctacacaaacagctaaggggataacttccaagcagcttcttattggcacgatcggtgaccaggttctggcacttgacaaacgttttgttgacccacgtcgttcagtaaatcccacccaacaagagaaagaagagggcattataccactaacagatgctttgcctattattccaacgtcctatttgacacactctcttcaagtggaagctctgcgaggaattgtttctattccttcaaagttggagtcaactactcttgttttcacatatggtgtagatcttttctatactcagcttgctccctcaagaacctatgactcactaactgatgagttcagctacgcgcttctactcatcacaattgctgcattggttgctgccattgttgttacttggatttggtctgagaaaaaggagttaagagataagtggaggtaagtgaggcctcaacacgatgcagatggatttcgggccctagtcagcatcccttttcttttgccatttttgtttgtagtggtagcctctgctagggtccatgtcacttttgactaggcctttctttatgtaaccatcttctgggatgacactcttttaagtcttatagaaagcctcctgtgcgattagaaatgctgcgaatggcattgaaaaactggtagagtgccaacggcaggcatggattgcttatgagttgtaaaattttaccgcagcaactaaactgtttagcagaatattagttattgttgtccatagaacatcaatctcttgtaacttatttcaacttggcatgttccatcattataccttt

SEQ ID NO: 15236 - DNA, 2013 bp, Oryza sativa
  ref <308>: DATABASE ACCESSION NUMBER: AK065766
  ref <309>: DATABASE ENTRY DATE: 2001-12-06
gaatcattgtgcctcgagtgtctcccgtacgtctcgcctcgcctgcgccgatccccatctcgcgagcagagcagggaagagggaagaggcgccgtcgtcgcgctgcatcctgtttgcaggataggtgatgataaagcataatagttgaccaaactcgctgtacttctccttaatcaattatgttacaaagaaatatggtgtggacacatcaagttgccagtcctgaaaaccaagttcaacctgaaagtttctatcatggaggtgctgggagcaacttatctaacctgagtgtgcaagttgctgttggagttccaggaaatactgatttccggagtcactatgagagcattaatcttcagcaccagcatgttcagaatccatacccacatgtgggtgttgcttcaagttctgtgttcccatctactatgtacaacccctgcatatcaacaacagcagtggacagatatgttcctcctattcaaagttttggattgggcaatccactactactgcctttatatcatcaacttgctcaaggatccatggatgagaacggcagcagtggcaatttttgtgacagcgtcagggaatttatcaagaggaaaaatgcattacttgtgggtggccatcattttgttaatagttttgcaagctcaagctcatctgcttatgtgcctccaaatcctttacataggtcatggaacgcttcatttgaagcaaatatcctacccagcactggagtttccaatccaccagagtactcttctgcagattcactgaacaattccaattcgatggcttcacatccagaattggtgcatcatggcaattatgtatttccagctggtcacatgagccaatacaatgcatggattgcacaggcaagcagaactggtggagtaccacagtgggaacatggcaatgcagcggctaatcctccaggtggatttgttcattctggaaccatagacatgccaaatggaggtcttcagggataccaagctggcccttttgccaattattatgggcctctgccccatttccaccaaaatcctctgaatagcatgcagcatcctgctctatttaatcatatccaaatgcaagtacctcatcaacattgcctcagtaacaatttattgcatcacccttctggcaatggcctccccttggatccaagaattctggcaatttcatccaattctgggcatacctttgggcctacagctcagccatctttagcaaaccaagttaatgctgggagttcgagaattcagccatatgagaatgctccgttcgtggatctttcgagattgtatgaagcaggagttattgatgaacatagagatatgcggcttgatgtagacagcatgacttatgaggagcttgtagcgttggaggagcggattggaaatgttaatagtggttttacagaaagctacattgaggaaaatttgaagtcaagttcttatgtcccggacgctgattgcatgcctgatcagtcttctgtggagaaggatgcttgcataatctgccaggaggaatatgaggctaaagaactcgttggaacccttggttgtggtcacaagtaccatgcgatgtgcataaaagggtggctgatggtgaagaacctgtgccccatctgcaaaacaacagctttgccagctgatagaagaaacggatgatggatgccaataacatttattggtcatttgcagcaacaaacattcagctcagttttgtacataagacatgctggataatggttgtgcctgtatttccgttgttgtgatacctaaagctgtacagtgagaatcgctcatcttgtagattgttttagacactaaatgttccatgatgcgcgaacagctatcatcatggcatagctattagatcgctcaatttttccctttttattgtacatgatatttatctttattcttttcccaaaaagaaaaaagagaacttgtagttcttctgtacattgtgaaattcaaagaactaaaggagtttctc

SEQ ID NO: 15237 - DNA, 3053 bp, Oryza sativa
  ref <308>: DATABASE ACCESSION NUMBER: AK065767
  ref <309>: DATABASE ENTRY DATE: 2001-12-06
gtgcgctaccagccagcacaggtggtgatctcatcatcccccgcccgcccgcgcgcgcgttcgcgctcccccgcccccaccaccccagatcccgaggccccgctccgccgcccgcgggatcgcgggccccgacacaagattttgcttaatgctactttatgcgtgtgtggataatggagtaatcactgctctgtgtatctgagctcacaccatgggtagcagtggcgcagacgcaccgactaagacaagcaaggcatctgcacctcaggagcaacagccacctgctagttcaagcactgcaacaccggctgtttacccagattgggccaactttcagggatatcctccaattccaccacatggcttctttccatcacctgtggcgtcaagcccacagggtcatccttacatgtggggagctcagcctatgataccaccatatggaaccccaccaccaccatatgtcatgtatcctccaggagtatatgctcacccatctatgcctccgggcgcacacccatttactccatatgccatggcctctccaaatggcaatgctgatcctactggaactacaactactgctgctgctgctgctgctggtgagacggatggcaaatcctctgaaggaaaagaaaaaagtcccattaaaagatctaaaggaagtttaggtagcttgaatatgattacagggaagaactctactgaacatggtaaaacctctggggcatcagctaatggagccatttctcaaagtggggaaagtggaagtgaaagttctagtgaaggaagtgaagcaaattctcagaatgattcacatcacaaggaaagtggacaagagcaagatggagaggttcgaagttcccagaatggtgtatcacgttcaccatcccaggcaaagttgaatcaaactatggcaatcatgccaatgacatcaagtggtccagtacctgctccaactacaaacttgaacataggaatggactactgggccaacacagctagctccactccagcaatacatggtaaagcaaccccaactgcagctccagggtctatggttccaggagagcagtgggtgcaggtttgttctattagcccttcccttcaagaaccgtgcacttgtaatattttcttcccgttgtagtattcgctgctgtgcttcataaatgcttttctccacttagggttccgttagcaaccctccattaagtactataggatgaacagtgcatttatcggtgtgggatggacggaaccctaatggcgatggcatttatgggacaaaatcgcttgtacgatgacattttatggaacttgcactcattgatagcatttcttggatttgggtgtttgtcaatggcatttcttcttaggtacagacattcatcagaaaaatcgtggtgttagtatggagtatgaatttcataggcgcatttcaagttaaattgatatattacaactttttattcttatttgggtgctcttcacctctaaaattatgtattttctatctcaatcctttcattttggcatgccatcattcaaaataagatgttgagtccttatatgaaatacaaaaaccatagaaatggcacttaatcatcaacaatcctatggatacaaacatgaagttttcagtttttctggcaaatggagaaattagtcgtgttgactctcccatgattcaggatgaacgggaactcagaaggcagagaagaaaacaatccaacagggagtctgctcgcagatctaggttgcgtaagcaggctgaatgtgaggagttggctcaacgtgctgaagttttaaagcaagaaaatacttcacttagagatgaagtgaaccggatcagaaaggagtatgatgagcttctatcaaagaatagctcattaaaggaaaaacttgaggacaaacaacacaaaactgatgaggcaggagttgacaataagctgcaacattctggtgatgacagccagaaaaaaggaaactaattgagctatcgtgcaatgctcctgagcataaccctaactagattattggcaggcgcaactgtagaagacagttctggggttaaatttctcatacaagagctgtgcatagagccatacaccatagtttaatttgggctggccaacacattgatcttcagcaaatgcatgggaagctgctgaaggctggcaaatttgggttgatgctgctccaggttgcagggatggacttgtggcagaactcatgttgggagaggttagcgaagacgtctccaaggaccggtttgcccctgaagctggtccaggtgctgcagttgctggagcaaggtggccagggcaagctgacccttttcctcttggtactattggccttataactccattgattccatggcacctgaacaaatctcctacgcggcagacgtcaggactgatgagctcaatattgttgaagtagatcttctggtgcttcacattggttattgtgattgtctggctcgaatgggctgtgggaactattgttgcgttgggaagcttgatgaggtcgtcgaacatgagcggagccgggatggaatgccttgacaggaactccatcacttggctctccgggatggttgcagttgacagcatcctgtcgttgggcatcaggaaggtggtgttgtgtgggatcttctcctgcaccatcctgatgagcatgacgaaggtgaagtagcgggctcgctgcatctcctgtgcagtggaggcgatgtcgccattgcccaccaccgccgatggggaaggcgtagcagcgacgttggagcctgacactacgagggcaatgagcaggctagcagcaaggaaggaagccatggggggtaagtggtagcaagaggtacgagctcagatcttgtattgtattactagctccttgctgccatcaggctgccatgctttattcttgttaagattgtgggggttggagatggatgggggtgtgctgctgctgctgcttgtgcctgcatgcatgcttattacctgcgtgaactactctgttgcatttcaggctttgagcatgtttgaactact

SEQ ID NO: 15238 - DNA, 1187 bp, Oryza sativa
  ref <308>: DATABASE ACCESSION NUMBER: AK065768
  ref <309>: DATABASE ENTRY DATE: 2001-12-06
ttgatctcccaaagaagcatggtagaggaggacaatctgctttgcgttttgctcgtcttcggatggagaaacgccataattatgtccggaaaacagctgagcttgctactcagttcttcattaatcctgctacaagtcagcctaatgtttcaggcctaatcctcgctggttctgctgattttaagacagaattgagtcagtctgacatgtttgatcaacgacttcaagccaagatacttaatgtggttgatgtttcttatggtggcgagaatggtttcaaccaagctattgaattgtcagctgagattctagcaaatgtcaagttcatacaggagaagaagctaattggcaagtattttgaagagatcagtcaagatactgggaaatatgtctttggggttgatgacactcttaaagctcttgagatgggtgctgttgagactctaatagtgtgggagaaccttgaaaccaacagatatgtgcttaagaacagtgcgtctggtgaaactgtgatcaaacattttaacaaagagcaggaagctgaccagagtaatttccgtgatccggctagtaatgctgagttggaagttcaggaaaaaatgtctcttctggaatggtttgctaatgaatacaagaagtttggttgctcgcttgagtttgtcactaataaatctcaagagggatctcagttttgtagaggattcggtggcattggtggtatcttgcgtttaccagctagatatccggtcatttgatgagctttctgacgatgagggattgtatgaagactctgattagcaatcagccaatcacatgactgtgctggcccagggaaggacgccgcagctgcaacgagtctgattcgctctacttacgcaggaacacttcgaaagcagctatccagaaattgatgggcgtgggccagcctcatcctatgctggaagggattaaggcgaaaggattactgagtcacatcatcatgatagtaatgtgtcaagaagttatcgaacttaaaaggcatgctgttgccaaggtcgtactggttgtctattgtctgctttttgcaactatattcgcaagttctgaattctagtgtctgcttgaaattgagcacgctggacgcgctcgtgactatatggtgtaatctgctacttttgcagtttttgcaatgaagttactgttatgct

SEQ ID NO: 15239 - DNA, 2259 bp, Oryza sativa
  ref <308>: DATABASE ACCESSION NUMBER: AK065769
  ref <309>: DATABASE ENTRY DATE: 2001-12-06
gaaggtgctctcaacctagacgagagaggttcttccactcccgacctctagtttccagagtgatggccaaatgctactcggagtggcctcctctcccccctctccatccaccgagacgaacaccatcgcagacctcgctttggacgatcaggaggcagcttgcgtcgttcgtcttgcactgctccaggtcgtgtgcttcccctcttcttgagcccaagaatttgcccgatgagttccatgctgtgtctgcctcgacgccggcgccggtgccggtgtccccgcttccggatgctccgaagctcggcatatccaacaagttcatccggggcctctgcagcgaccggcagaccgagcagctcgccttcgagtgctacaggagggctctgcaccagccggagttcctgccggacaagaagacgatgaacgccctgaccgtgcagctgctcagggctaagcagtggagctcgctggagttcctggttgaagatttcagggcctatggggtgatgccggagcggcggacgtgcgcgcggctcgtcgcgagctgcgtcaaggcgaggaagttcgggctcgccgacatggtgctcggggtcctcgaaggcaagaggggtgcacctgccgctgtcgccttcagctcggcgatgcaggcgtacaacaagctgcacatgtaccggagcacgctgctggtgtacgagcggatgagggcggctcggttgtcgcgcgacgccgacgcctaccgcgccgtgatggcggcgtgcggggcgttgggcaagccggagatggtggcttcactgctcaagcagtacaagtcccacaaatggtacccctctgaaagctgtgtcgagacatacgccatcgtctgcgacgcactcggacgagcaggtagagcctcggatgcgctgaaatgcctgcgagagatggaagcagacggcatcgcgccgaatgccacaatctactcttcgatcatcagatctttggcagatgcccatgaatcttctgcagcagaagacctgtacaacgaagcatggaagaaagggaggctgggggatccggacatgttcctgaaggtgatcgtcatgcatgttgaggccgggagagtggagaagataatgggagttgccaaggacatgagggagactggtctgagggtcaccgattgtatcctatcaaccattgtcaatggctttgtgaagaggagaggcctcaagccggctatcagagcttatgacaagctgattgctttaggatgtgagcctggccaggtcacctatgcatcagtcatcaacgtttactgccagcttgggcggagcgacagggcggaatcggtcttctcggagatgatcgatcgaggctttgacaagtgtgtggttgcatatggtaacatgatctccatgtatgggaagatcagtagagcgtcggacgcgatgaggctgcttgctgtgatgaagaagaaggggtgcgagcctaatatctgggtgtacaactccctcctggacatgcacggaagactcgggaattcgaggcaggctgagaagatctggaaggagatgatgcgccgcaagattcagcctgacaggatcagctacaccgcgatcatcaacgcgttcaaccggtcaggagaactggaccggtgcatggatttgtaccaggagttcagggagacaggaggaaaggtggacacggccctggctgggctcatggtaggggtgttctctaaatgcagccgattcaacgagctcatcgagcttctgaaggatatgcaaggcacacgactggacaggaggctgtacctgaccgtgttgaggagcctccgagacgccgggctggaggtccatgtgaagtggctccaaactaatttcagtttcgtggaagagaaaacctgatggatccatgagttatctgtgctgttcatcttcagcaccgaagcatcgcgacgatcgggtatctgcaaaaacattgctctgtacatcgacagaaaaaatgggtaaatatttgcttgcctcaatgcgctttgtcgaaactatatgcttatgctgctggcttccaaccgccattgtaaatgtattctgggagatacacctttgtaccagtaatgatctgattacagatttattggataagttgcattgctcagtagatctgcatttgccagatttattgaactcacttgtaatatagccctcttcggcaaatgtaacttttgcatcagtactgaactttgtacatttcttcagcgcttaacatcttttcgaatctccg

SEQ ID NO: 15240 - DNA, 1081 bp, Oryza sativa
  ref <308>: DATABASE ACCESSION NUMBER: AK065770
  ref <309>: DATABASE ENTRY DATE: 2001-12-06
gaaatttgtttgttatactttgttttgacacaaccgagttctccccatcctgcaagcaatcgctcgccggctttatctccgtctccaatctccttctacgaccagacgcgaacggcgaaccgcaaccacctctgctgctacgctagccaccaccaccaaccacgatgtgcacgctggagcagcgcggccgcgtgttcgtgctcacgctcaccggcgacggcgagcaccgcctcggccactccctcatcggctccatccgcgccgccgtctcatccgtcgcggcggcggcggcggcggccgggccgggcgcggcgctggtcaccgtggcggaggggcggttcttctccaacggactcgacatcggccctggcgggatccccccctcgcgggtcggggagctcgtcgtggcgctccgccccctcgccgccgatctcctcgcgctccccatgcccaccgtcgccgccgtcacgggccacgcctccgcgggcgggttcctcctcacgctctgccacgactaccgcctcatgcgcgccgaccgcggcgtgctctacatgagcgagatcgacatcggcctcccgctcccgccctacttcgtggccatcctccgcgccaagatcaccgccgcgcacgccctccgcgacgtcaccctccgcggcaggaagctcaaggccgcggaggccaaggagatgggaatcgtcgacgtggtttgccccaccgccgctgaaacggcggccgaggccgtcaagctcgccgagcagttggcggcgcggaagtggaacgggaacgtgtactcgtccattagaatatccatgttccctgaggcttgcaggtccgtcggaattgtcgaggagagcgatgaggagaagaggaatcactttgcttctaagctatgaggatgtgaaagggattctgtggaagtggaccattgagctcttctcaacattatgtgtacattggctagccaagtagccatggatgctttgtatgaaggaccaaataatccagtatatataatttctggaaagcttgtaaactgttgctctatctgcaagtggggaatatattccagttcctttgcacc

SEQ ID NO: 15241 - DNA, 777 bp, Oryza sativa
  ref <308>: DATABASE ACCESSION NUMBER: AK065771
  ref <309>: DATABASE ENTRY DATE: 2001-12-06
gagtgacatccacaagccaagaagctgcaagagcaagccaagccaagccaagaacgaagcagcagcgagagcgaggtgagcagcgagcatggcgggcgaggcggcggcggcggagcggtgggtgggggcggcggtggacttctcggaggggagccgcgcggcgctgcggtgggcggcggacaacctgctccgcgccggcgaccacctcatcctcctccacgtcctcaaggaccccgactacgagcagggcgagaccctcctctgggaggccaccggctccccattgattcccctctcggatttctctgaacctacaattgcaaagaaatatggagcaaagcctgatgccgaaacattggacatgcttaatactgtggccaggcagaaggaggttgtggtggttttcaaagtcctttggggagatccccgtgagaagctatgccaagccatcaacgaaatccccatgagctgcttggttattggaagcaggggtcttggcaaactcaagagggtgctgttaggtagcgtcagcgactacgtcgtgaacaacgccacttgcccagtcacagttgtcaagacagccgatggttgatcctattgtcataaatatccatgtgttatatagtctgcttaaatctttgtccatctatctgaaacatattgaaccaccatgcagtgtaattgtaataataaacgaagtcaactgaagacgctcagttgtactttgtgcttgcactctctgagcctgactatgaaatggatcctgctgtttttctt

SEQ ID NO: 15242 - DNA, 5141 bp, Oryza sativa
  ref <308>: DATABASE ACCESSION NUMBER: AK065772
  ref <309>: DATABASE ENTRY DATE: 2001-12-06
gatgcgtaaaaaaaagaaataaactcccgtcgcgtgtgaaaaaaaaaaaacctctcccgtctcgtctgcgctccttcgcctgcgccgatctccatctcgcgtgcagagcaggggtgccgtcgtcctgctgcatcctgggaaagtcttcctcaccctggaagcaaactgttttaaaagatttattgtgtcacatgatatgaatcttaagaatttatttatcttggggcagtcacatttctgctgatactgggtagggactacctacgacatgtcacagtttcgcccttcacaacatggtagtgatagtgatgcccagatgtggcaacgacagatgttgtataagcagctacaagagctccagaggcagcaacagcagcagcagcttgatcatggaggtagaatgcagaactcttttgggcagttccaagcccctgcaaaacaatccctagctgatcagtttccaaccatgatgaatgaaatgcctatgaatgagccatcaagttatgcatggtcaaatggtatttctcttggtggctccaggttaggaagcaactctcagattttaaataatggtaacccacattgggagcaacatcatggtgcttctcttggcacaagcagctttgcaaatggtgcagtgtactcaaacatccagaatctcatgaggccaatgggatcagttaataataaagtaaaccaatcttctcattcccttcctgctagcatgagcaaaggttctgggaatcagtactcccagttcccaggatttcctgctaattcccacaatgcaatggcaagagctggttcagaccagtcagatatgacagcaaggtttgcaagctcaattaattcgttccagaatgaacatggtctttgtgaacaagttacatccaataatttgcagaatttttgtgaaaatggaagtgtattaagtgattcttcgactcaaagtcaaggcggtaacttgaagacaggcagtcctgttctagttaatcacttacaacatggttttcatgttcaacattttaatggctggatgaaccaagttgaatgtcagtcagcgccgcacgtcggaccagctagcagtgctgctagccttgatcccacagaggagaaaattttgtatggagatgataacaattttactggtttattgggagaggatgattcatcagatggagttcctggtcatgataactcttcaggcaatggcaactcaagcatccctgtgtcagctcaagggggtagctggagtgctcttatgcaggaagcattacagtcgacaagcagtaaaaatggcctccaggaagagtggagtagcgtgaatttccagaatagagaccaggcatttacaaataaaatgacttctcctgatctggaacagaggcagcatgcaactttaaatagcatgaacctacatagtgcacctccaagtgcacaaccttctccctcacatgatggttcttcaggaaccatgaataatctgaagttcaccagttttcagcgtgcaacgaaatccgtgtatgaccatcaggaaaaattttcttatggatctacctccgccgctatcaataatcacacaactacaggagctaatgatgggctttttcaaccgagtttaaagcaaagccattctggtgactgtggatcaccagaacatgtcaacttatcaattggtgtttgggcacaacagaaacctatgctgctgaaacgaaatttgaactcaggtggtgaacgttttatgccacagaacgcacaaggacttggggtattgcaacaaagcagttataaccataattttaacggggagtctagtaataaccaaagcaactggaatggccgaaattccaattgcgtcaatacatattcaattaataattttcagcagtcaaaccctgatgtgaacactgttcgagtgccaaatgatggttatagcagtaaaaatactgtcctgacgagttcaagcacaggaatgtttagcccaggccaacatcaaatgatgcttggtcagagcgggggaaattttggaagcaacaatgctccagggcaaaggccacttccagagacttcatgttcacaaggaaataatgcagagtatggacttgctggcttcagccagatgtatactaatgcaatttctgctgaaggacataattcaaataatggtcagcatttaggcatctctttttctgcaagaggtaattcctttagtggaatggatgcccataatttgggccaatctgaccagaaaacgatgggtccatctgcactgctgaatcatcttagtgcaacatctggaattagtactggacattttccaacgaattctttgtgcaataataagttattgtcagagtcaattcagccaccaaataaccaagagaacctgctgggtgggagctgccaacttgctggtcatgttgggtcaacaaatgagaaaattgcaatggtagaggaacaacttactcaacattctactgccagcaaatactcgaatgaacctcccttcagaggatatgatggaacgttgttgcaaaacccaaataaaatagttcaaacaagtcaacatatgcttcaacaatttcttcagaaggtggacagcacaaattctgttgtttctagcaatatgcccatcagatctgatattactcctaatcaacttaaccagccccctttacaaggatttggattaaaattggcaccaccaatgcaacaacaactaacttcaggtaatttatggaccagtcacacctctgttgacatcaagccagctgataattcagtaccaggggaagaccagcgacagctaccttccactcctggttcgacgacttcatctggctacccgagtcgatcctcaccattttactcatcagatgctgataatactggactgtcaagtgggtgcctcccccaaactaaaagcttaggccagcaatacccagttgcagagccaaagtctgctcctgtaaattctcttcctcagcagtctctgcaaggtactgcagcaacaatgctcaagaatgtgtggacaaacatctcagcacagcgcctggggggtatccaacataacaagataactccaaatattctccagtcaatgatgttcccaagtactattggtgattccacattacggggttgtccgaaagatgattatcaaagaatgagggtagcaaatctatctgatgatgccacaactactaccaactcaggaaggcaagaaataaagcgagttgtggaaaatgatggatctgacataccaaatatggatcaaatgggagatattttattaggaaagaaaaatgcccttcagagacccttgatgcagcatggcatcataaactcgtcacaaggggaaaatatggcagcaaacattccaaatatgggttcttcctttaacaaagtttccacctatggtggcatcagtctgcatggaagcctggcaccatccaattcccagctgataaattattctctactgcatcagattcaggccattaagcctgttgattctgatccggaaaatacgtctggaaagaggcttaaaacaactgatatgagttgtaatgcttcacaagttgaatggcccggtgccgaaagagctccacatggagaaaataatccattgagattatgtacagataaaactgaggtcccaagaatctcaaacttgttgccatcagatcagatgttaaggtttgctcccaggaacagtgaagatgtaacctcaaccatgccatcgcaggttcagttgagggagttaacctccacctccaatgatatggccactgcaagaactgatcttcaaaatcaatgctcatctcttggcacaagctcaacagaaaatttaattgaaagtggtgacaaattaatgatcaaccctcagatatcaccctggtttcaacatggtagcaacagaaatggtcataatcttgctatgtacagtgtcaggaaaactgcatcaccgtataatcatccaaaagttccctggagcatggacactagcagtgtttctgggcatggacttgaatgctctacttctgtcagacctgaaatgccttctggtctaaaggtatcttcttcggtgcgaagaccgaagaagcggaaatttaaagctcctgtgcttgtttcttggaatcaaatcattgatggccaccaaaagttggcggacatgagcactctgggtatggactggcctgaagcaactaatagattaatcgaggtggaagatgaagctgacattcaagaagatgctctcatattatatttaccacgtaaaaggctaattatgacctctcggttgattcagcaacttctcccttctataccagcggctattcttagggcacaagctatatcaatgtaccaaagtgtaacatatactattgctaagttgacagttggggatgcgtgcagcatgccttcaaattcatctttggacactggcactctcataagtagtggggataagtcatatgaacaaattgagaatgacaaaatgagagacagattcacaaaggccgttgaattttttattccaagatttaaaaagatggagaatgattttgtgagcttaaacaaaaggtcttcaatgctagatatacagttggagtgccaagatttagagagaatttctattgtgaaccggctgggaaggttccatgccaggaattatcatgcagctggagtggaggcctcatcaactgatcttgcccctcgcagaatatatcgtgatagacatgtcatgacatttgcagtacctgtaaatcttcctgatggggtgccttgtttgctgctctaggtctaagatattaaattattcgttggtttggattgcaccctgtaattttcgaaatgtgaagatgaaatccaaggaggttggttgcaaaactccaatcaacacaagttgaagaatctgagggatgccagctgtgccagccgatcaactcagtgctgggtgttattgcttctcccttaatagtataggtccctgtatattgtgaaagtaaaaaagcattggatctcatctcgtatcattttctgatcgagaatagtgctagcttcatccagttattttgttaatttggcgaacttcaatcgctatttattgtaatgaaatgctaggttgttctctgggg

SEQ ID NO: 15243 - DNA, 1541 bp, Oryza sativa
  ref <308>: DATABASE ACCESSION NUMBER: AK065773
  ref <309>: DATABASE ENTRY DATE: 2001-12-06
gattaagttttctcgtccggcggcgtcacccctgcgaattaactaactagctaggccggccatggagacggtggccgcggccagctacacccgcggggcggcgacgcgctcgccagcgtgctgcgccgccatgtccttctcgcagtcctacaggcccaaggccgctagaccgccgagcacgttctacggcgagtcgctgcgggttaacacggcgaggtcgctgccgtctgggaggcagtccaaggcggcgagccgggcggcgctcagcacccggtgcgagatcggggacagcctggaggagttcctgaccaaggcgacgccggataagaacctcatcaggctgctcatctgcatgggggaggcgatgaggacgatctcgttcaaggtcaggacggcgtcgtgcggcggcaccgcatgcgtcaactccttcggtgacgagcagctcgccgtcgatatgctcgccgacaagctcctcttcgaggctctggaatactctcatgtctgcaagtatgcgtgctccgaggaagtcccggagctgcaagacatgggtggaccagtcgatggtggtttcagtgtagcattcgaccctcttgatgggtccagcattgtcgacacgaacttcacagttggaaccatatttggtgtctggcctggtgacaagctgacaggcgtcaccggtggagaccaagttgctgctgccatgggcatctatggccctcgcactacttacattatcgctctcaaagattgtcctggaactcatgaattccttcttcttgatgaaggaaaatggcagcatgtcaaggacaccacaaccattggagaggggaaaatgttctctcctggtaacctgagggctacatttgataatcctgaatatgacaagctcatcaactactatgtcaaggagaagtacacattgcgttacactggaggaatggttcctgatgtcaaccagatcatagttaaggagaagggcatcttcaccaacgtgacgtctccgacagccaaggccaagctgaggctcctgttcgaggtggcgccgttgggtttcttgatagagaaagccggcgggtacagcagcgacggcaaacagtcggtgctggacaaggtgatcaacaacctcgacgagcggactcaagtggcctacggttccaagaacgagatcatccggttcgaggagactctctacggctcgtcgaggctcaccgccggcgccaccgtgggcgccgccgcctaatcttttgctgcaacgcgagcccagtgtctctgcaggcctcaaaaacgctgaaactgcagtcgttttagactcccatcctgtaatgcagattgggttgtagttgaagtgggacttgaaactgcaaagttatactcctttttgcaaggtacccgtttttttccccttttggtgtaaacagttgcatataaaggtaaattcgcatttctgttttgccactaagcaacacatcaacgagagcagcaacagcgagcaacagaatgtgcgaactatatcataatcgagatggacatgttgtgcttcc

SEQ ID NO: 15244 - DNA, 595 bp, Oryza sativa
  ref <308>: DATABASE ACCESSION NUMBER: AK065774
  ref <309>: DATABASE ENTRY DATE: 2001-12-06
gatcctctcctctccctctccttctccggttctccctctcctatctctctctcaccggtcggcatggagcagcggtaactccacgaaaaggcccggcggcggtgactgcaaagcgagcatggctcgcggcaactcaacaaagcggcccaccagcgacggctgcaaagcgggaaggaggggcgtagcggcggctcagtgaaggggtttggcgcatctcctcctctgctcccgcccgcctctaccaactaagcccatagtcgacgagcctcgagaggccgcatcagaagccaacagccttgggtggtgacgacgacctcgatgatgtgacgatttctaggaacaagctcgggggaggtggatccatcgccggtgagcttgggggaggccgacgatccgttgccaacaagctcaggggaggtggatcatcgtctgcgggctcaggggaggccgattattcatcagcttgtttgtaacctattgtttgttctagtggatctaattatagctgtgttcgatgttgttcttgtttatacttgtcttttcttgtttgtctatggatctgattctaatttgaatatgatgcttgcatgcaatg

SEQ ID NO: 15245 - DNA, 1792 bp, Oryza sativa
  ref <308>: DATABASE ACCESSION NUMBER: AK098938
  ref <309>: DATABASE ENTRY DATE: 2002-08-28
gtatcgtcggcagccaggctaatcttgccatggatcgtcggctccttctctctgctctactgttcatcgctctggcttgcagctccaaccgcgtccatggcgcactcaacaggcacagcttccccgaggggttcctcttcggcaccggcacctccgcgtatcagtacgagggtgctgtcgacaagcgaggtcagaacatctgggacaccttcagccgcattccaggtaaaatcgcagatggtagcaatgcagatatagcgaatgacttctatcatcggtacaaggaggatttgaacctcatcaccgcgatgaacatggattccttccggttctccattgcatggagcgggattttaccaaatggaaccattagtggaggaataaacaaagaaggggtcgaattctacaacagcctcatcaacgaggtcatagctaaaggactgaagccttttgtcacaattttccactttgacactccacaggctttggaggataaatatggcggcttcttgagcgaaaacatcgtgaaggactacgtggattatgcggacctttgcttcagcctgttcggcgaccgcgtgaagctatggaacacgttcaacgagccgacgatcttctgcatgaacggctacgccaccggcatcatggcgcctgggcggtgctcgccgtacgcgtcggcgtcgtgcgccgccggcggcgactccggcagggagccgtacgtggcggggcaccacctcctcgtcgcccacgccgaggccgtccgcctgtacagggccaggtaccgggcggcgcacggcggcgaggtcggcatcacgcaggtgtcgcactggttcgagccgtacgacgccggctccgccgccgaccggcgcgcgcggcggcgcgccctcgacttcatgctcgggtggttcatgcaccccgtggcgcacggcgagtacccgccggcgatgaggagactcgtcggcggccggctgccggcgttcaccgccgagcagtcggagatgctcaggggttcgttcgacttcatcggcctcaactactacacctccaactacgccgtggccgcgccaccgcccaacaagctccacccttcctacctgactgacaattgggtcaacgcgacaggttaccgcaatagcatcccgattggtccaccggcttacacgccgatcttctttaactatccgccggggctacgcgagctgctgctgtacgtcaagaggagatacaacaatcccaccatctacatcaccgagaacggcactgacgaggcgaataacagcacgatccccatatccgaggcgctcaaggacgagacgcggatcggcttccactacaagcacctccagttcgtgcacaaggccatccaggagggtgtgaaggtgaagggttactttacatggacgttcatggactgcttcgagttcggcgatgggttcaaggaccggttcggcctcatctatgtcgaccgcgccacgctcgcgaggtttcgcaagaagtccagctactggttcgcggatttcctccgtcgatgatgatgattcaaatgcttcaagctcctgatcgacagtgattcgatccgatctatatctccagtgtactcgatgaagctagcttcaggcagctgcctttttttttcttttttcttttaaaataagagagagaggcaaggctaggcaggcagctgatagaattaccaaacctgatgtgtgcagtgtgctgcccaaataattgccatgtgcatggaaaatgattgtgttttctcatggatattgatttgattactggtacagcg

SEQ ID NO: 15246 - DNA, 3353 bp, Oryza sativa
  ref <308>: DATABASE ACCESSION NUMBER: AK065775
  ref <309>: DATABASE ENTRY DATE: 2001-12-06
ggcgagggagtttaacgcaaaacttgttttgcagagtatccagagtagactcgagaaaagtcgtcgttcgccattcccatccgccgccaaggctccaaacctcccttcccctccgcagctccgccttacgacgccatggccgtcgcctcgctgtcgccgccgccggattgagggcgccgccatcagccggccgcgtcgctgctcttcgcgtgctcctcgcaacggggggcggcggggtccgtccaactgccgctcctaccacctcttcatcagcagcagcaacgcccgctttctccgccaccggcagccgaggcgccgcctcctccgcccacatcgcagcgttgacttctccaggttggctcgccaactccatcggctgtagacttccagccttccagatggcaagtgccttgacgggagtgatgacatccgtcatcaacaagctcactgctcttcttgggaaggagtacatgaagttgaaaggagtacagggggaggtggagtttatgatagatgagctgagcagcatgaatgctctccttcataggctggcggaggaggaccaacaccttgatgtgcaaacgaaggagtggcgtaaccaagtgcgcgaaatgtattatgacattgaggactgtatcgatgacttcatgcatcaccttggccatactgacattgctgagtctgcagggcttgtccataggatggcccaacaccttaagactctgagggtgcgccaccaaattgccaaccaaatcgagaagctcaaagcacgcgttgaagatgcaagcaagcggcgattgaggtataagcttgatgagcgcaccttcaatcttagtactgcaggggccattgacccccggttaccttctctatatgctgagtcagacgggcttgttggaattgaacaaccaagggatgtggttatcaagttgctaacggagggagagggtgcatcatcgcagaagctaaaggtgatatccattgtgggtcctggaggtctaggtaaaactacacttgcgaatgaggtgtttcgcaaactagagagccagttccagtgtcgagcttttgtttctctgtcacagcagcctgatgtgaagaagattgtaagaaacatatactgtcaagtcagccagcaggagtatggtaacatagatatatgggatgaggaaaagctgataaacgcaacccgagaattcctaacgaacaagaggtactttgtcgtcattgatgatatatggagtactcaagcatggaagaccataagatgtgctttatttgtgaataattgtggaagcagaataatgacgacaacacgcaatatggcaatagccaagtcatgttgcactcctgaccatgatcgtgtctttgaaataatgcctcttagtatagataactcgaagagtttgtttttgaaacgaatatttggctcaaaggatgtgtgcattcctcaattggatgaggtttgttatgaaatattgaaaaaatgtggcgggtcgccattggctattattacaatagctagcttattggctaataaagctaataccaaggaagaatgggaaagggtgcgtaattctatcggttcaacactgcaaaaagatcctgatgtagaagagatgagaaggatattatccttgagctatgatgatcttccccaacatttgaagacatgcttactgtatctaagcatatttccagaagattatgagattgagagggatcgactagtagagaggtgggttgctgaaggattcattattacagagggggggcatgacttgaaggaaataggagactgttattttagtgatcttatcaatagaagcatgattgaaccggtgaaaatccaatacaatggtcgagttttttcctgccgagtccatgatatgattcttgatctccttacatgcaagtcaactgaagaaaattttgccaccttcatgggtggccaaaatcagaaattagtgctacagggtaaggttcgtcggctctctctcaactattacactcaagatcacatcatggttccatcaacagcaatcatcacacattgccgatctctcagtatttttgggtatgctgaacagaagcctcctctttcaatgtttccagttcttcgtgtacttgatatagaaaatggtgaagatatggaaagcagctataccaaacacataaggaagctgattcagttgaagtacctgcgactgaatgtaagaagcgtagctgaacttcctgaaaaacttggagagctacaacatttgcagactcttgatctcagacggacaaacataagaaaattgccagagagcttcgttcgtctgcaaaatttgacatatttgcgtgtcaataatctggatttgcctgaaggaattggacatctgcatgctctgcaggagctaacagagatcagaatcagccaggactgcttggcatcttccttgttggagctaagaaatctgacgaagcacacattgactacaaagttttcgccgataatttagtgtcatcgcttcgcaaactgggcagactcaaccttcgaataatgtgcatcctgggttattatgcgtgttccatagagttcttgttggattcatggttcccctcccctcatctcctccaatcatttgcgatgggcatgaactatcatttccccagagtcccatcctggatcgcatcacttgacaacctcacttgcttagaaatcaacatagacctggtggatgagaaagtgatacagattcttggggatttacctgttctgatatttctgtggctgatatcaaaagaagcaggtcccaatgaaaggctcgtcataagaagtaacatgtttgtatgcctgaaggagttccacttcacctgctggagaaattgggaagggctgatgtttgaagctggggcaatggcaaaggttgagatgctgcgggtttcgttcgacgccggtggcagtgttcttgatttcggcatccagcacctggcttccctcaggcatctcatcgtcgagatcgtctgtggcggtgcgacgcttcgggaggtggaggcactggaagatgccattaggcactcagctgatctccttccatgccacccagcagttgaagttcgaacttgggatgaagaaaagatggtgaaggaggaggtgcaaatcatggctgaagagaagatccaaacaaacagctaaaaaaccagcatgactttgctaccagtgaaggcagctgagcagtattttaaggccccgtttggtacggctccaaactccaactcccagctccaaactcctactccagttgaagctagctcctattggagttacagaccgatcaaaagtgtttggcaaacttttagctccagatccg

SEQ ID NO: 15247 - DNA, 2108 bp, Oryza sativa
  ref <308>: DATABASE ACCESSION NUMBER: AK065776
  ref <309>: DATABASE ENTRY DATE: 2001-12-06
gatcggataggaaggaaggagacggcggcgctgcgagagatggaggtggcgggtgctcaggccggcatcctccccctcctcctccgtcaccccgcgtccctccggggctccctctccctctcctgcggcggcgcccgccggagctgggcggcggcggcggccacggcggaaggaggaggaggagaggagggtcgcggctacgagagggtgcccatggacacccccggcgcctaccgcctcgtcgaccgggccaccggccgcagcgtcatcgtgtggggcggcaccgacgacgtcagcatgccctcccccgcggtgctctccacgaccacgcgcgtccccgaccgcccaaaagaaaatgggagaagtacaagtattggaaattttggcagactcaaggcacagaaagttaaagttttagcaaggagatcagctcaccttaagagagaggattctggtcgcataagcaccagccggttcagtgaatctccttctgatgagtctgacgaagatggcacttattttgaaagagatagggcaagaaacacaaggcaaaacagtagatctagagacgacaaaacccgtggtgcgcattctctgaattctgtcttgaggcagtatagaggtgctgatgacttggattttccaggatcagaggctacttctggctccaaaagatggggtaacatttctgatgttacatttggacgacagaatcaaaggcaaaagggccctttagatagtgggtttttcagtcgaagatcttttaaggaaattggctgtagtgatgaaattctaggtgcactgagaagttttggcttccctcgtccatcgcatattcaggcgatggcatatcgacctgtcttggaggggaaaagctgcattattggtgatcaaagtggatctggcaagacattggcatatctttgcccagtagtacaaaacctgaggaaggaagaagttgaggggctccataggtcttctcctaggaacccacgagtggtagtactgacgcctacagctgagcttgcttctcaggtccttaacaactgccggtcaatatcgaaatcgggggtaccttttaggtctatggttgcaactggtggatttcgacagaagacacagttagaaagtcttgatcaagagcttgatgtacttattgcaacacctggtcgtttcttgtatctgcttcaagaaggctttgtgcaattaaataacctcagatgtgttgtgctggatgaagtggatattttatatggtgaagaaagttttgaacaagtgcttcatcaattgattactgttgcaccactgaccacgcaatatctctttgtcactgccactcttcctctcgacatctacaacaaggttgttgaaacatttccggactgtgaactaatcatgggaccaggcgtccaccgaacaagctctcgtcttgaagagattctcgtggactgcagtggagatgacaatgaggaaaagaatccggagacggcgttctcaaacaagaaatcagcacttgtaaagataatcgaggaatctcctgtccgtaaaacaattattttctgcaacaagattgagacatgcagaaaggttgagaatgcgctgaggcgggtggacaggaaggcttcgcagatcaaagtgctccccttccatgctgcattggatcaacaacagagaatcgccaacatcaaagagttcctgaacaagcagacggctgactcgatgttcctggtgtgcacagatagggcgtcgcgaggcatcgactttgcgaacgtgaaccacgtggtgctgttcgactacccgcgcgacccgagtgagtacgtgcggcgcgtcggcaggacggcccgcggcgcgtcgggcaacggcaaggcgttcgtgttcgcggtggggaagcaggtgtccctcgccaggagggtgatggagaggaacatcaagggccacccgctgcacgatgtgccatgcgtctagtcctagaaagagctctacagagcagagacagtttcaggtcaaatttgtgctagcatacatagcaccatctaatattgatgtagatagggtttgtgaaaccggttttgatgcatacacatatgctgatcgagtgaattagcatc

SEQ ID NO: 15248 - DNA, 3002 bp, Oryza sativa
  ref <308>: DATABASE ACCESSION NUMBER: AK065777
  ref <309>: DATABASE ENTRY DATE: 2001-12-06
gatcgctcccccaaaccgcgcgcgcccctccctcctcacgaccgtctcccctacgctcctttccctcccgccacgactcgcgccgccaccgcccccgccccctcagtcccgccgccaccgccaccgccaccactaccactaccgacgaaaccctagactcacgcagatccgtcccgcgccgccaccgccccctcagtcccgccgccgctccttccccctccccacaccatcggtgaaaccctctcactgccgctgagggctgaggccgatctgcggaggtggccttccctgccccgccggcgcgtggggactcactgccgccgcgtctctaacatcccctctacgctgcccgggtccttgcatcgtcgttggcttcctggcggagaagtacagcatgccaaatcgaggtattacccggaaaagaccgataagatttcatcaggtatttgctttttgcttcctgtctgtggatatgtgatgcatacattcaagttgagaagatgttgttatgcactgacgcctgtggccaggctatgaaaaggtgatgctttctgacgatacgtttaattgcctagcgatttggatcccatatagtatagtataccattagctcttgtttatattattcaagtaaataaggctaactgaaatttccaatatgaatagtgacagaggttctgatctgatttcatttggttggctcggtgtacagctgccggctgcaggggtcggtttagtgtagtatctcgcatcgattgtttttactctgttaaacaacctccaatggaactgtagtgaaaaatggcatattccatagctaaattattttatttagctaaaactagccagcactatactgattgtacattaattcctaaggtcacacacttatttgtggttaaactattgcagctccaacttttggatataaggactacaatatttctgtataaaaaatgcagtacactttataatctcagccattggaaaacagatagtttggtttctaattgaatgtcattgttttaacagcttacattttctcgtagcatctgctccaggtcactgctgctcaacatcctatgcaattaagatgatgaaaagaagcttgaggttttgaatccatgcaaattttttcttactgttctgatggtacaccttatttcaggcagttagaagtctcgggcagtggtaaccaggtcttgcccagcctcacctcccaagctttgagattcgggcaggggcagtggaggccgagggtgccgccgtccacaactgacatcgtctcaagcagtcaagcatccccagcagcgcaaagaaagtgctgataaatctgttcccatgaccaagccagaagccctgcaacttcaccatctgcccgatgatgtcctgcaccgcatactgtctcgattaacattcagagagtcctcacggatgggccttctttctcgcaagtggcagaaactgtggagaagctgctgcccgaaattgatcttcaccagggccaccatgttcaagcctgggaataaaaccataagacgtacaaggaccaactttgccaggagagtcaacagtcttttgcggcagctatgtgcacctcctaccctgaataagtttgttgttaagtttgggctgcgcaggaaacatacctgccatgtcaacagatgggttggcttctgctccaagttgagagcaaggcacatcacttttgatttcactcctggagtgaagggtattttcaggggcttagctgatgaaaagtacatcttccacctgcatgttttcagtgtccctgaccgctcccctgctcatatcaaatcccttcatctgagctacgtctggttgaacacagcaaccactggtttcactggctttgcaaacctcaagaagctcaccctgcacaaagtttcctttttaaatgacttccaacatctgatgctgtcggagtgcactgctcttgagtggctgagcatcagctgctcttccttcactgagctaaccttgtgcaagccactgcgccgtctgcgttatctttctttgcactactgctacatggaaaaggttgagctggaagctccaaacctcacatcggtcgatttgaccaatcggccaattccgttggcactaagtgaatctctgaaggtgatggaggcaaacattaaactgctacataagagcgtgctttatggtgataatctggactacatctgcaccgagcttcctgccgctcttccgcatgtgcagaaactctccattacctcgacactctgcatctacgatgagttgcaaagttttgccaaaacctcagtgagattcatcaatttgaggcatctgagcttgtatttgcctctttatggggacggcaggtcagttggtgggattcttcgtttggcctacctcttggagctcgctccagttctagaggaactggaactgcactttcgcttctctgatttcgtcatcagacaggcgatcagagtggatatgctaccgtatcggcatgacaagctcaagagggtggtcatgtctggagcctgtcattggcaggggctgatcgagctagcacaccacattcgtcgttgtgctagtagacttgactgtatgatcatggatccgatggttagaattaagggtctcccgacggttgattggttggaggaaagaggccgcaggattgccaaagagcttcttaagaggcaggagtttcagggtgtcctcactgttttgtgagataaagccgcatgaaatatggtttttgacgtcagctcactccaagatgcagtctttgcctttgactaataatttattacaataaattgatgaaatccaataatttgcaatggattagcacgcgtgatgtcctctctgtgcagcatggtcctgcactgtacctgtaccgtgcactcgtgcaagcacaaacgttccacgacacgacaatttgggggaattgaggggtactgcggctgtaaaagtcttaaatagcctaagcatatattaattcc

SEQ ID NO: 15249 - DNA, 2727 bp, Oryza sativa
  ref <308>: DATABASE ACCESSION NUMBER: AK065778
  ref <309>: DATABASE ENTRY DATE: 2001-12-06
ggatctcctccgaaccctctgcatccccctaaacctttctccgctcctccccgccgtcgccgccgccagcaaccctagccctcctccgccgtcgccggtgataacctctcccatcgccgtacgtccccaggatcccttcccatcctcctcccttatcccgtctctttagtctcgccgtggggggcagggtggaagagccgccgccggcggagcgccgagaatggcgtggcggatgctgcgacggaaggattttcacacgggccttgtgaatttggcctcccgtgtggatcatgggggagcgaagaatttttccagtgggacgtttggaaagctggctgacttcgttcttagcgatactcatacacccattgtaaaaggtgctgctaattgtacggcttataaacactgcactatcaggaattttcatgcaggtgtatacatgttagcatggagtaggaagcgtgaagaagttgcagggttaaaagcacctaaaaaggagaagcgagtgaaaagagaaactagaactcaacctcctgtagaagcgccatatgttgcaccaaaacaaaagatagctatcaaatcatcaccagataaaacagttgacatttttgatgggatgacattgcttgatctctccaaacggactggtgcatcaattggtgcacttcaagacatactcacagatcttggtgaaaaggttgaatcagagttcgacgctatcagcattgatcttgctgagttagttgctatggaacttggtgttaatatcagaagaatgcacactggtgaaggcacacttgaaccacgtcctgctgtggtaacaatcatgggccatgttgaccatggtaaaacgtcacttctagattccctgcgtcaaacatctgttgcggctaaggaagctggtgggattactcaacatataggtgcctttgttgttgagatgccatcaggagcctctatcacatttcttgatacaccagggcatgctgcctttagtgcaatgcgggctagaggtgctgctgtcacagatattgtagtgcttgtagttgcagctgatgatggggtgatgcctcaaacacttgaagctatgtcacatgcaaaagcagccaatgttcccattgtagttgctgtaaacaaatgtgataaatctggagccgatcctgagagggtcagaattcagctgggttcagaaggattgcttttggaggatatgggtggtgatgtacaggttgtagaaatttctgcagtaacaaaacttggtttggacaaattggaagaggctttgctccttcaggctgagataatggacctgaaagctagaattgatggacctgcccaagcttttgtggtggaggcaagagtagacagaggcagggggccattggcaacagctatagtcaaggctggcacattagtcagcgggcagcacattgttgtgggagcagagtggggaagaattcggtctcttagagatactgctgggaaaataacagagtctgcaaaacctgcaatgcctgttgagattgaggggttaaggggccttccaatggctggggatgatgttgtggttgttgactcggaagaaagggcaagaatgcttagtcaaggacggaagaaaaaacaggaaaaagacaggcttcgaaagattgatgaagacatgacagaggaggcggaaattggtgaagagactcctgaaagagttgagatgcccatcattgtgaaagctgatgtacaaggcagtgttcaagcagttacagatgccttaagaagccttaatagtccacaggtgtttgtgaatattgttcatgttggtgttggcccaataagccaacatgacattgatctggcacaagcatgccgggcatatatagtcggtttcaacatccgtactcctccaagtgctatcactctagcagcaacacaagccaacataaagattttgctgcacaaggtgatctatcatctccttgaagaaatgggacgggagattgtcgagaaggcaccgggcacccctgagacccaggtttcaggggaagccgaggttctgaacatattcgagctgaaagggcgtagcaagtcaaaagggcctgacataaagattgccggctgccgaataactgacgggcacttaagcaaaaccgggacgatgaggcttttgaggagtggagatgtcgtctttgagggtccatgcgcatctctgaagcgggagaagcaggacgcagagacggtcgacaagggtaacgactgtggattggtgattcaggactgtaacgatttccaggttggggacatcgtccagtgcttggagcaggttatcaggaagcccaagttcatctcaacacaaagcggcgcggttcggatagaatgctgatagatgtttagttgttttctgcttccattcgtgatcaactaaccaagattttggcagtggaacaagagggagatgatcaagttggtgcgcttattattttctcgccaacaaacttgttgctgcaaccaatttcaaacagaaacctctattcatatatgagatgaagacatggttaatcttgttcaggtgcttgtgtttgttgtacattcctgcagtttccacaagttctgcgaataacgtggattactggattagtgaaaaggttattgttattgacttaattattattactgtataattgcagccacggaaaggccatttttgccggttcatgcgagtccaggctctgttgtagc

SEQ ID NO: 15250 - DNA, 1079 bp, Oryza sativa
  ref <308>: DATABASE ACCESSION NUMBER: AK065779
  ref <309>: DATABASE ENTRY DATE: 2001-12-06
ggcagagcgcactcgcacagatcggatccgttgctttgagcctctgacccctccctcccctgcggtggccatggccgatcgcctcgagctccagggcaggcacggcaagtcccgcgtccgcgtctcccgcgtctggcgccgccccgcggccgcgggaggccacgtcatcgtcgagtggaacgtggccgtcagcgtcgtctccgactgcctcccctcctacacctccgacgacaactccgccatcgtcgccaccgattccatcaagaacaccgtgtatgtgaaggccaaggaatgcacggagattgtctccatggaggaattcgcggtgattcttggaaggcatttcacctcgctgtacccgcaggtctcagaggcaacggtgaccatcgccgagcgtccatgggagcgtgtggttgtcgatgggaagcctcattcccacgggttcaaacttggtgttgagaagcacgtcacagaggtcattgtgaagaagtctggaaacttgctcataaattctggaatccaggatactccctgctaaagacaactcaggtatttttgccgggatgctaacctttcacactggggttgcttgggttcacttgtaaagacagtttatgtattgtacttttgaactaggaataaacttgtaacaagtgctactacgcatgcttgaaggaattaaatgcaaaaatgtgaggtaaagtgctagctgaagtgtcagaaaagcaaaataatttaactagttaacttctgatgaagtataaacgaaggaaatataaattttaacaaaaccagactgctttttgtcatacatatatgctcaatttgtactagtgcatgctaacctttcaccaccttgtctctctcagtccgggttcgaaaaatttgtgagggatcgctacacacttcttcctgatacaagagaaaggattgtagcaacagaagtaactgcctggtggaggtctgctactcttcttatatacctgagaaaaagtcaacggcgtcatatattaaaaaacggagggagtaccaacttgcacatttgaaggctaaaggttataaattttcttctcctttgc

SEQ ID NO: 15251 - DNA, 1750 bp, Oryza sativa
  ref <308>: DATABASE ACCESSION NUMBER: AK065780
  ref <309>: DATABASE ENTRY DATE: 2001-12-06
gacacacaacgctcgcactcctctcctctcatctgacatatctcctcccgtcctttcgaagcctctcgaatcgcatcgccgagccggatggcggtcaccgccgacgtgaagctcgagggcctccgcgccgccaccgacaagctcgaccagatcagcgagaacgagaagtccgggttcatcagcctcgtttcgcgctacctcagcggcgaggcggagcagatcgagtggagtaagatccagaccccgaccgacgaggtggtggttccctacgacacgctctcggctgctcccgaagatctcaacgagacgaagaagctgctcgacaaactcgtcgtgctcaagctcaatggaggcctcgggacgaccatgggctgcactggtcccaagtctgtcattgaagtccgcaatggctttacgtttctagaccttattgtgattcaaattgagtccctgaacaagaagtatggatgcaatgtccctttgcttctaatgaactcattcaacactcatgatgacacacagaagattgttgagaagtactccaactccaacattgaaattcacactttcaaccagagccaatatcctcgcattgttactgaagacttcttgccacttccaagcaaggggaagactggcaaggatggctggtatcccccaggccatggtgatgtgttcccctccttgaataacagtggaaaacttgataccttgttggcacagggcaaggagtatgtctttgtcgcgaactcggacaacttgggtgctattgttgacatcaagatcttaaaccacctgatccataaccagaacgagtactgtatggaggttactcctaaaacattggctgatgttaaaggtggtaccctcatctcttacgaagggagagttcagctgttggagattgctcaagtccctgatgagcatgtgaatgaattcaagtcaattgagaagttcaagatcttcaataccaacaacctgtgggtgaacttgaaggccatcaagaggctggtagaagctgaagcacttaagatggaaatcattcctaaccctaaggaagttgatggtgtgaaagttctgcaactcgaaactgcagctggagcagccattcggttctttgaaaaagcaattggcattaatgttccccgctcgagatttctgccagtcaaggctacatctgatttgttgcttgtacagtctgatttgtacaccttggtcgatggctttgtcatccgcaacccagccagaacaaacccatcaaacccttcgattgagcttggacctgagttcaagaaggttgccaatttcctggcccggtttaagtcaatccccagcattgtcgagcttgacaccttgaaggtctctggtgatgtctggttcggctctggagttacactcaagggtaaggtgaccatcaccgccaagtcagggaagttggagatcccagatggagccgtgcttgagaacaaggacatcaacggtccggaggatctttgaggctgctcacggaaaccttccagatatatttagctgagcgttttgtaattgtcgtgtgcattcggcagccagggctcgatgatcccattacagaataattgtaatcatcttggcacatccgtacttctgttttttggtgtgccaagggcgttgtatttcatttacttaaatgatctcgtaataccatagttttgcatgcactgtagctgggagctcgtagtttactggtaattctattcagagtttactactg

SEQ ID NO: 15252 - DNA, 3152 bp, Oryza sativa
  ref <308>: DATABASE ACCESSION NUMBER: AK065781
  ref <309>: DATABASE ENTRY DATE: 2001-12-06
gggccgcttccctaggcttggcgtaaaagaaaatctccccgtctcgtcgtctcctccgctccttgcgccatctcgcggctgaacaggggaggggcggcgatctccatccggcgagcggagcaggggaggggaggggatcttgacaatggttggacctgggcataggaacagtcacgggaagcgtcactctgattatgctgaaaatggaggtggcaagagaaggaatcctggtgatgatacatatgctcctggtccagatgatactgtctaccgctatctttgcccttctagaaaaatagggagcatcattgggaggggtggagaaattgctaagcagatgagggccgacactcaagctaagataaggattggtgagagtgtatctggttgtgatgagagagttatcacaatatttagctcaagcagggaaactaataccctagtagatgctgaagataaggtttgccctgcccaagacgctctctttagagttcatgaaaagctatccatagatgatgatattgggaatgaagaaagtgatgaaggtttagctcaagttaccgttcggttgcttgtgccatcagaccagattggatgcattattggaaaaggtgggcatattatacagggaatccgcagtgacactggtgctcatatacgtgttcttagcaatgaaaatctccctgcgtgtgccatcagtggtgatgaacttcttcagatatctggggactcaacagttgtcagaaaagctcttcttcaagtgtcatctcgtctccatgacaacccatctaggtcacagcatcttcttgcatccagcatgacacagccttatccagtgggctcccaccttggtagttcctcaactgcaccagttgtggggattacgcctttaattagttcttatggaggatacaaaggtgatgtggctggagattggccttctatatatcaaccacggagggaggagagctctgcaaaggaatttagcttgcgccttctttgtgctgcatcaaatgtgggaggtgtaattggaaagggtggtggaattatcaaacagattaggcaggagtctggagcctttatcaaagttgatagttcaaatactgaagatgactgcataattactgtttctgcaaaggagttctttgaagatcctgtctccccaacaataaatgctgcagttcatttacaaccaagatgcagtgagaaaactgatccggaatcagcgatcccgtcttacacaacacgcttgttggtgtcgacatcacgtattgggtgcttgattggaaaaggtggttcaatcattactgagataaggagaacatcaagagcaaacatacgtatcctttctaaggagaatgtaccaaaagtagcagcagaagacgaagagatggttcagatcagtggagaccttgatgttgtaagacatgctcttctgcaaataactactaggctgaaagccaatttctttgaaagagaaggtgctttatcaggtttcccacctgtaatcccttaccatcctcttccagttggtgtttctgaagggccaaagtatctaggcagagatactaagcctcttgggcatgattatccatattcaagtggatatcgtggctcagatgatattggccctattgacagctatgcaagttatggcagctcccaggtctctggaggaggttatggggcttatggtggatatagtggtcgttctggcagcagtgggttatctggccctagttcattttcctatggaaagcgacatggttattaggacttagattgacaaatgcaacaggtatggttcatccaccttgtcttgaaatgaacagaatgatcatgcgatcaagacttgctccttattgcatttctgccttttaaacacatttaacccagctcagctatcttctgatggacctgttcttttcacctttgccccatgcccacctcccttactaaaaacagccaagacaaaagaatgccaagaccaatgaagtatggagcctgcttattggagccccttcccaaaccagatgaccaagagtatggccccaacctggaagctttgcctaagagggacctgcctggatgccatagaccatcttatttccctagtatacagcatttacttatattttcctctgggactatgttgattccccgtcttacatgttctaaacctatgtattgaaagttcacagttgagacttcctgtatgtgttctcgtgcaacctgcttcatcttagtagttcgtgtggaagaacttggttccctgtttgccaaccaaaagcctagaagttacttgcccttgctttaaggatgtggatcgtgtcatccttcacattcgttcctatctgcacatagttccccagagaaaattgtacctcctcagtgagctcaaaataggctaacataaaacttaagtttacctataaaccaatctcagcatggtcttctagtatcaacctgtctggtaagctatatgactactatggcgatttacagttagctggaagttttcgcttttgctgatttatagatcataaaagccctaacatgcaattgtgcaagccatgctatacatgggatcttgacttgatgtgcacgtgtgctctgatgctcaatctgagtgtgggtaagtttcagagaacctctcaaagttaataactgggttgagattttatcgagttaagagtttcctttgtgttttagagtcttttcctcttctttacccttctcatggaggtgcaggagcatacgccgtgtgctgctactgcagacttgtccactgctatatggaaccactgctggagttgcagaacgttggtgccatgccatgcagggcatttgttagtgtattgctgtagactatgatacattttcgatgtaggcggtaacatggcaaacagtattgtgctgctttcagtatatttcttttttttggccaaatttgtttatgcatgtaaaagcaattctctcaacattgtatttgaacagtttggtcgaattagccgatcattcttatgtactgattgatgtccactgttgttggtgatggactactgagcactttgtagtacgtgattttcatagaccggtgctgttgtgattttcctagacaaatgtagtgttgtggcaattgtatttaaatg

SEQ ID NO: 15253 - DNA, 1062 bp, Oryza sativa
  ref <308>: DATABASE ACCESSION NUMBER: AK065782
  ref <309>: DATABASE ENTRY DATE: 2001-12-06
ggttcgattcattcgtcacggcacaagaaaccattcttaatcactcgccctttcttcctccatcagtccatctcactttggttccttcaagaaacgaagcatcaagaaagaggagaggagaggaaaagcaagtgaggtttcagacttcagaggtgctctggaggagtttggtctcgatcatcatctctctgaagcctgagagagtttcagctccgattaccacttgaccatggcgagcaaatacagaggctactaccacgacgaggcatcgtcggccgccggcggcggcggcggcggcggcggcggcgacgggtacaggagggagaagcaggtgaggaagaagcggctgacggcgcagaagaggaaggagatcaaggaggcgttcgacctcttcgacaccgatggatcaggtaccattgatccaaaggagctcaacgtcgccatgagagcactggggtttgagatgacaccagagcaaatacaccagatgatcgcggaggtggacaaggacgggagcgggacgatcgacttcgacgagttcgtgcacatgatgaccgacaagatgggcgagcgcgacgccagggaggagctcaacaaggccttcaagatcatcgacaaggacaacaacgggaagatctcggacgtggacatccagcggctggccatcgagaccggcgagcccttcacgctggacgaggtcagggagatgatcgaagccgccgacgagaacggtgatggcgaggtcgaccacgaggagtttctcaagatgatgaagaggataggatttggggccgggtttttttagctcagcaagcagctaattaatcactagtgcttcagtaaacacaaaataatgtttggggaggtttaggcatgatgtaccgactggatggcatactatcactatgtacatatgtaggttaagttggtaccataccgccttatgttttgcaactggtgttttggtgactgagacgatgtacataattgtacagcagtacagataccaaggtagatcaaataaacacgagattgttattactcgaagaaaacattggtttg

SEQ ID NO: 15254 - DNA, 2829 bp, Oryza sativa
  ref <308>: DATABASE ACCESSION NUMBER: AK065783
  ref <309>: DATABASE ENTRY DATE: 2001-12-06
ggccgagaaagggaccccccccccccccccgccccgggtcgccggccgtcgagggagcggaggcggaggcggaggcggaggcgtgacggcgcgagggagggtgagggtgcgccgtgcccgcagtctcctgtgacagtatcccatggattcgcttcagaagtcccacgatttgtgcctgaagcgcaagcttgttgatgattgcctgtcgaaagacttcaagtatcgccgcgtcgaagaggataatgtatcttccaatgtggagagcaggcccttacccggttcaccttctcagagttgctgcattcaacctaatctggctaaagattgtgttaattacctgaaaagcgggttgccaagtcgcattgcattttacaaacaaggtgcatggtgtgatttccctcagaaaataatggagtcccttgttgagggattcaaagctgataaatctagtgctgtagttgtgatggatgatcagcctctgcttgttgatttcttgtcgatgaccatggtgaacctaaaaacaagaaagcagagatctgtttcatggctagatggcactggcaagtggttttttccttctgcattctttgacgagggcgttgatgaatccagaaaattaaacatgggttctgaaggcagcggacaaggtctaactgaggggatggctccaaaggctccaaatgaactggtgaagcaagctgtcgttgaaactagctctccagttttacagaattcttgtattcctgacatattacgcaagaagattgtgcctgttgaaagaggcagtgagagctttcagtttgttcagaaccttttcctctctggcatgggttcatttgcatcacctaaaaacttacttcatattcatcggtactctgcagaggatgtcacagcacaatgtagacttgagtcttttgcaagacagatgaggttgacgagaaagaaaattggttatgctgatgtgagatatggatggcgatctaggaagcaagacatagttggagttttgattaatggttttattagcactggacaaacaagtcacagttctgatatgcgtactggtgtgtatctctcgcctgaaaaccgtgcatttaccagtgttggtctctgtgatgttgatgaaaaaggagttcagtacatgttgctgtgccgagcaatattgggcaacatgggaactataaaaccaggatcacaggatgagtttctaagcatatatgattctggtgttgacaattgctccaatccaagctattatgtgatttggccatcaaagctaggcactcatatttctctggaatatctcattagttttaggctcacaccagaaattcaagactacttgcttcacttgaagggtttatggttgtgcccaccaccaaaagaagtggaagtggatctttctactcttcaacctccgtcagaatggtacaagtcttgttcagaagttaactgtcatcctttaagtataaaactggatcctatctccaacagtagaattaacataaactctgcatctggaagagctagcaacgattctcaagcaccaagtgtacaacctcagaaatgtggacctgtggattctacagtagtaagcatggccctcaaaagagaacaattctccatcccaagtatgtgttctgaaagcttttcatcccattgcacaaaaagtcaggattctgttgtgaggatgagacccgatgacacccttgtgaggagggcattaatcagtgatagtgttaatggctgtgattctgttggaccaactgttgaatcgcattgccattctctcctttcgcagaattttgactctgaagggcatgcttctcatgtagtatcaatgtttggaaactctggagcaagactacattctagtgcaccatgtatgacaactgaagcccaggtgtttgttgcaccaagtagagcatatgagaactcatcatctctgaatgctgaaggcagtgatgctgtgatttcaagcatagcccctcaagtccacgcaccaagtattccccctcaaaattgtccacgaacgagtgtggcacctcacctctgtttaccaagaagtatggcgccccacctccgtgtactgagaaagatttctaaggttcattcaacaaacatgcctgaagctcactattccagtgcagcaactatggttcctgtcatctgtaaacctccattgtttggcattacccaaaaagggcatggtgttcatacatcaagtatgatgtgtacaacaccaaatgtagttctccatggtcctgatcaccctgcaaagttggcagatacagagcgtaatgctccgtcactaataaatggggcgttgagaagagaggtacaagtacaacgccccaatcaaggtgttgatgctagtagcatcatcacccaagcagcagatacactcgtggcgttatcagcccacggtgagaaaggctggtagaaccgtagaagagttatggttcatttgttactcaggtgtttgtcgctccactgtaaataagtggaggaatccatcttttcctccctttggcagcgcaaatttcaccttgttaacttcgatggttattctgcagtggttaagtactgttgcagtgttgcttctatactaacctggctggttactcaacagagattgtacattttgtacagttggtcatgctttttcacatgtgtatatacattgactggcatatttcatagtagtacataaacctgaaagttgctgaatgttcagagcccaagcccaagcttcagtttgtcaggttaacaaggctgtatctaacatgttgtcattgtgcttatctagttgagaatgaactggaaagt

SEQ ID NO: 15255 - DNA, 1589 bp, Oryza sativa
  ref <308>: DATABASE ACCESSION NUMBER: AK065784
  ref <309>: DATABASE ENTRY DATE: 2001-12-06
gctctctctgctgctgtggccgcatcatctcctcctcatcttcttctccacagcctcagctaggccatggcgtccaccgtctccttctccccggccaacgtgcagatgctccagggcaggagctgccacggccacgcggcgttcgggggctgctccgccgtgccaagaaccgggccaaggatgcgttccgtggccgtgagggtcagcagcgagcaggaggcggcgccggcggtcagggcgccgtcggggaggaccatcgaggagtgcgaggccgacgccgtggccgggagattcccggctcccccgccgttggtcagacccaaggctcccgaaggaacacctcagatcaggcctcttgacttgacaaagcgccctcgtcgcaaccgcaggtcgcctgctcttagggccgcattccaggagaccaccatctcacctgccaatttggtgctcccgctgttcatccatgaaggggaagatgatgctcctattggagctatgcctgggtgctataggcttggttggaggcatgggcttcttgatgaggtctacaagtctcgtgatgttggtgttaacagttttgtgctgtttccaaaagttcctgatgcattgaagtctcaatctggagatgaggcatacaatgataatggtttggttccacggactattcgcctgctcaaggataaattccctgacattgttgtctacacggatgttgctctggacccttattcatctgatggtcatgatggcattgtcagggaagatggagtaattatgaatgatgaaacagtttatcaactgtgcaagcaggctgtttcacaggcacgtgctggtgctgatgtagttagccctagtgacatgatggatggccgtgttggagcaatacgtgctgctttggatgctgagggtttccatgatgtctccattatgtcctatactgcaaagtacgccagttcgttttatggcccattccgagaagctttggattcaaatccaagatttggggacaagaagacttaccagatgaacccagctaactacagagaagcgcttctagaaactgctgcagatgaggcagaaggagctgatattcttctggtaaaacctggattgccatacttggatgtcatccgtcttcttagggacaattcagcattgccaatcgctgcatatcaggtctctggagagtactccatgatcaaagctggaggagcactgaacatgatcgacgaagagaaggtgatgatggagtcgctcatgtgcctgaggcgagccggcgctgacatcatcctgacgtatttcgcgcgtcaggccgccaacgtgctgtgcggcatgcgatccaactagcaggtcaactctgaatctgaaaaaagctgagcagctaaaacccagccatctctgaaacttttgcatgtccccaggtcatcatcatgtgaggctcgttttgcactctatagagagcatttgtgtagtcagtaattagtgctagctttgcaaatatcattctggaataatgttttttgtatgacagtgcctctaattggtgtgtaatttgcggtgaggaaataatataatctgcaattctgtgc

SEQ ID NO: 15256 - DNA, 827 bp, Oryza sativa
  ref <308>: DATABASE ACCESSION NUMBER: AK065785
  ref <309>: DATABASE ENTRY DATE: 2001-12-06
gctctcttctcttcagcacactcccactgtgggagtcccacaaaaccccccctcctctcctcctctggctccctctgccacccagccaccacaggatggcatcctcctcctcacctccactcctcctcctcgtctccctcctcgccgccgtcgccgccgccttcctcgcggcgcaagctctcgcccaacaccaaccccaaggaaatgatacggcggcggcgggggaggggtggaggccgaggctgaggaagacgtacgtggagggcggcgccgccgggatggtgccgcggcggcggaggctggtggggaggttccagatatgcgcggtgtgcacctgctgcgggggcccgcacggggtgtgcatcccggcgccctgctgctacgccatcaactgcaacatcccgaaccgccccttcggcgtctgctccttcaccccgcgaacctgcaactgcctcaactgccacctctagcagatatgcagcacagcacatcagccaagaaaatcaggcaagaaaccccaagtaaaagaaaaaaaacagtaatgcttaatgctgcttttaatctctttgtttttttttctctttttgatttttctttggttggtgccaaatcgagaaatgctaagaagaaatttgtttgggattggaagaacacttggatcatatagttagtagttgtagtgagtggaaatattggtagctatgagtagctttgtgatggatggatggatggatgttttttggttagtttttttttccccattttggggggtgactggttaatgtggtgcctattgaattgtggatataattaattagtatcttggc

SEQ ID NO: 15257 - DNA, 3814 bp, Oryza sativa
  ref <308>: DATABASE ACCESSION NUMBER: AK065786
  ref <309>: DATABASE ENTRY DATE: 2001-12-06
gaccgtcatcctcgccgtccccttcttctgcgccgccgccgccgccgccgccgccgccggagggcggtgccgcccctctcttcctctctcgtcaacgcagcagcaaaagctagcgtgcgccgccggcacgcaaagcttcccccggctcctcttgccctcctctagctcctcccccatccccgacctagggcttcttccaatcctccgctgccgccgccgccgccaccttccatccagcctccgccgaccgctgccaaccatggcgctctaccgccgcctcctccacctccgccgcctccagcccccggccgaacacgcctcctccgtagcctcagcgactccccgcctcttcccgctgctcacgccgtcgcgccccttcgccgccgtctcctcaatcccccgcgtcgagccgccgctcctcgtcgtcccctccggtttggcgcgcgatggtttcttcggacgtaggggggatcgccagttcttttcaactgttggtgctgtcttagttggtcaagcaggatgattcagctggtctaggagctacaagaaatgagcaaactgaggaaaacgctacaggtttacagcgaatcgaagatggctcagtggtctcaaatgaacacactgtcaaatggagaatcttcactgataatgctcgagattttttactgaaaagaaacctagatgaagctgagaagtttttccaggcatccctacatgaagcgaaagaaggatttggactgagagatccacatgttgcgtcagcccttaacaatctggctgagttttataggttaaagaaaggatacgagaaggctgagctattgtatctggaagcaattgaaatcctggaagaatcatttggatcggacgatataagggttggaactgctttgcatagtcttggaatatgctaccatcttcaacgcaagtttgctctagctcagacatgttatgagcgtgctttgaagatagaaggacgtgttatggggattggtcatccagagtatgcaagcacaatgtaccttcttggcaaggtgttaagtcaacaaggaaaagatgcagaagcccttattgaagagtctatcaggatattggaggagtctgggcttggtgagtcaccaatatgcatacaaagaatgaggtatctctccacggagttgataaagtcaaatcgacttgctgaagctgaaaattggcaaaggaagatattacataatctggaactctcaaaggggtgggattcatttgacactacgaatgcagctgaactcttaacaatgactcttcaaaccatggggaagttgaaggaatctgaagaattattggaaagatgccttgaagtcagaaaaaggattttgtctgaggaacattttcagatcacttaccaggtatttgagtttttcaccacaagctctgctttattggcaattaacacagactgggaggtatttgtgccatgtgcccctgccacgatgcttgattgggaagcaatgtaatcactgttgctccatatgtattttactaggtcatggtggcatcgccaattcatgttgattatcaccatttccatagtttgatgattacatgattagattgcttcattagtgtttcacttccttggtgcatgctgtgtcctgagaagctgagcccaagaaatgcaaatgttttgttgaagaatgtaggactcccttgctttaggtagagtattgtccatatcaccaatggcaattgtcattgttgactgatggttgcggcagctacggcacacacaagaccatgtgacctgcatctgctatgttgagttcacggtgcacccctacatgtcaggtgatacagcaaaatgcctagtggtggggaactggggactctagtggcaaactggcaatcaaaactaatactctaatagtagcattatgatgctatgatcctcaaatatttggatcaatctaatgaaaataataattaccatatagatacccttcagtcacaaataagtgttgttttagaatccatgcgacataattattactacatccgtcccagaatataagaagttttagtgttagacacggttattaagaaagtaagtagaattaaatggagaggttgtgattggttgagaagtggaggtaggtgtagaaattgaatggtggagggttatgattggttgggaagagaatgttgatggagaagttgtaatatttttggacaaaattcttagtgctagaagttgttatattttaagacagagggattattgtttagaatatagatctgggtatatgaaaataacatggccaaattcgttatatcaaaaaagctttcataatgtcacgcttctgcaactcattttggatttatggaattgaattaagtggtcaaagttatgtcttattggcttttggctttgaaaagtcgacacttatttgtgactggagggagtacagtttagtcttccacaaatatgttattgcgagatttactgttgaaggtgcatccctggaatcatgaaaagtcaataacaccgagaattgggttttcctgccgtttcatatacaatcaatttaatactggttgtcactagcaactagctggaacctagtccacctggtagctgttactttggtacacttggcaaggctaaccatgctaaactttattagtgacaaggaggacagtgacctagcaagatccaaacttgtcagggcaaggctacttgtcaatgattcaatcagcagtttcttgttctagtgcagaggctgagttacgagctatggcccttttgacagcagaggttacttggttacgttggttacttgaggatcttggtgtttctgtgacttccccgacctctttgttgtcggacagtacaggtgctattagtattgctcgtgatcctatcaagcatgagcttactaagcatattggggtggatgcttcttacacacgcacccaggtacaagatcaggatagcagaaggaatattatatgattcaaggaaagatctgaacaaactcaataatggacgaactacagacagggataagattgcagcaactagtgcacttttgcaagcacttgaagttgctggacttcttgaaagtggaatgaagaatatgctaactccaggggaacaagatttatatcctgttgaacaggctcttaacaagtgtgtttcgctttacaaagagcctcatacgcggaaattcgtgtcaaagactctcaagaacgagtatatcagatgcttgaggcggctcactggtattgttcagagcgatttcgctgtgtcggaggcattgacattgcaggggttgctagctgaagcgcaacagatacttgaagaacttggacacgagagcaactagaagtatggaaaagtaattattcatgactcggaggaacacctttgttgtgtgcaaggtcttctaggttggttttgcaccaacagattttgatgccagcatggatttttattgtgctctgagctatcgaccatatgctgccgtagttggtggcgactttgcaagcaacaaaggatggtgattttgttttcttctggtttacaggtttatgctgccgtggttttttgtttgacctgcggatgtcatttgcccggcaaattttacttgtatcatgactgctcgattttggaacacttaagtaggcttccacggtgtcaacgaagtgtacgaagatccactctttaggattttatatttttatactcaccttgttcttcagaagcttctttttcctgcctggaacaacttcagaagttgatatttgcaaaaatatataattttcctttggggtc

SEQ ID NO: 15258 - DNA, 1519 bp, Oryza sativa
  ref <308>: DATABASE ACCESSION NUMBER: AK065787
  ref <309>: DATABASE ENTRY DATE: 2001-12-06
gatcaccgcgagcagcggcaccggcagacggcagtccagcactcccgcaatcccgctgctcgtgccgcatactctcgcctgctactcctcgcgcccaagtcaatctccccgtcctctcggtctcggctcccgcatcctcgcgagttcgccagccgccgccgcctgcgccgatctccgtcccgcgagcagcggtgcgtcgtcctgctgcttccgcctcagttgaacacccgtgccgacggacggcctacttctttctcatccgtctccatccacaccttctctctttggccttatcttctcttctagatctggaagcctttcctcttcgtcttaaccttagtactaataacagttaggtccgcccctttggggagtacgctgagatgaccggcgcgggcgacgccgccaaggagtacgccgccggatgtgctgccggcatcgcacaggtggcggtcggccaccctttcgacaccgtcaaggtcaaattgcaagctcacaataccacagctcatgggaaggtatacaggaatgctttccactgtactagaaggatactggttgaggaaggaatgagaggactgtataaaggtgcatcatcttcatttatcggtatcgcacttgaaagctcccttttctttggcacatattcacaagccaagcaattactaaagggaaaatctgaggatggtaggccacagctacaggtaataataccttctgctgcctgtagtggagctttaatcagttgcattctcactccaactgagctaatgaagaatgcaagttcaagggaagcatgcattgcatggtactaggtactccagtcctctagattgtgctatgaaaacgctgcaaagtgaaggggtttgtggtctatttcgtggtggtttggctacattgtttcgagaggcagttggcaatgctgtcttcttttgcacttatgagtatagccgatattggatgcacaggtatctagattcaccatggttttcaggtggcaatcacttagttctggcaaaagatgttggcgtaggaatcatgagtggtggcattagtgggatggcgttctggacagctactctaccattggatgttgcaaagaccattattcagactgaccctgaccctcatttgagtcgaaacccctttcaaattttaaaaatggtttatagaagagctggaatgggtggctgttatgctggccttggtccgacgcttgcacgagcattccctgccaatgcagctgcaattgttgcttgggaatacagtgctaagattcttagtataaggcgtgactagcataagatgctgaaagctggattgctggtccaattttccataatataccggggaacacacctgattaatcattttttttctatagttagatggttttggtaggaaatgtttatatttggtaccttaactcttcttcaccgtggtcaacttttgcccctcaactataactattcaaaccatctaaataatgtccccagactggttctgtggatactttttg

SEQ ID NO: 15259 - DNA, 2918 bp, Oryza sativa
  ref <308>: DATABASE ACCESSION NUMBER: AK065788
  ref <309>: DATABASE ENTRY DATE: 2001-12-06
gattctgctaaaaatttcatcttggggggtatatttctcatattttagttcatgccgccgccactatgtactaatcccaccatagcagctcatagtattctccattgcaatcctgtcgtctatttgtatttgttttttgtttgttagtattagggtgcttttgggtttggggtttctgccattgacggttacctgaagagctctcgatgaagcggttcttttttattttattttattttcggtgcctagtgaaatacagtggtggttttgaatcattcctgggagttccctggtggttttgactgatcaaaacgctacattttttttatgtttatgttccctgttgttgtttcttgcccaaatgcagattcactcttgcatttgtttctcttgatttcctctgctgttttgctctacaaggacagaggacttagtctgcttgttcgtcagccttgcaggaaaaaaaatgcagtaaaaaacctgtctattgcgattactttgtgttcatcttggggcgctcttattatgcgtgggaatcaccagcagagttcatccgatttgatgcgcgcatctctaattcccatcttttgcagcattgcaaaagctgctgccttttagcttttgcgctttcttaattaggaggggttgtacggcgcccctgttggacctgattacttccacagtaattgcatcatgacattttattcctttttaatcgtttccttttgctaatctttttaagtacaaatggagtttccccccaaaaaaatattgcaaatggagtttttttttttccccttctcctctcgccttttgctgtttcaggtttcgtatgttatcttcacatcaatgcagcctttaattgcagcagaccacccttctttgctactagtatgggaaaaaaaaatcagagccacacgaactgtgggtatttgctatgggaacttcacaagttcgccagcaatacaacttgaatgcgtcctgaagatctagattccgcaggtcaaatcgtcgaatttcagagctagtagtactgtaggcttgcctggtgcaactgtgggttatgcttcaatagcctttaactgtgggttaatgtgtagagtatatgtcaaatacagaatttttacttgaagaagatgtgtttattttcagatgtgttggaccatttcatgttgtccacttgtaggtactttcgtggcctaagtagtacattattcagttgttagttatttgtctcactgaatgcaagtgtatctttagtaagagttggactgcattgtacttgttttaatcttcttgaaggccagtaagaatttgtactctaatacaaaattgtggaaattttacagataataagctgctaagaattatcaccatggaggtcaatggtcatcacaaaccaagaagagaatataatggccgagagtgcaatggtgtacaatcagtaaacaattttggcgatatcgatccatggacagcatgggcatacaaaccgcgcacagtttcattgctactgatgggaacatgctttttaatttgggcaagtggtgctcttgatccagaaagaagcttctctgttgaccgcgtttcatctgttaaaaggggtgtctttgcaatgattgctgtttttttggcttattcatttcttcaggcaccttctactgtacttattagaccacatcctgccatttggcggctggtccacgggatggcagttgtttaccttgttgctctaacttttttgcttttccagacccgtgatgatgctaggcaatttatgaagtatcttcaccctgatcttggtgttgaattacctgaaagatcttatggaaccgactgccgcatatatgtacctgatcacccgaaaagcaggtttctctaggagatcctttttgatgagtttgttattgcccatatccttggatggtgggggaaggctataatgataagaaaccaaccacttttatgggtattatcaattggctttgagctaatggagctcacctttcgccatatgctgccaaactttaatgagtgttggtgggatagcatcgtactagacatattaatctgcaattggtttggtatttgggctggaatgaagactgtgagatactttgatgggaggacatatgaatgggttggtttgagtcgtcaacccaatattatcagtaaggtaaaaaggacgctaggccagttcacaccagcacagtgggacaaagatgagtggtaccctctgcttggcccttggagattcatccaggtgctgagcctatgtattgttttcatgattgttgaacttaacacattctttctcaagttctgcctttggattcctccccgaaaccccttgattgtttaccgacttgtcctttggtggttaattgcgataccaaccattcgcgagtacaatacatacttacaagacaggaaacctgttaaaaaggtggggtctttctgttggctttccctagctatttgcattttggagcttctactatgcatcaagtttggacatggtctctttccgaagtcgatgccgtcatggttgttcatagcctggacgaccgtggcgtcgcttctgatgatgttccttcttgtgtggacttggaaaatttaccgaacaatgataaggaaaaggctatgattcttctgttgctttgctctcaattctttcctcctccattcaatattgtcgtgtaaatattcattcaaaaaaatctgtacatgtggtagtagccattaatttggtggtctcgagaaggatcatcataaggaattttatgtctttgcctttgtattccatgagccaaaatggcattcccttttccttcctgtgatgtaactctgacagccaaactttagtgttcctttggtccaatctaattcctgggaaataatgaaccaagatttattct

SEQ ID NO: 15260 - DNA, 2059 bp, Oryza sativa
  ref <308>: DATABASE ACCESSION NUMBER: AK065789
  ref <309>: DATABASE ENTRY DATE: 2001-12-06
atttggtctcacctaaaaccctagctcgctcacccatggctccgaagaagcgaaaggcggatccggcggagtccccggtagcctcgtcggaggccggcgccggcaccaaccaccaccaggagacgccctcctcggagctcaagcccgggggaccatctacttccccatcaccgacgaccccccggagccgagcgcagagggcggcgccgagggggaggacggcgccggaggggacgacgatgaggaggacatcgcgaagctgctcgagcccctgtcgcgggagcagctggtggcgctgctccgcacggccgcggagactacccccgcgacgatggcggccgtgcggcgcgcggcggaggccgaccccgcgagcaggaagctcttcgtccacggcctcggctggggcgccggagccgacgacctccgctccgcgttctcccgcttcggcgagctcgaggactgccgtgtcatctccgacaagcaatctggcagatctaagggctacggcttcgtcctcttccgctcccgccgctccgcgctccgcgccctccgccgcccccagctccaaatcggcggccgccttgctttctgccatctcgctgcctcgggtcctgcccctccgacctcccagtcccagaaccctagctccaacaccaacgccaactccggtgcggccaataacctggttctgcgtcgtcttcacaacctgacaacatgcaacgcaaaatctttgttggtaacgtgcatgctgatgtcgatgttgaccgcctgtatgagtacttctcgcaatttggtgagattgaggaggggccattgggatttgacaagaccactggcaagcctaaggggtttgcgctgttcgtctacaagtcagtggagagcgcccgccgtgcgctggaggagccaacgaggaactttgatggcaaaatgctcaatgtgcagaaggctatagatggcaggaccaagaacacacctgggatgaatgcaaattctaaccctagtggtaccgctgcctcggcagcagctgctgctgcagctgcacagatgactgctcctgctactgctgcaattacaccgtatgatgcatcagcttatggtgctactgccgttcctgacttgggttatgcgcagcaagcggctatgttgggattgggtgcacagcagcaggcgtttgcacaacccaatgctgcaatgcttgccatgatggcagcagctatgcaaaacccagctatgctcgcaacgctgaaccctgcttttgctgctgctgcattgggtgctgggggccagcaggtgcacgcggctggtattccaggttttggagctcagggttttgggacacagggctttgcagcaggtgccgccgcttttccaaatgcagcgggtgttcaagctcctcctggttttcagggtccgcctgggttccagacttctgctgggtttcaggttggccaagcagcttcacaagcgggtactgctgcggctgctgccgccggtgctgctggttatcaggctgctgctgctgggcagggccaagtgcccggaacgcaaattgggggtgctggttttcagggtggattttgaaatcactaggtataacaattcacatcctgcttaatcgcttcaagtcctcatttaccactaatgatttgagttagcttatcctccaaatattattcgcaacttggtgatttgggctaaaaatttctgattgtttctctatatcttagtttggcatctgctggtcgtgattcgttcgtgtggttttgcattcggatggattttgaatctatgttggtgccaaagtattgcgaaagggttcctgctgttggcttttacaatcagatggcttttgaatcaggcaactttgtggcagtatttacagaaggcgctttcttgaagaatttatgttgtttttattgcctactatgtagctttgtccttgcaacttcatcatgtacgttatggtttctgtaatggggtttaatgtactgaaatatctgtattttgacttgttgggatgttatccggtcttattgattatgtcaaatggtttctgggc

SEQ ID NO: 15261 - DNA, 1430 bp, Oryza sativa
  ref <308>: DATABASE ACCESSION NUMBER: AK065790
  ref <309>: DATABASE ENTRY DATE: 2001-12-06
ggccgaagctgcgctgggtgacgagagcgagcagctggcgggcggcgacgaatggctcgactgcgctggcgtgcacgggaggcggcagagagcagcgggccagctgcaagccgacagtgacgccggcaagcaagcagtgcacagccatggttgcgccgtctcggctcccatcccatgaggagcaatccgccgccgccgcagccgacggctcggccacaccgtcccaaggaatccccgtcgtcgatctcggcgtcctcatcaacggcgcggccgacgagcggtcgcgggcgatccgcgacctaggcagggcatgcgaggattggggcttcttcatggtgactaaccatggggtgcccgaggctctccgagaagcaatcatggacgcctgcaaggagctgttcagattacctttggaggagaagaaagagtacatgcgtgccaagccgatggatcctatacggatcggtacaggtttctactctgtcgtcgacgccgtaccatgcaggagggactacctgaagatgttctctcatcctgaattccactgccccgaaaagcccgcaaagctgagggagattgcaacggagtacgcgacctgcacgagagccctgttgctggagctcaccaaggcgatctccgagagcctgggcctcgccggcggccgcctctctgaagcgctcaacctcgagtcctgcttccagatcttggtggggaaccattaccctgcgtgctctagaccggacgagcaggcgatgggattatcggctcactccgaccatggcctcctcaccctgctcttccagaacggcgtcgatggcctccaggtcaagcacgatggcgaatggctcctcgcgaagcccctcccgggctccttcttcgtcatcgccggcgatcagttggagattgtgaccaacggaaggtacaagggcgtgctccaccgcgcggtggtcggcggcgagcagtcgaggatgtcgttcgtgagcctgatcgggccgtgcatggacaccgtcgtcgagccgctgccggagatggcggcggacggccggggcctggagttccgggggatcaggtacagggactacatggagatgcagcagagcaacagcatcaacgagaagacggcgcttgacatcgttcgcgtgatgcatcaggccgggtgacatgttgacatgccaaggaggcagtgccatgttaggaattgggccggctgcactacgacccaacacagtgagtagcccaatccttggcccaagcaagattctagtgaagaaggttgctaacatgccagtacgtgaacagttcagcagaagctgatcctgcagggcctgtgtagtttgcaggcgccgattcgttgtaaagctcgaactgtgatatgtggaatgttcatcatcatcatatggaaaataaatgccaagtccgagtttaattcc

SEQ ID NO: 15262 - DNA, 2439 bp, Oryza sativa
  ref <308>: DATABASE ACCESSION NUMBER: AK065791
  ref <309>: DATABASE ENTRY DATE: 2001-12-06
ggctcttccattccacctcgcatttactcatcccttctctccctcgctcgctcgcctcctcgccttcttctccatctccatctcgcatcttctctttctctttctctttctctttatctctctctgttgctgctgatcaagaagcttggagagagggagggagagatggatcggtgcataggcatatgactggaggcctatggtaagtgtggaggagaggagagaaagggagatggagattttctgagatcttttgggcatataaccttttggatggtggatatggagaagaagagggagaagctggtggctgggctcacaagaagacacatgataaggagtggctcctcctcttcctcctctcctactgctgctgctgctgctgctgacaacaacaaaaatatgagtgaaggtggagatctaaacctgatatctaggcagaagaaaggaaaggcaaaggttttgaagtggagattaagcaacactgacatggacatgaaaggggaggaaggaggttctgatggagactacgatgatacagtgctctcctcactgaccacagctagcttcagcagtctgattagtaggaagagagtgaagagccttgggaaggtggctgaggattgtgatgctattgatccaccggttcctagaaaattaagatcagccataaataaacgtgccagtcaaactgtttctacatcaccgcggcatgtcaagaagaggcgccatctttcagctatcagctctcagactttccttatggatcgagaaacaagatgtaatgcaattccgttggcgaatcatttttcgaaggaggaggaggtagttgtggatgctttgctatctttatctcaaataccccatctttgtgaactgtcgtccgacagaggaatggcagaagataacttagatttaaatgttacttcagtgtcttattcagcaggagcaacaaaggtggatgagaaaatatcggcattgccaactgccggtacggaagtagctaaccaacctgcccttgatgaaccagtggaacgaactggcaatgtttcacaaataaatcatgtgccttgtggtggtacctgcaacaacacaaatccaactttgtcaaatgatgggcaaatacatgatatttctttgggaattgtaacgaatttaccgagcccatctaaagactacaataacagtcggaagcaactgaaagtgcagtttgataatagtacaattcatcccacaaagatagaagcccctcggtgcctggaaaattctaagaagcctgatattctggaacatgacaggaaaaatgtcaagaataacactgcccaagaaattgtgccaccggtccagacttcaaaaccttgtgcctcgcataggccatcttcaaacacactggcgtcgtgtaataatactgccgcagaaactgtgaaaggaactggagaacatgagaatctttccctcgttaataaaaatggtaccccctcgaagacatggaagagaagcattacccatgtctacatgtgtcatctcatccaaatgcatttggacaaagagaaggcatcacaaaaccgggtaaaacctgaggaagtttgtcacagtcacatttcaaggtctccagacggttctaccataagtaagaatggtgcacaagacgagaagttctacgccttgcatttcgatgtaaggctacctgttcagccatcttgcagtgtttgcgacacgaccattgcccgacaaaagatggtcagtggtaattttctgaacttgcccacttctgcggcgttatcaggggtgcagcatgttcagtatttacatcccccgatcgctccccgcggtgcaatgccatatccaattcagcatctcccttacaccagggggaatttgacgcacactgcactactacttcaacagatgccacagtacatgtgcaatccaaacccagccattatgaagattcagcagcagctcatgcccaatcagcatcagcatcagcagcagcagcagatgtggcagtttcaattccctcaataccatcatccaaggccagacgccgccgccgccgccgtgtcggcggcgtggcagcacagcagccggctccacgacgtctcttccctgcgtccggtggccgtgctgcctgcgccgccgccgccaccgccgccgcagatggagctcttctgctcgccgtaccatggcggcagcagacagccgccgcagctgaggttgatctagcttattagcatagcaaaactgtcactgctgctgtttctgtgtgttcatctgacaaaaaggaattttcagacaagttgacatgacatttgacagtcacagatgccaatgggtggcaaaaagctgtaattaatttgagatgttttatgttgctcgatcgaaaggtactcgagtgtagtgaagtactttttttatatgaagaaattagatgcatcg

SEQ ID NO: 15263 - DNA, 1913 bp, Oryza sativa
  ref <308>: DATABASE ACCESSION NUMBER: AK065792
  ref <309>: DATABASE ENTRY DATE: 2001-12-06
gtgttaattttgtttcttagagcgtagtatagactaaagcagaggctccagctgggttgtgatcatggatcacatattctccaccaacgcatggctcaccatagccctcgtcttcatcattacactagctgcgaaggtggtaagatcatcagtaactctccctgcagagaagacgagcaagccgcggcctccgccggaggcgaaaggtgctcctctggttgggataattccagccgtgctgcgcaggggcctgcaggccgtgatccgcgagcagcacagggcgctgggcagcgtgtttacgctcaggtcacttgggcttgcggtgacgttcctcgtcgggccggagtgctccgaccacttcttccacgcgccagagttggagatagctatcgatggcttgtacgaggtcaccgtgcccatctttggcaaagaagttggctacgacatcgacttggacacaaggaacgagcagcatcgcttcttcgccaagatgctgaggcctgccaaactgaggggccatgttcttcccatggtctgtgagatcgaggaatattttgggaaatggggagagtgtggcgtggttgatctgatgcaagaggtggatcacgtgctgatgctgatcgcgagccggtgcctgctcgggaaggaggtccgggagaacatgttcgacgaggttgcctcactgtttcacgagctcatgggaggtatgcacctgatcagcatgttcttcccttacctcccgacgccggggcaccgccggcgtgacaaggcacgcgcgaagctcggggagatattctcccagatcgtcaagacgcgcaagatgtctggacgtgttgaggacgacatgctgcaggacctgatagactcgacgtacggggacggccgtgccacgacggacacggaggtcaccgggctgctagtggcgctgctcttcgccggccaccacacgagctccacggtcgccgtctggacggcactgcgcctgctcacccaccccgagcacctgcgcgccgtcagggcggagcaggagcggctcgtggcggcggcggagcagcagcgcagccaccatggcggcggcggcggcggtggcatcgactacggggtgctgctgcagatggacgtcctgcaccgctgcatcaaggaggcgttgaggctccacccggtcacgccgatgatcctccggcgcgcgcgccggggcttcaccgtgcgcgacaaggaaggcggcgagtacagcgtccctgccgggcggttgctggcgagccccctggtggtcaacaccctcctcccgaacatctacaaggaccctcacgtgttcgacccggaccggttcgccgccgggagggcggaggacaaggccgttgccggcgcccgtgatcttgcctacttgtcgttcggcgccgggaagcatgcatgcatgggcgagggctacgcctaccagcagataaaagtgattttgagccacctggtgagcaatttcgagctcaaattagaatcacctttccccgaaactgaggacatgctttccatgaggcccaaaggtaaagcaattgtcagctataagagacggacgctttcctgaaatatgcaggaacgttgaagaatgtgggcaggttattgataggaacacataaatccatacgaaattaaatgcctaaatcaaaagttaaaatataaattatttgtctttaaagatatttcgagattgggaatgttagaattttaatttttatggctttaaaataaatgcgctgttgtcctgtatattgtacggtggatgtaatttaatttagtcattcctcttgcaattcgctcaaataatttacgcagtttgataaagtacaagtgtgatgtttatcgcgctatgtcaggcctgcagagaggaaatgtatggaattatcgaaatgagtcggacc

SEQ ID NO: 15264 - DNA, 1976 bp, Oryza sativa
  ref <308>: DATABASE ACCESSION NUMBER: AK065793
  ref <309>: DATABASE ENTRY DATE: 2001-12-06
gatatcctgatatggtattaagcaagtccctatgtacgagaggctatatgttgggcaccgtttgtgttcatcagcccatcactcttttctgtctatgtaggtcatggcggttgcaggtgcaatggtgatgtcaggtggcgtgctccttctcctcttggctttcacctgcgccgcctacaatgacgccggcgagctgccgccgatcagccggagaagcttccccaaggggttcatctttgggacgtcctcgtcgtcatatcagtttgagggtgccgcggcgaagggtggcagaggaccaagcatctgggacaccttcacacatcagtatccagacaaaatcaccgacaagagcaacggggatggtgcttgcaatagctaccatctctacaaggaagatgtgcgcattatgaaggagatgggaatggatgcatacaggttttccatctcgtggtcaagaattcttccaaatggaagtctcagcggtggagtcaacagagaaggcatcaactactacaacaatttgatcaatgaactattatcaaaagaggtccaaccatttgctaccctattccattttgatacacctcaggcactggaagataaatataaaggatttcttagccctaatatcataaatgactataaggactatgctgaaatatgcttcaaagagtttggtgaccgggtgaaacattggatcaccttcaatgagccttggaacttctgctctatgggctatgcatctggcaccatggcaccaggccggtgttcatcctgggagaagggaaaatgcagagttggagattcaggaagggagccttacactgcatgccatcaccaactacttgctcatgcagaaactgttcggctttataaagagaaatatcagttcactgaagaagctatcaggcagtcgccgttcatccgtgataataatttaaatcgaagatctgcaaaggctttacaaaaggggaggattggaataattttgaactcagagtggtttgttcctttctcccaatccaaatccagcaatgatgctgcaagacgtgttctagacttcatgcttggatggtttatggatcctctcattagaggagactacccactaagcatgagagaattggttggaaatcgcttgccagagttcagcaaagagcaatctgaaatggtcaagggtgcattcgattttattggactcaactactacgcttcaagctatgctgataatgatcctccatcatatggccataacaacagctataatactgattcccatgctaagattactggtagtcgaaacgggattcccatagggcctcaggctgcttcgttttggttttacatctaccctgaagggttgcgtgaattgttgcttcatattaaggaaaactatggcaatcctaccatctacatcactgaaaatggtgttgatgaaatcaataataagaccatgcgactcaaggaggccctgaaggatgatatcaggattgaatactatcacaagcaccttctcgccctgctaagtgctatgagggatggagcaaatgtgaaggggtacttcgcatggtctctgcttgacaactttgagtggtcagagggctacacagttcggtttgggataaactttgtggattacgataacggaatgaagagataccccaagaactcagcccgttggttcaagaagttcctccggaaatgaaacagagatggaaacaaaaggttgaaaatagttgcgcacactccctttttctcattgaacatcaaaatagtatataagctttatgagttaagtgccataaatgaaattagttcgtaaataaatctcactctcctcttcttgcatgtttgcatctactatctcttaactatatgtacatagctaagcaaaggataaataccgtatgggcatgtatgtttgtatccaagagggatgctctaatgaaagatggacatgagaagtagttcttcgc

SEQ ID NO: 15265 - DNA, 2075 bp, Oryza sativa
  ref <308>: DATABASE ACCESSION NUMBER: AK065794
  ref <309>: DATABASE ENTRY DATE: 2001-12-06
gtttaatctagttgggatatattacagccttggttgttgtcacatcattgtaatagtaacatcccattctacatctacttgatgtagtatattagtatcttctttgtgctgtgttgtttctctgtatcaattgacacattctatattatgaagataagtaccttttgttatcgactttcagcatcatggtgctagtaggtttgctagtacaagtgttgtgaagcagtcttcaggtggtctgcttggctggtttcttggtggtaactcaagccagcttcctccgcttgatgttccactcccaggcgttataatttctccacctctgccagattttgtagagccatctaagacaaagatcaccactcttccaaatggcatcaagatcgcatcggagacatcaccgattccggctgtatcagtgggactgtacattgattgtggttctgtttatgagacatcttcttcatctggaacatcacatctattggagagaatggccttcaagagcacgacaaaccggagtcacttgcggttagttagggaggtagaagccattggaggaaatgtctttgcatctgcttctcgcgaacaaatgagctatacttatgatgcactgaagtgttatgcaccagaaatggttgaagttctcatcgacagtgtgaggaacccagcatttttagaatgggaggtcaaagagcagctccagaagataaaatctgaaatatctgaagtgtctggtgatccacatggtctacttatggaagcgctccattcggctggatattctggggctctggcaaaacctttgatggcttcagaatccgcggtgaacagattggatgttgctaccttggaggaattcgtttctgaaaactacactgcccccaggatggtacttgcagcatcaggaattgagcacgatgagttggtttcagtcgcagaaccacttctatcagaccttcccagtgtgaaacgtcctgaagagccaaaatcagtgtatgtaggaggggattatcattgccaagcagattctacaagtacacacattgcacttgcctttgaggttccaggtggctggcgtcaagagaaaactgcaatgattgtgactgtgcttcaggtgctcatgggtggaggagggtccttctcgaccggtggccctgggaaaggaatgcattcttggttgtatctccgtgtcttgaacaattatggacagatcgaatcattctctgctttcagcagtatttacaacaattctggcctttttggaatacatgcaaccactaacccagattttgtatcaagtgctgtggatttggcagcaagggaactccatgaagttgcaactcctggaaaagttacacaagaacaacttgatcgtgctaaagaggctaccaagtcttcagttctgatggacttggaatcaagaatcgtggcctctgaagatattggaagacaggtactgacttatggtgaaaggaaacctattgagtacttcctgaaaactgttgaggagatcactttaaatgacatttcttcaactgcaaagaagattatttcttcgccgcttacattggcatcatggggtgatgttattcatgtgcctagctacgaatctgtcaggcgcaagttccattccaagtgagcattcagcacctggacctgcgtgggttgttctggaatttcaagccgcagctttgcagtggccaaatggccatcgactggaataaatagagcccatacacaatttttgctggacagatgaggggtgcatgatcaactaccctccctattcatgttctcaactaagcatgtgatcatgctgccacaattccgcggcccctaaatcattcggcggcatgctgcgttttgttcagtggcatgctgcgtttttgttcagacgcacgccaatatcgtccttcctgttttacattttaatatagaatcagatgttatggcctcatggttaagccatttgcctattcatcggtgtcaggtgttttttttattagcgtgtttgcccatttgtaccaacaagctgtaaacatatacgagtaaaaagagtatttctatttgtt

SEQ ID NO: 15266 - DNA, 1173 bp, Oryza sativa
  ref <308>: DATABASE ACCESSION NUMBER: AK065795
  ref <309>: DATABASE ENTRY DATE: 2001-12-06
gggtggcgctcgcgcgcgcggaccagacacgacacggagcccgcgcggacgcgtcctcattcatggcctcctcttccgtcttctccccgctactccgtgcactccggccgtccacctcctgctcggggcgctcttctgccacccacgacaacagcgccgccgctgtcgttgccgctggtggcgctgccccgcggccggcgcccctcgcggcggttgtcagccacaggagggagctgttgctgggggcggcattgggcgcggcgttcctgaaggcgcctttgccggccgaggcgcgtgaggtcgaggtcggcgcggtcctgccgccggcggcgtccaaccccgggttcgtgttcttccgggctacttccaaggacactcctgcacttcgagctggcaatgtgcaaccttacgagttcattctgccacccacctggaagcaaacgcgagtggccaacattctgtccggcaactactgccagcccaagtgcgccgagccgtgggtggaggtgaaattcgaggacgacaagcagggcaaggtgcaggtggtggcctcgccgttgatccgcctgacgaacaggccgaacgccacgattgaggacatcggtagccctgagaggctaatcgcctctctggggccttttgtcaccgggaacaccttcgactccgacgagctcgtcgatacctccgtggagaagatcgatggccaaacttactacagctatgtgctagagactccattggcactgaccggttctcacaatctggcgaaggcgactgccaaggggaacacggtggtgctcttcgtcgcaagtgccagcgacaagcagtggcagtcgtcggagaaagttctcaagaccatagtggattcatttaaagtatgatgatcgctgcaggtctgctagtacgatctgtttgtggtgattttgttgatgagtacttcccagccttgagcttgggtaacttatctgaagtaaactagaggcatttttacaagagaagcggcgttgcttgtgaagcttggaaaccatagtagagagctagtactgtaattggtaaggtgacaccatggcagtactgttatagcttatctgtttatgtgagaactaagtgtacagtgcacctaacgcacagggattattttttcaatataagattaaatactatgttaagatt

SEQ ID NO: 15267 - DNA, 1752 bp, Oryza sativa
  ref <308>: DATABASE ACCESSION NUMBER: AK065796
  ref <309>: DATABASE ENTRY DATE: 2001-12-06
ggtcgcgtgcgaggatagggagagaggtgaaagagacacggaggagagggaaaccaaggcggcgaggcctccgcctcactccggtggcgacacggcgggctcgccgccatgacaggagctctggcgatgatgccatccacgtcctccccctaccctctcctcgctccgccgacctgctcctcccgcctcccgcctctccgctgcttcgtcggcctccggtggtccgctccccgcatccaggtcagggagtatccggatgcggttgcagggattgccaagggtgcgggtggacgcggtggtcgattcagagcacctgcttcaagtatctcccaaccttgctctagaaccatcatcatcacaaatgaacatgttcaaaatgctgattttccacctaattactcgaaaagagagaagaaaccatttccaataccagtattggagttaagacgccgagcaaaagagagggcaaagaaagctgaagggaaacccaaacgatctttaccacctccaaaaaatgggatgctgatcaaaagactgataccagttgcatacaaggtgtataatgcaagaattttgctgatcaacaacttgaagaggcttatgaaagtaattccagtgaaaggatgcaaacattgcagtgagatacatgttggatctgttggacaccctttccgaacatgcaaaggaatgtcttcagataaacgtagggggcaacatgactggggaggtactttggttgaagctgtttttgtgccggttgaagcctaccatctagaggatcgcttagggaagcgtatccctcatgatcagaggtttgctgtacctcgcatccctgctcttgtggagttatgcattcaagctggagttaatcttcctgaataccccacaaagcggcgaagaaagcccattattaaaatcggaaagaacgagtttgttgatgcaaatgaggatgacctaccagacccagagccttacaaacttgagcatccaattcttgaagaactaaatgataacgagattattgccccagcaagcccagaggagattgttgctctagctgaggaaacactcgaagcatgggaggtagtcagggatggtgccttgaagcttatgaagggctacgcggtgcgggtttgtggatactgcccagaggttcatataggagcaagtggccacaaagcacggaattgtggtgccttcaaacccagcagaggaatgggcagcatggatggcaagcagcagtgctcgatgacttaatacctcctagatatgtgtggcacctgccagaatccggggaggacttgcagagggatctaaagagtttctatgggcaggcacctgcgattgtggagatatgtgttcaggctggtgcaaaggtgccggagaagtacaaagccacaatgagactagatataggaattccaacaagtttgagagaggccgaaatggtcgtctgaacaaagacgtttctattgtcacctcaagctccagtttgtctgaccagaggttcacagttttactcatgtatataccaggaaggcaggaaattagctcaaacagaatttgtctaggtctgtattgtttgtaccatatgctcgctatcatttaccaaattcttctttgtatgaggcatggatgtttcttacagcagttcgagatgcatttgctaatgctgatatggtttatatggtgagctgtgttttgtgtgaaaagtgaacaccaataaaatatcctggtattaacacagtcagc

SEQ ID NO: 15268 - DNA, 3176 bp, Oryza sativa
  ref <308>: DATABASE ACCESSION NUMBER: AK065797
  ref <309>: DATABASE ENTRY DATE: 2001-12-06
gagtcttgcttcatcataagtgccagctgtacctaccttgcctgcctatctgctttctggctcaaccaatcaaaacatttgcttgttttttggtgcacctatgccaggctggttcgtggtgtgtgaggcatctcctgtggtctgttgaatctattgatgaatctgaagatgcccaagaggaagaacactccagattatttcctgagataattgcactgaccttaaatatctcttccaagcacctccctgttgcatctaaatgcattgccgaagatactgtgcatgctgttggcgactttattttggagttactaaccctgactgaaagctcaatacttgacaagaaactcggaactacaggacatgttgctaaggctgcacctgtttttctagatgaaaccatcaaactgtgcagagtgtactccgaggctgcaaaatcagaccagtgcataatgagcatgcctaaagaagagacaactgaggaacacaaagagacagatcttactagcaacattgcccagattacagcatgcactattcagtccttgtgtaaaataggaacccatgcagcatccagtggtggaagccaggtgattttactgaatatatcatggaagggcataatttccttactgcagcttggtaaagggatggtagaagaaaaggtgaatgtaagagagattattttaattcctatctcagttgccattgaatctctgggggttgctactgagagatggtgtgtaccattacaagaagtccttggtaccgctgaagctaggagggctttcttaccaatcaaatatttcctaacgaacgccgttaggatttgttctatatatccatctgaaacaatggcaatatacaagagcataatccggtgtgcactgctgatttcacactcaagtattctgttctgcagaaatccccagttgaaagcagcaagtgaattactttttgagttattggagcctagttcctttcttctgttagacacacttatgaagtcaacagaagtaagtccagagtctaaatgccagctcgtgcagtactttttggaaaaagtacgaaccggtaatccagagtacaccggagaagttgatcatacaatgaatttcgctacattgggttgcattttttctgtggattctgatgttgataatataaacagggcacttttacctgctgaatttactgtgttcttgcacttcctcaatgcttccccatggttgagggaagaggtggtcattgaattatgtaagaagctacatctgtttcttaatattttaacgttggaagatgtctactcatatgtacttggctgccaaattcctgcactaagtagtgatgatgattctcctaaggttgtctggcaacctgtatatacttctcttatacaagccttgaagacttttatgattgctgcttcttcttcaagtgctgcttggagtgagtttgaagtcttcttacttgagaaccttttccatccccatttcctttgcttggaaattctaacagagctatggtgtttcttcatgcattatgctgaagctgaaacttcaacctatttaatcaatcagctatttcttctgttaaagactctagcgtcaccagaggaagttcttgcacctctcagtgctctgaggaagcttgctcgtgcatcatgtaacatcttgagctatgcatcgtctgcaacaattgatcaaatttataccatgctgaatgatagctcttccaagtcatcgatcttgtacttagcactgttgatggaaggatttccttttgattcattatctcgtggtgtaaaggaacatgctgtgaagacactgttcacttcttttgctgggtatctacagaatcagaactacttcaagaatcatggagaaatcaacttgccaacttcttctagttcgggcataatagggtttcctgtacatgctctagcctctgctttccagagttggtaagtcccttgtctcttactattattcagtctgatgctaaaatgctgcttttatttttggaaccaaagaaacaattcttttgtacacaatattttatgcagcgaaataaaggacgttaccattgatgaaaaaagtattgctactatgttcaagattgccacctctctcattaatctttatagaacttcacctgatagcagtaagaacctccttgtcaagcacatcagttccatattggttattattacgcacatgaggcatctttgtgcgttcagtgagttggagaagttaactttggagttgcacactctgttcatgtccagttttgataattcaaatacagcaatctctcagtgcaaaccatcaatggcttcatttatggcaattcttggtcacttgcacactactgaagacgatgcaaacccactttgttctgcaatgtgggatctgttccatttcttgctgagggagcggcattgggcactcattcaccttgcaatgggttcctttgggtactttgccgctcgcacttcttttgcacagctctggaaatttgttcctgtagatgctgccctttcctacacatgcacaggggtggacatagatgaggatgggtttatgtcagaattgaaagccttccttcagaaagaggtagccttgcgagatgacaaatggtctgaagagcaaatatgttcactagtttcagaggggagaatgctgaagaaactggttgaatcatgcttggaaattcctctagttccagagcctgagaaagtttcaattactaattatgtgaaaacaaagaaaaggaagatgccagatggaatttgtgaaggaatgcctgagaatgtttcagttactaatgatgtggaaacaaagaagaggaagatgccagatagaatttgtgaaggaatgatgcttgtacagaacggtctcaagatcatgcggagtgctctcagtgaaacagacttggcggagctgaaggacaggtttgctgtacacttgtcgcgccttgaggacgcagtttctcatcttgctagtttctctgataaaatctaagattctcgttgttaatgtacatccatcatgatttccaattcagtttcttcttagcgttgaagtgaaataccgttgtgattgaggctgctaatatgctatgaatgactggagcccaacttacagtgaatgcacatgaaagtaactttctttccc

SEQ ID NO: 15269 - DNA, 4554 bp, Oryza sativa
  ref <308>: DATABASE ACCESSION NUMBER: AK065798
  ref <309>: DATABASE ENTRY DATE: 2001-12-06
gacgggctacagcggcgagtgacgcgcttgcggctgcaggctgctgagctcgtccgtcaagcgccgccttaatttgagacgggtccgagcagctccaaccttgctctccacgaaccggccaagcccaattcgccgttgagttccggtcgacggaggaacacaagaacgacagggcaccacaccgctctaggagatccttccgatggcagagctgatggccaccatggtggtcgggccactgctgtccatggtgaaggacaaggcctccagctacctcctggagcagtacaaggtcatggagggcatggaggagcagcatgagattctcaaacgcaagctgcccgccatcctcgacgtcatcgccgacgccgaggagcaggcggcaaaacacagggaaggggcgaaagcatggcttgaggagctccggaaggtggcctaccaggccaatgatgtcttcgacgagttcaagtacgaggcactccgccgcaaagccaaggccaaggggcactacaagaagctcggcagcattgttgttataaagctcattcctactcacaaccgtattctgtttcgttataggatgggcaacaagctcaggatgatcctgaatgccattgaagtcctaattgcagagatgaatgcctttaggtttaagttccgaccagagccaccaatgtcctccatcaaatggagaaagacggattctaaaatctccaacctttctatggacattgccaacaagtcaagaaagaaagacaaagaggagattgtcaatcgattgcttgctcaagccagcaatggggatctcactgttattcccattgtaggaatgggggggatgggcaagaccaccttagcgcagctcgtttacaatgaccctgaaattcagaagcattttcagttgctgctctggttgtgtgtctctgacaacttcgatgtggattcgctggcaaaaagaatagttgaagcagctcccaaagaaatgaataagaagaatgataatggaggggccaaaaagttaccacaggatgaacttaaagaagttgtgagtgggcagaggtacctcctcattttggatgatgtctggaaccgtgatgccagtaagtgggaagcactcaagtacaaccttaagcatggtggcagcggtagctcagttttgacaacaactcgtgatcaagcagttgctcaactaatggctccagctcaagaagtttatgatctcaagaacctgaatgaaagcttcattgaggaaattatcaagagaagtgctttcaattcagaacaagaaaggcctcctcctgagctactcgaaatggttggtgatattgccaagaaatgttctggttcccctttagctgcaacagcattgggctctacactgcgtacgaagaccaccaagaaagaatgggacgctatattgagcagaagcacaatttgcgatgaggaaaatggaattttaccaatactcaaactcagttacaattgcttgccatcatatatgcggcaatgtttttccttctgtgctatttttcccaaggatcatgagatcgacgtggaaatgctgatccagttatggatggccaatggttttatcccggagaaacaaggagagtgccctgaaatcattggtaaaagaattttcagtgagttggtgtcaaggtcattttttcaggatgtgaaggggatcccatttgagttccatgatataaagtgctctaagattacttgtaagatccatgaccttatgcatgatgttgcacaatcttccatgggaaaagaatgcgctactatagctacagaacttagtaaaagtgatgattttccttattccgctcgccacttgtttttctcaggtgtcattttcctaaagaaagtatatccaggtatccaaacattgatatgttcctcgcaagaagaattgatacgttcctcgcgagaaatatcaaaatacagttcattgcgagctttaaagatggggggagattcattcctgaaaccaaaatatcttcatcacctgaggtatcttgatttgtcatacagtaaaattgaagcacttcctgaagacataagcatcctatatcatctgcaaacattgaacctttccatttgtgactgtctttgtcaactcccaaacggaatgaagtacatgaccgccctccgtcacttgtacactcacggatgttggaggttaaaaagcatgcctccggacctcggacacctcacttgcctacagacgcttacatgttttgtagccggttcttgctctggctgcagtgatttgggagagctgcggcagttggaccttggtggtcgactagagctaagaaaactggaaaatgtgacaaaagctgatgcaaaagcagcaaatctcggaaagaaggaaaaactgaccgaattgagcttaagatggactggtcagaagtacaaggaggcacagagtaataatcataaagaggtgctggaaggtctcacgcctcacgaggggctcaaggttctgagtatacttcactgtgggagcagtacatgtccaacatggatgaataaactgcgggacatggtgaagcttgtgttagatggttgcaaaaatctcgagaagcttcctccactgtggcagctgccagctctagaagttctttgccttgaaggactggatggtttaaattgcttgttcaactgtgacatatacacctcctttacattttgcagactgaaggagcttaccttggccagtatgagaaattttgagacatggtgggacacaaatgaggtaaaaggagaagagctgatatttcctgaggttgaaaagctgataatcaaaagttgtcctaggctaactgccttaccaaaagcgtcaaatgtgatttcagaattgtctggcggagttagcaccgtgtgtcattctgcatttccagcattgaaggaaatggaattatatggtttggatatctttcagaaatgggaggcagtcgatggaactccaagggaggaggtaacatttcctcagctttacaaattagatattagactgtgcccagagttgactactctacctgaagcaccaaagctgagagacttaaacatatatgaagtcaatcagcaaatatccctacaggcagccagcagatatattacttcattgtccagtctccacctgcatttgtcaactgatgacacagaaacagcaccggtggccaagcaacaagattcgagtgaattggtgattgaggatgagaaatggaatcataaatctcccctggaacttatggacttaactggctgcaaccttttattctcttacccaagtgcgttggctctgtggacatgttttgttcagctcctagatctgaatatttgggaagtcgatgcgcttgtcgactggccagaagaggtgttccagggcttggtttccttgaggaagttacatattcttcaatgcaagaatctgacaggactcacacaagctcgtgggcaatctacactagcaccaagtgaactcctgccacgtttggagtccctgcagatacgccgttgttattcttttgtagaggtccccaacctaccgacgtctctcaagctattacaaattacggactgccatgacctgaggtccatcatattcaatcagcagcaggatacgacgatgttggtgagtgcagaaagcttcgcacagccggacaagtcatcgttaatatcagggtccaccagcgagaccaacgatcgcgtccttccacgcctagaatctctagtaatagagtattgcaatcgtttgaaggttctccatcttcctccgtccatcaagaaattggatattgtacgctgtgaaaaacttcagtcactctcaggaaagctggatgccgttcgagcattaaatatcagctattgcgggagcttgaaatcactggaatcttgcttaggagagctcccgtcgctgcaacacctcagacttgttaattgcccaggcctggtatccttgccgaaggggcctcaagcatactcatctcttacatctcttgaaattcgttattgttctggtataaatttgcttccaccgagcctgcagcaacgtctggatgacatcgagaataaagaactagatgcctgctatgaagaatcagaggcaaaaccagaaccaaagtctcctcatcgtcaatctgcaatcagtaggctgctgtgcttggagtagcagtttcaggaccaaatgagagttgtcatcatggatcgttaccgaatctgcaattgttgggttattaattgtgtgattgtatctcatggtagaatgtattacctacctaccttttctcaagataaactccactaaagtcgatcttctgtttggtgttgttgagttgtggtccaaatttatttgcacttaataaatgccagcttctgccgtagcggagcggaggcccgtcgtcgggaggcttgggctggagcgtcgccgggaggcctgcccgtcatcccttttagagttccaccatatatatacctcttgtaagccgccttacggcgatgtaacctcacctcagatatagtaaagatattttgctggctggc

SEQ ID NO: 15270 - DNA, 3597 bp, Oryza sativa
  ref <308>: DATABASE ACCESSION NUMBER: AK065799
  ref <309>: DATABASE ENTRY DATE: 2001-12-06
gaccctgcattgttgcctacgaactcgaaattcctgtcatggcggaggcggaccatgggggagagaaacccatcgcccacgccctgagagacgcgctgttccagttcgttgtcaagtccaggaagctggcgtcccccatgttgcgggcgttggggcgcgcgtcgacggggccggtcaccgtcggcgacgacgcagctggcggcgctcaggtccatgctccgcagggtccacgccgcgctccgcgacgccgagaggctgtccgtcgccgaccactccgcccgactctggctcgccgagctcggcgacctcgagtaccgcgccgaggacgtgttcgaggagctcgagtacgagtgccgccgcgccgcgcagctggaggacctcaagatcgaccttcttcgcgccgtgggggcggccccgacgacggggaagcggaagcgggaggtcgcgcaactgttcgccgccgcgccggccgcgcgcctccgccgcaagatagacgacatctgggcgaggtacggggagatcgcgtcggaccgggagaggctccggctaaggcccggcgacggcgcggcgaggcggccggcggctggtgcgctcgtgccaagcagctcgcttccccgtggcgagatccactgccgggagcgcgacctccagagggtgaccgacctggtttgccgctgcaagcccgacggcggtagaaactacgccgtcgtggcaatcgtcgggatggccggcgtcgggaagacgtcgctggcgcagcacgtgtgcagcgaggaggccgtcgcgtcgcagttcgacctcaatctctgggcctgggtctcccaagagttcgacgtcatcggcatgacggccaagatcgtcgaggccatcaccagagcacgccccgactgctccgagctgaacgcgctccacggaaccatggtcgaacacctggcgggcaagaggtgtctgctcgtcctcgacgacgtctgggacgacaatcccatccactgggacaccatcacggcgccgctgagctgctgcgcgccggggagcacagtcgtcatcacgacgaggagcaagatggtcgccaagatggttacccccaatgtgtaccatctcgactgtttgtccgacgaacacagctggtacatgtgccggcgacgggcatcacgcggcggcgccaccatcgacgacgagcttgccagcatcggccaacagattgccaagaaatgcagaggcttgccattggcagcagaggcagcaggcacaaccatgaacacctcagtcactagggagcactggaatcatgtcctggagagcaacctgtgggctgacaacgatgaggccaagaacaatgtcctacctgcactcaaggtgagctatgaccatctaccggcgccattgaagcgctgcttcgccttctgctcattgttcccgaagagcttcgtcttcgacaaggacgctctggtccagctctggaccgcgcagggcttcatcaaaacccgaggagaatgccggcctgaagatgtcggcgccggttacttctatgacttggtagcaagatgcttcttccagctttctccatctcatggcataggtaaaggaaagtatgtcatgcatgacctgtatcaggagcttgcgcaatttgtttcaggccatgaatgtaggatgatacatcaactaaacctgactggagccgacaagacgactcgccatttgtccatcgtccacgacgagtcaaattccgacaaagaactattgttaaaatcattttgtagccccgatctaagaacattcctttttcttgcaagaatggaacaggtcatccgtggagaaatgccatacagaagaaagattgttccctgtggactggtcacagattttgaatgtctaagagttctaggtttgagcaacactgacattgtagaggtaccaaagtctattggaagtctaatacatctcaggtaccttggcctggataacactggaatccagatgctgccagagtcagtaggtgccctcttccacctgcagacaatcaagcttaaccattgctcatccctcactcagttgccacaaggcattaagctcctgctgaacttaagatgcctggagattgcacattccaatgtacaaatgccatctgggatcagagtactgactagcctacagaagctgcctattttcaaaggatgttctgttcaaggaaccattttgcagcctttctgaaaatatttgccacctttcacttgttctttcagactccaacgctgttgtgctgactaaagaacttggacatctgcaggcccttatggttgtcaggtgatctgcatcagagtactcaggttcgtttatgccgcttttgaaaatattgggtttggattattttctcgtcaaaaccagattttttaagagcactgaatttgagcggtacaacaacagtagaattgaccagttctattattgggaggatgaaagacttaagattcttggctctgaacaacacaaagacagagagtctcccaatcccaactgattgttcagataggtcagttaaacacccttcagacattggaactcaaggattgttgctgcctcattgagttaccgtaaagcacaaagaatttgaccaagctgcgacaccttgatgttcgaaagaaaccaggaaatgttcatgttagaatggcttctgggctcgggcaactagctgatctgcaaacagtaacagtatttaatattggggatgatttatcacattgttcaattggggacctgaagaatctctgtagactaaggggacatattcatataacagggcttcagaatattactgcaggcgatgatgccaaagaagcaaatctagtagtaatcaattcctagaagctttgacactagaatgatgttgcagcagcgaggaattggaagatgacagtgacaaagaaattgttaatcaggtccaaaatcttcagcctaacactagcctttttgagctagctatacaaaattatcctggcaatttattccctatttggattcaggattcttcccttggcatgctggtgtcaattacgatcgatgactgccaaaattgtaatgagatcccatatcttggtgatcttccatctcttaaatatctcttcatacagaaaatgtatgttgttgaaagctttggacaaagaagtaactctttgactactgatgggagatgtactgaatctttgggagatatactctttgcaattctggaatggaacaagcaaggacgatttcccacggcttcgttgtctctctgtcagtagatgcccaaaactaagtaatttgcagcgacgaatgacacagcagctcaggtgttgcagtacctcagacccaattcaaatctggaggagctcatcatgaaaggttataatggatcatcattcccatcatgggtagggtctctacctttggacaggttagcttcaatagaactcaaagactgacaaaattgcgaagaactaccacctcctggaagattcccatccctgaaacatgatgtgatacagtcactaccaagtgtcaaactagttgggcctgaatttcttggcaatgttggcgatattaattacttttttttttgac

SEQ ID NO: 15271 - DNA, 1590 bp, Oryza sativa
  ref <308>: DATABASE ACCESSION NUMBER: AK065800
  ref <309>: DATABASE ENTRY DATE: 2001-12-06
gtagtgttccccttctccatctacctgtctgtcccccaattccccacttccccaacccaggcgatcctccgccgccgccgccggcggccggccgcctccctccgccgccacgcagccgcgccccctccgccggacgctccagaccccggtgagcctcccctcctccgccggccgccttgcccgcgcccgaacgccacgccaagctcaggatcatttcgtcgatttcgtggattggatggccaaccttggcggtggcgcgatgccggcgggatcctcgggcggcgacggcgaggtggaggccgggttcgcgaagctccagggggaggatttcgagtactacatgcagacctactcgatcatgctggggcgcaacagcaagaagtcgacggtggacgtggacctctccagcctcggcggcgggatgaacatctcgcgccaccacgcccggatcttctacgacttccagcgccgccgcttcgcgctcgacgtgatcggcaagaacgggtgcctcgtcgagggcgtcctccacctccccgggaaccaccccgtgaagctggattcccaggatctgctccagattggggacaagaagttctacttcttgctgcccacccggtccatcttcgcgtccgccgccgctgctcggcatccgcctatcatcccgcagcagatgcctccaccatcctatgtgcggacaggccgccctcgtctgtctgaatttcatgacaggtcctttgagggtgactatggccgggagggtgatgagattgggaatggtatcagtgagagtggtgggatgagggggaagttgattaagaggaacaagaagctgtccgcggagtcggagatgtatggcgggcaccggatcaatgttgaagcaatcgggacactcggtgaagacagcagatcagaaataagatcaaggggtgacagggatatggataaccagcacatcctgcaagcagaagaaaaggatgtagtgtcatctgttgcaacagtgttatctgacctctgtggtcctggagaatggatgcctatggcaaaactccacacagagcttcttgaacagtttggcaatgtgtggcaacacagcagggtccggaagtacctttcaccagaggactggtcgccaactgaaacaaaaggtaggccatggtacggtctccttgcattgctgaggaagtatccggaacattttgtcatcaacacaagatcgaaaggcagggtaacatcggagttcgtctcgctggtctctttgctctcctagaggtaacctggaccgtggcataatctgttctcaccgttctggccctgctgaagaatgattcgcatcttcaatcgctgaactgaattgaagcctgttgtactttactggcctgtgtttacccttagctatgtaatccggagaaatacatagggaaacaggattttaacttatgttagtagctgggttcatgtctcactgttgtgtggggtgagaatgtatgtctagtgttgttgagactggaagcgcgaaagttcacagcattttgctgattggaagattttgaaactttgccgtactcgaagaagtgtagttgttcatccttc

SEQ ID NO: 15272 - DNA, 3192 bp, Oryza sativa
  ref <308>: DATABASE ACCESSION NUMBER: AK065801
  ref <309>: DATABASE ENTRY DATE: 2001-12-06
ggatcgtccccgcggggagagtcgcacgcacggcccggcctctcgcgtcgcggtgtcggcgcctcgtcgcgcagaccgcaaccgcgcagctagagcagatccccccgccgcgccgcgtcgtctcgctctcatctcctcccccaaaaagccggaagagagagagagagagggagagagagagagaataattcgaacgcggcatcgcgctggtgagtgtgagagtgagatcgatggcggcggcgtccatctcgcggagcctcctccgccgatcccgctgcggcggcggggagcaccacctcctcctgctggcgcgcggcttcgtcacggcggagtgccaccgccccgtcgtgctccacaagcgcggctccgacatcctccacgacccatggttcaaccggggcacggggttctcgatgacggagagggaccgcctcggcctccgcggcctgctcccgcccaacgtcgtctcctcccagcagcagatcgaccgattcatgcttgacatgcaacggctgcagaaatatgcgagagatggcccatcggatacttacccgttagcaaaatggcgtatccttaacaggctgcatgacagaaatgaaacaatgtattacaaggtcttaatagataatattgaggaacatgcacctattgtttacacgccgactgttggacttgtttgtcaaaactatagtggtttatttagacggcctcggggaatgtattttagtgcagaagatcgtggggaaatgatgtccatggtgtacaactggccagctgaccaggttgacatgatagtagtgactgatggaagcaggatattgggcctgggtgatctcggggtgcatggtattggtattgccattggaaagttggatctatatgttgctgctgctggaataaatccccagagggttcttccggtcatgattgatgtgggaacaaacaatgagaagctcctcaaggatcctctgtatcttgggttacaagaacatcgtctggagggggaagaatatgtagcgattatcgatgaatttatggaagcggttttcgctcgctggccgaatgttattgtacagtttgaagatttccagagcaagtgggccttcaggttgttgcagcgttacaggaagacttatcggatgtttaatgatgacgttcagggaactgctggcgttgctatagctggtctcttaggagctgtaagagcacaaggaaggccaatgttagatttcccaaagcaaaagattgttgttgcaggggctggcagtgctgggattggtgttgtgaatgctgcaagccggactatggcaaggatgctgggaaacaatgaggttgcttttgagagtgccaggagtcaattctggatagtcgatgcccatggtctaataacagaggagcgcacaaacattgacccagatgcacggccttttgctaggagaaagagtgaactaggtcaccaaggcctaagtgaaggggcgagcttggttgaagtggttaaaaaggtgaagcctgatgtcatacttggattatctgctgttggtggtttgttctcaaaggaggttttagaagcattaaaagactcatcctcttcaagaccagcaattttcgcgatgtcaaatccaactaagaatgctgaatgtacacctgaagaagccttttcaattcttggtgaaaagatcatctttgccagtggaagcccatttagtgatgtggatcttggtaatggaaagattggccactcaaatcaagggaataacatgtatctctttcctggaatagggcttggaacccttctatctggagcacgggttatctcagacggaatgcttcaggctgcagctgaacgcttggcttcgtatatgaaagaagaggaagttctcgaagggatagtataccctccaatctccagaatacgtgatatcaccaaggaggtggcagcagcagttgtgaaggaagctgttgcagaggatctagctgagggatatcgtgacatggatgcacgtgaacttgcaagactcagtgaggaagaaacagttgagtatgtccagcagaacatgtggagtccagtttatccaacaatagtgtacaagaaagactagagctttaatgtccacgtattctattgctcatgcccaattccctgaaggctgcagtttgtatctttcaaaatactggcgcttctgttatgagaatccaatatattgttttcatgcaacgtcaagtgttagtacacaatattgtcttgattttaaaatggatctaatactgtttggaagtgtatagtaggctccctaggtcgaatgtcgactttgcattttatatccacaactattaggtgcgcaacaattgggacctgtgtgccaattctacacagatgactataacttgtatttatgtttgaacacatcaatcaatagaagcctcaggtttactggtggcagtctgttcttgctgccgtcactgttattttcttgttggttaacttatgtttatgtttgaacacatcatgtgatggttacccctttattggcatatatttttcccacgtcactgttatttttgtattagaactttacttgcctttattgtttgtaagatttgaggtacaagttctagcatatattcacggcctgatcctcaccagcagtttaaccatattctatcttcagtattttgcaatttgcagctatggctacctactacaagtgcccatccttgtccatggtgaatggaggcatagctttacttctgatcattgttgctctcctaatcgtggtactacatctgcgcaactgatggcgtgagatgcgggtactccttccaagtacgctactttgcagatctttttcctgttcaaaatagaaatccttcatgatatccactacaagggtgtaaggctcctggaaagctgagagttagtgcaatccatgtcagctatgatgcgatcaacatggaaccttgtggttgtggcccagtaggtatatctccttcctggtagcagccagcgtggtatgttgcctaccttagttcataatatcagtctgcacatgtcaaaaattatgatctggttcaaacttgggttgttttaggtgaattgagactcggggtcaaatttttacgcttacgattatcatttcattcatatgtagtagtaaccatttacatgttaataatccagtcaaatgaattgcc

SEQ ID NO: 15273 - DNA, 2388 bp, Oryza sativa
  ref <308>: DATABASE ACCESSION NUMBER: AK065802
  ref <309>: DATABASE ENTRY DATE: 2001-12-06
gatttccatccgcttctactactccactatttgccaagccaatcgggagatcgagcagagctgcagagagcagagggagatcggagatcgagagcgcgcggggggagctagagctaggtagcgagggaggctgctgcagcagcgagaagcccaagcccctagggcgatggcggcggaggccgggagcggcggcgtggtgaagcacatcctgctggcgcggttcaaggaggacgtggcgccggagcggctggaccagctcatccgcggctatgccggcctcgtcgacctcgtcccttccatgaaggccttccactggggaactgacgtgagcatagagaacatgcaccaaggattcacacacgtatttgagtccacttttgaaagcacagaaggagtcaaggagtacattgaacacccagcacatgttgaatttgcaaacgagttcctgcctgtgttggagaagaccctcataatcgactacaagccaactatcgtaaataacaactgagctaataacagtttggatgcttctttcatcgttaattgcacttcagaatgtctgggagaattttatttttagttacccaaatttgaactttcatgctgaataaatttgccctatatattacctttcgagagcagttgttcaatttgttgtacgcaatccaaatagtttgcttgttatgttttaaaaagctagcctccaatatactcctccttttcataatataagatgtttcaattttttttaaggcaaacttctacaattttgaccaacgtttatatagaaaaacatagcaactcttataacaccaaaatagttatattaaatctaacattaaatatattctgatagtatatttgtttggggttgaaaatattgttatgttttttctataaatttggtcaaacttaagtttttgaagtagaaacttttttgaagtagaaaatagtcaaagtgtcttataatatataccatacctgagttttcctttaagcacttgcagtttttattatacttcaaataagttttttgatgtcaaatacgttaacctctgtattatccaagattttgtgcagtaaaaactgtgtgatactgagtctgagagcggaattgtataaccaagaataatagaagagtatacttcatggttctacaaatcaataggagtcctttgtgttgaacttcaagtttactgtcctctatccaaaacaggcttgtttagagtccactgagttttccacttgacaaaactcgattaatcatgcatagataacatttgcagagctcctcaatagaaacagatttaattcatccattcttgaactcagaaaatagatgctgctttacaatgtgcagtcaaacctaaactgtattcactagtacaagtaatatgatttgtcacatgaacatgggaatagcagattttattttcaaaagtttttgatttaagaaggtaatagtcaaagatatatgtaatgaggatcgtgttgatattttgtttggaggagcttaagattctaaaagtcttgttgattggtagttagcttctgggaagctaggttttctagtttttgacttttagggcatgtttggcacagctccagttccagctacaccttttctaaaactggagctcagccaaacagtttcggctcacctaaaataggagcggagctaggtggagcgctctcataaaataaactagggatgtggagctgggttgatgaggacatcaacaccatcgatacatccacgtccccccatgtacagcatgatggtcctattacccgcgctcgtgcacgtcaactaaattatcaggtgagttctttcttgagttcatattcctcgtctttataccccggagacgcgtgcactcgtgttttactcaggaacgatggagaggatccaaagggaagaggattcgcgcggggtggattcggactgcagggcagcgccaacttctgacggccgccacgacttcatgcgaactccgatttgggcgtgcaagtacttcatggaaagcttatcaagtctactttcaaatggatccagccacatgtccataactgttctggagcggccgcaattgtcattttactcccgactattctgtccatggtgctgcgtcacctcttttggcccaatgggctgtgtatccaagttgggcgcattaggggcgcgtcctagggttggagcacgaccctatggtcgttcttcccctctttttatgcctctagtcgccgccaagaacaggcgggttttgatgatagagatagcttcttgctaccagctcgcagcgcgcatgttggctaaaccgcccatctgcctgtaatcggaaccccaccatattgagtttgatagtgaaactttcatctttatctagc

SEQ ID NO: 15274 - DNA, 3491 bp, Oryza sativa
  ref <308>: DATABASE ACCESSION NUMBER: AK065803
  ref <309>: DATABASE ENTRY DATE: 2001-12-06
ggaatggtcagtccgctgcaacagcaagcgaggactgcccgaccggcagccacgagcggcactcccggctcccgcgatggcgatgccacggcggtcagtccgccgtccgcgcgctccggtgggcagtgccggcttgccgccgtcacagagtcacacacaccctgtcgagcgaatatgcatgtcttctcaaggtctagctagccatccactcgaactctcttgttcttgttacccagatctaccaggaggatgataataatctggtcggctggtctgctacatgcctgctatctgacgacgaattcctgtcgcggaatcagtgttgattttgacctcacccacaccacggtgggtggactgacgcgcgcaagaatcaggtaagagatgaacaaaacgttcacttccattaccttttggcacaatctactgaactactgtatccgcactatgggtcagtttgagggagcttaaaattctgaaaagcagccggttgaaagccagcttacgagaatctggaaaagctaggttttccagtttctgcttctagtttattttcttgattctacaactatagcttctctcagaatctgaaccaaaagctggactgtttggggggagcttctgattctggaagaagctgcagcagctggactgtttggggggagcttctaattctggaagaagctgcagcagctagaagctcccccaatcaggccctatgactccttggcttaagccaagcacacgcccatttgatgagaattctttcaagagttttacgaaaatactaacttttcttcttcctttctgaggcatctcaacaaactctccacttgtgattcatgcttgtgcccactgcccaaccaccaccaaactactatgttgtatctcctcatcttgctcttgatctttgccccctcagcatcggcgaccgggggagcgagtggcacagtgccagttctgaaccccatatccaggttctgcaactcgacggccgcacgacggacctaccaaccgaacagcacgtttgaggccaaccttttgctagtctggtcgctgcaatcgtggcgaacgcctcggcgtccggtggcttctccgctggctccattggcgccgccccagacaccgtctacggcctcacgctctgccgaggggacgtcacgggtgcggactgcgctgcgtgcctctcctcaacatctgtggacgacgtacagcagtggtgtggccgcagtaaggaagtgactgtatacagggacacatgccagctttggttctccgagcaggactttgtctctgctgccagtaatatcccagagactgcagcatggaacataaacaacattaccgagccagtgttccctgggtgggacccaacaacgccgagagtatttcctttgtcactggcaccgtgtatacactacttcgtgaaacagcaaagtgggcagcgtacagcaccaaaaagcgatttgccaccgcgaagatggacatcggtggagcctttccgacaatctattccctgacgcagtgcacaccagacctttcttcagaaagttgcttcaagtgtcttcagggtactattcaggagtctctgaagtggtttgatgggaggagagggggaaggattattggggtgcgttgtttgataaggttcgaaacaagcatattctacaacggggagcccatgcgaattatggggccatcaacgaattcaacatctgcagatggcaatagaagcaagagaaagctcagtggtttggctgtaagcatagtgtttcccgtgatgggtgtacttctcttctgcgtcatccttggcttcggatggatcatcagaaggaataaaataggaaaagcttccctgcaagaaaaaacttctacatacttgtatgaagaggaagcactagcctggcccatacaaggacagagctcggagttgttgtttgactttgcatgcataatacgtgcaaccaataacttctctcgggaaaacaaaattggtgaaggtggctttggtacaatatacaagggtaaacttgacagattagagattgctgttaagaggcttgattcacattctggtcaaggttttgtggagttcagaaatgaaattcaacttatagccaaactccagcactccaatttagttagactcctgggttgctgcagtaaaggagaagagaagatattggtgtatgaatatctaccaaacaaaaagcctagacttcttcatatttggtatctaaagcctcactgatattatgttgtttgctatacttggtataattacatcttttggattatttggttcaagtaagaaacattggtgaagcgtatcttcagttaggctgttcgggcaaaccttatatgacgtatcacgtatgtgcagatgagccaaatcaaagagctttgctagattggaacaaacgactggcaataattgaagggatagcacaaggactcctgtacctacacaagcactcccgtttgcgcgtcacacatagagatctgaaagcaagtaatgttctcttggatcataatatgaatcctaaaatttcagattttgggctagctaaaatattcagctctaatgatattgaaggaaacacaaaaagggtggcgggtacatacggttacatggctcctgagtatgcttctgagggtctcttctcggtcaaatccgatgtgttcagtttcggtgttctgaccctcgagatcgtaagtgggaaaagaaatcctggcttccaccagtatggtgacttcctaaatcttctaggatatgcctggcagctatggacagagggaagatggctcaaactcatagatgtggtcctgttaaccgattgcctagtagaagcaccactgatgatgaaatgcgtcaacatcgcattgctatgtgtacaggagaatgcggctgatcgacctaccatgtcagatgtcgtggcaatgctaagcagtgaaggggtgagtctgcctgtgcccaagcacccagcatacttcaacgtaagggtcagaaacggagaggcgtcgtcagctattgatcttgagctgtgcagtgtgaatgaagtgaccattacagccccaggttgtcgatagccagttcacaatctaaataacatgtaagttgctgttgatgagattaatcatgcctacatttggcattatccatgtcaggtgaccttatcctctggatactcaagtaacacagaggaccagtgcattcggcattggatgacaagtcagctttcattggaacagtactaactaaggtctcctgttgcaagcagtttttgagatgatagaagaatattcctggcccgaagctggatgattaaatgattatgtgatgttctttgtttcctctagaaaacaatggaagtttttattgtttggtttgcaatcaaggatctttgttttgctcttgttgggatcgtttgggcatttcaaggacatttttagtggttgatcgaagaaaaattctattcgacactgagttc

SEQ ID NO: 15275 - DNA, 2353 bp, Oryza sativa
  ref <308>: DATABASE ACCESSION NUMBER: AK065804
  ref <309>: DATABASE ENTRY DATE: 2001-12-06
gaagaaaaataaaggaattaaaaagaaaaaactaaaatatccgtttcgccgcggtggttcgcgctccacgacggcgtgctctcctactataagatccatggtcccgaccgcatcgtcctctcgcgcgagaccgagcgcggcgccaaggtcatcggcgaggactccctccgccgcctctcccgaccctccacctcctcgtcttcctccgcgcactccaacggtcaccacctaccccgcaagcctatcggcgaaattcacctcaaggtgtcgtccgtgcgggagagcagatcggatgacaggaggttctcgatcttctcggggacgaagaggctgcacctccgggcggagacaagggaggacagggcggcgtgggtcgaggcgctgcaggcgaccaaggagatgttcccgcggatgtccacgagcgagatggtggggccaggggacaccgcagcggccgtggctgtctccaccgagcgcctaaggcagcggctgcagcaggaaggagtcagcgaggcggccattgctgacagcgaaaggatcgtgcgcaccgagtttgaggtcttgcacaagcagctcatgctccttaagcagaagcagacgctcctcctggataccctccgtcagctagagaaggaagtgctagtgaatctgatgattataatgaaccacaagatccagctgaagacgaaactgacgatgatgagaatatatattttgatacacgagatttcctgtcatcaagttcttttaaaagcagtggatctgatttccaaagatcagaagctggttcggatgatgaggatgattatccaatggatggtattgatacctctatgaaatccgttggaattagttacccatatgtcagaaggcgtaagaagctgccagatccagtcgagaaagagaagggtgtaagcttgtggtcaatgatcaaggacaatataggaaaggatctaaccaaagtttgtctgcctgtttatttcaatgaaccactctcatctttacagaaatgctttgaagatcttgagtattcctaccttattgatcgcgcttatgaatgggggaaaaggggcaatagtctgatgaggatacttagtgtagcagcatttgctgtttctggctatgcatctacggatggaagaagctgtaagcccttcaatccacttcttggggagacctatgaagcagattatccagacaaaggcctccgttttttctcagaaaaggttagtcaccatcctatggtggttgcatgccattgtgagggaactgggtggcggttttgggcagatagcaacctaaaaagcaagttctggggtcgctccattcaacttgatcctgttggtgtgctaaccttggagttcgatgatggtgaagttttccagtggagcaaggtgacaacttccatttacaatctcatattgggtaaactgtattgtgatcattatggtactatgcgaatacaaggcaataatgaatattcgtgcaagttgaagtttaaggagcagtcaattattgatcgtaacccacatcaggtacaaggtgttgttcaggaccgaagtggtcgaactgttgctatactctttgggaaatgggatgaaagcatgcactatgtgatgggtgattgctttggaaaaggcaagggatctgaaaatttctcagaggcccatttgttgtggaaaagaagcaaaccacctaagtttcccaccagatacaattttactcgctttgcaatcacattaaatgaacttaccgctggattgaaggaaaaactgccaccaacagactctagattgcgaccagatcagcgatgcctagagaatggtgagtatgaaagagcaaatgctgagaagttgaggcttgaacagagacaacgacaggcacggaagatgcaggagagcgggtggaaacctcggtggtttgcaaaagataaagctaccgacacataccgctaccttggtggttactgggaatccagagaaaagggcagctgggaaggctgtccagatatcttcggacaagttcctaacgatttgatgataactgactaggctttgagtaggttacaggtcttctggttctctgcttttattctttctgtgggatcacttgattccagattttttagcggtttatattagagcaattgaacgggtcttggcctgtaaggagaggctgtgcttcagacatattgttttcgtacataataagtgaggttcgtccaaagtgtcgcttcgaatcagtgttttcttgtgaggattgcatgctcacaagttcagagtgctttatcataggccatctgtgtataccagacatgtaaaatgttctgaagcgcaaaagaatgaaattcagc

SEQ ID NO: 15276 - DNA, 1599 bp, Oryza sativa
  ref <308>: DATABASE ACCESSION NUMBER: AK065805
  ref <309>: DATABASE ENTRY DATE: 2001-12-06
gttttgttactacatgcatctttgtgcctgcaggattttgtcagactgtattcccatcaagcagaggaagcgtacgccctatttgatcatttctagctgtctatctctatttccgtggctaatccttgagatgtcagaacctttgaggagctcaagcaattttcttactgctttgctgatagtacagaacttgggatctgccatggcagatgttgttatagatgcaatgattgcagaagcagttcgatcagctgggccagaatttgctggtgatctccagtcactatcttggtcatcaatggcagtaggggggatttttgggagcttattggggggatatgcactgtccaatctccctatacatgttatatatattattttctcggcgcttccattgtttcaactaatttcctgcatatttgttgaggaatctccaaaaggatttgagagtagaatggataatgctgcacctaaacatgtcgaggatcaaactattgatgcttctcccggaaaaagctctagtgaatcatataaatatgaagatactagaaggcgaaaaggagctaggagaaataataaaaggaaatcattgtccaaacgacctgagtaccatgacaagaacaagtcaactaacttaaggccatacttgtctctgaaatcagcattcttcagtttatgcacagcattcaaacaaccaactattttacgacctatggcgtggtttttcttttcgaatgtagcaattccaaatatctcaacagtcatgttctactatcaaacagaggtcctacatttggaggcatcctttctggggactgcacgtgtaattgggtggttcagtctaatgcttggcacatatatctacaaccgctattttaaacacaagaaactcaggaatattctcatgtttgcacatgttggtcttgccataattggcgtactggacattcttttggtgttgcggttacatgttcactatggaattacagacaaatacatggtcttgtggggttctgctttggctgatgcaattaaccagttcaagatgatgccgttcctcatcctctctgggcagctttgccctcctggaatcgagggaacactgttcgctctgttcatgtccatcaacaactttggctcgactttaggctcattcttgggagcggctctggcgtcagctttaagcatctcatcagcacaattcgacaatctggcgctcggcttaggtgtacagctgattggcactctcctaccggttggatttttgtttctgataccaaaggaagttacagggctaacgtcataggaagagggatacacatacctgaccatcattttcttttttccggattggtttgcagtcttaagtgctggagtaattcagaacagaaaaattaaaggtagcatgatgaaggtactaaggtagtcaattctgttgaaagatgtatacatgaatacactagagtgaggaagaatacaaatagacagtagatggtaggcattgccaagagttgagcaaaggttatgtacctgcgtaatgtactacagtggaagtgacattttttccccggagaaattgacattactgacattggaatc

SEQ ID NO: 15277 - DNA, 1880 bp, Oryza sativa
  ref <308>: DATABASE ACCESSION NUMBER: AK065806
  ref <309>: DATABASE ENTRY DATE: 2001-12-06
ggatcggaagaagtggcccaaggctccgacggcgcgcgagttgctgtggtggttgtgggagcccccgtcggcgacgactccgccgctcctccgcccgcggctgcagctggagcagccccggcggtgacccccggcgaggaggcggctaagcgggagtccttgttggcggcggcggcggcggcggcggctgctgagtgcaagcaggaggcagcggcggcggcgacggggttgcaggccatggcggtcaccgtggcgcgggacgtcgaggcgggcggcctggacgccagcaccagcggggccgcggacgagaagccctcgtggttcacccctaagagattacttgtgatgttctgcctcatcaacatgctaaactatgttgaccggggtgcaatagcaagtaatggtgtgaatggtagccgccaaagttgtactggtggcacatgcacatcaggttctggaattcagggtgatttcaatctgaacaattttgaagatggtgtgctatcatcagcatttatggttgggttgttgattgcttcgcccatatttgcatcattggcaaaaatacacaatcctttcaggcttattggtgttggattattagtctggactattgcaacagctggttgtgggtgctcatttgatttctggtcaattactatatgccgcatgttagttggtgttggtgaagcatcatttataagtcttgcagctccattcattgatgataatgctccagcagcacagaaaacagcatggcttgctatgttctacatgtgtatacccactggaatagcggttggctatgtttatggtggtttggttggaaatagtctgcactggcgtgctgctttctggggagagtcgattttgatgcttccttttgttattctgggctttgtaataaagccattagagctcaaaggatttaatcacagtgtgaagacaaaagagtatggtgagatgctcaatccagagcggcaagatgagacaaagcagggtgcgtctattggagttgatggtcttgcagaaacgctaccacacaagttctccatctcaagttttgggaagaaagttctaaccgaaatcaaacactttatgaaagatataatgtttggtggaataacaattgtctgtggaatatttgggactctttcagggggtttcattcttgacaagatagactcaacaatatctaatgctttcaagcttctttctggtgcaacttttcttggagcaatattttgttttggtgccttttgtttcaagagcctttatggattcatactcttcttttcagtaggagagcttttggtctttgcaactcaggccccagtaaactatgtatgccttcattgtgtaaaaccaagtttgcggccattatcaatggctatgtcaactgttgcaatccatatatttggtgatgtgccttcttcacctcttgttgggcttcttcaggacaaaatccataactggagatcgacagctcttaccttgacatctatcctcttcattgcagctatattttggtttattggcatatttgtccgtagcgttgatcgtttcaacgaacagagtgagcatgatgtccctgccgtcgagagatcaaacctcaggccattgctcgatgaaaacgaagaggcacgggcatcttagtaatctgcgcaatcattaaatccgtgtttttctcttgtagattactcttggccggattatgtccatcacgccaggaacatgtgaaatgcaaatttgcatgtgtatcggctgtacctgtaaatatagaagaaagcagaatcttttgctttgtgatttttcttttctttttgtgtacagaccacagatacaagcaacagagtatcagaactacttggtttctggtg

SEQ ID NO: 15278 - DNA, 1850 bp, Oryza sativa
  ref <308>: DATABASE ACCESSION NUMBER: AK065807
  ref <309>: DATABASE ENTRY DATE: 2001-12-06
gactggttcggtgtgagcgagcgagcgagatagccatatcttcgctgtgcgtcgtcgtcgtcgctgcgtggtgaattcttggggaggaggaggacgagatggcgggaggcggcgtggcggcgctgggggtgaagaaggagcgggcggcggagtacaagggccgcatgacgctcgccgtcggcatggcctgcctcgtcgccgccgtcggcggcgccatcttcggctacgacatcggcatctccgggggagtgacgtccatggatccgttcctcaagaagttcttcccggtggtgttccggaagaagaacgacgacggccagaacaactactgcaagtacgacaaccagggcctctcggcgttcacctcctccctctacctcgccggcctcgtctcctcccttgccgcctcgccggtgacgaggaactacggccgccgcgccagcatcgtctgcggcggcctcagcttcctcgccggcgccacgctcaacgccgccgccgttaacctcgtcatgctcatcctcggccgcatcctgctcggcgtcggcatcggcttcggcaaccaggccgtgccgctgtacctgtcggaaatggcgccggcgcacctccgcggcgcgctgaacatgatgttccagctggcgacgacgctgggcatcttcacggcgaacatgatcaactacgggacgcagcacatcaggccgtgggggtggcggctctcgctggggctcgcggcggcgccggcgctgctgatgaccgtcggcgggctgctcctgccggagacgcccaacagcctgatcgagcgcgggcgcgtcgaggagggccgccgcgtgctggagcgcatccggggcaccgccgacgtggacgccgagttcacggacatggcggaggcgagcgagctcgccaactccatcgagcacccgttccgcaacatcctggagccgcgcaaccggccgcagctggtgatggcggtgtgcatgccggcgttccagatcctgacgggcatcaactccatcctcttctacgcgcccgtgctgttccagagcatgggcttcggcggcagcgcgtcgctctactcctcagtcctcaccggcgccgtcctcttctcctccaccatcatctccatctccaccgtcgaccgcctcggccgccgcaagctcctcatcagcggcggcatccaaatgatcatctgccaggtgatagtggcggtgatcttgggggtgaagttcgggacggacaaggagctgacgaggagctactcgatcgcggtggtggtggtgatctgcctgttcgtgctggcgttcgggtggtcgtgggggccgctggggtggacggtgccgagcgagatcttcccgctggagacgaggtcggcggggcagagcatcacggtggcggtgaacctcttcttcaccttcgtcatcgcgcaggcgttcctgtccctgctctgcgcgctcaagttcggcatcttcctcttcttcgccgggtggatcaccgtcatgaccgtcttcgtccacgtcttcctgccggagaccaagggcgtgcccatcgaggagatggtgctcctatggaggaagcactggttctggaagaaggtcatgcccgacctgccgctcgaggacggcgacagtcatcacaagtgaaagaaatgtactctgagatagtatatgggggttacagtagatgagacatgacatgtaggatgaggagattaagattgatcatgtgcggtaatgcattctgtgtgtatgttaattgaagttcatggatcatgatgtctgtttgtcgtggcagagaagagaaatattggaaacacaaaattttatactactcgattattaattgtctgaatcctcgtg

SEQ ID NO: 15279 - DNA, 2610 bp, Oryza sativa
  ref <308>: DATABASE ACCESSION NUMBER: AK065808
  ref <309>: DATABASE ENTRY DATE: 2001-12-06
gatccatccgagttatctctctctctttcttctctctccaccatgaccggccaccaccattgccaccggccgatctcctcttccacagccctacatcccaaaaccttgcgccattagctcggcctcgatgaggtgattccattttttcccctttcccctctccctctaccttgagataaaccgccaccgccacctcccaaattggccgagccaagctcttgccgtcgccgttccggcctcctcgcttgtttccttcgctggccgactggttccctggatgcgcgtcgctcgggaacatatttttccgccgacgtcgcagcctctcgaccaccggagcaccggcgcccctcctctccctctcctctgtgttcggctggaagaagaagcagaaggagagaggatacgggaggaagaagaagagaaaaagaaaagaaaagaatctccctgacagagtctattttattctggatggcaacctgtggtatttcgagcatcggataatcaggttgcctatctcggatttatttgcattggagcaaggaatctcgtcccgagattctgggatggctagaaagaaagccggtgctggtgggcggtctgactgatctgcacattgaactgccacattctgcttcgaactgattgattgactggttgatcaaacctgcacgattgcactggctggattcgacctttctgttcctttgctttgccaaaactggaccgactggttctgcttgaactgacctaggccagaactgcggatactcctgaaacttacttatcttggactgaactgttgaggttggcaattttggtaacctgagaattcaccacgctggctataagaggatgaaaattgaatctggcatttgtaaatcatttaccctatgtccgcttggactggtcccaactcaaatgacaagtaaatccaggaaacctgcttgacctgtctaagctaagcggttgaactggcctcatgggtgtaccttagaattcaatcggttgcccggggatcggcttaattcttctgataccttgcaacttgcttcttcaagtgctaccctgattgcggcactggttgaaccttcaactaaaacagcgacgaagtgaggcaaaactcttctccgagacctaccccccttacagggagtagtcttacttccgcgtggctgggatcagttgaactgttgtccttcaaatatagccaacacttctctgatttacaaagagccctgactttgaaaactgaaaacttcatcggtccatcaaattgaagcaatggcgatgcactttcaccccgacaagatttggaacttaacccttagttgatgataggaaattccacataaaagtgactctcatttagctcatggacacactgactcttgactgcaacacactactgctggagttctttccgctacacttgaccttgcatcgagctttgcatctcccgcatcaatacatccatcatctaatcttggacaccaaatgttgatcacgagcagggttcttctggcactgggataccttgtagctttcaactgaaccattgattggtgactttaattgatcttatctctgacactgaccatccgctgccaggacggaagaaaggtggaagagaggggttgctaaagataaggtactaaaccacttgcctactgttatgttgtgagtagacttttattgttcaagttgcttaagcaaacaacctagtatggtcgcatccccaccaatgatgcaaaccatacccctacacacaagcaaacaacacacgatctagaaagctaacggaactactcttctgggaaagattgggtttaggtcaacttcgggaaaactccacttgatcttcgcagaacgacgactctgaactgatcttctcgctccttgcacgaagcttgaggctcgaattgacttgacttccgaacagacatgaagctgacagctggtcctctaggtttgacaactaaaagaattggagagattgggaggagaattttgaaaaaccgtttcacaaagaaatgccgaagggcgagaggagacaatttgcaagtagggttttcagaaaacttgtccttacggtttgaccatttggctcaacctacagtcaagttggctctgataccactttgtcacgcccagaaatttagcccaaatttccagactattttgtgtattaaatccctgtccaggaccagccagggtacacaaaacgacaagtaataaacagttccaaacgtaaataaagcgtaaaatacttacagaagaggcacttagtcctcacaccgaaacaaaagcagcagcagcggaaaaaggcgatcctagcggggcttcagctccactccacaggcaaaactcaactggggtctgagccttggtcctctaactccatcttcagctcagaagcactacacttctgaaaagggggaataatagcaaggctgagtacaaccaccgtactcagcaagccacaccaacgatgcagacgtgcaagggggaacacaaggacggtttgtggctatttgcataaaggcggttgtaaaacattttattgagcaaaacagtaaaactgttgagtaattaaagtaatattaaatctcc

SEQ ID NO: 15280 - DNA, 2207 bp, Oryza sativa
  ref <308>: DATABASE ACCESSION NUMBER: AK065809
  ref <309>: DATABASE ENTRY DATE: 2001-12-06
gaagtgtattattatttcacacttttctgtctccaagctgtccacagtcctcttcccactgatgagagagagttgcaagaatttgcaagaagcaccaagaaagtgtacccaaagaagcatcttcagctgctctcaccagtcaccactcccatccaagagatcccagcctctactacaacagcttccaacttccaagaacccatttttttcctttcctcctcctcctcctgctctggctggctctgggctggccgtgccctcctgtcagtcctagctccagctagaatccctccttgttcatccaccaccaccatccacatgattgcatttgtgcagattcctggagaattaagctgtcctctcatgccgatctgacacaccttgttgttgttgttgctgctggttgccgcacaaccgaaaggggggattatttggccctctttctctttcctttcgcaggaagatttggtgattcttcttctgagggctcctctaaggatttgggaggatggggaagaaggggaagtggtttggagctgtcaagaaggtgttcagccctgaatccaaggagaagaaggaggagagactgaggagaaaattagcagctagtaacccgaacccgccagatctaaccccttcggcttctctggaagtcaatgtttcggtgccaccccctccacctcctccacctgttcaacagattgaagaggttaaggtccctgaagttgagcaggagcaaagcaaacatgtcactgtggaggctgtacctgaggctgtccccgtacccgcacagacatcgtcattgccacctggtgtatcaagggaagagcaagctacaatcaagatccagaccgccttccgaggttacctggcaaggagggcattacgagctctgcggggacttgtcagattgaagtcactggttgagggtaactcggttaagcgtcaagctgcaagcactctgcgttgcatgcagactctagcacgggtgcagtcgcagatacgttcaaggaggctgaaaatgtcagaggagaaccaggccctccagcgccagcttctgctgaaacaggagctggagagtttgaggatgggggagcagtgggatgacagcactcagtctaaggaacaaattgaggcgagtcttataagcaggcaagaggctgcagtaagaagggagagggcgctcgcatatgcattttcacatcagtggaagagcacttcaaggtcagtcaacccaatgtttgtagaccctaacaacccacaatggggatggagctggttggaacgctggatggcagcaaagccttgggaggggcgtgctgggaccgacaaggagagcaaccttgaccgtgcatcagcgaagagtgcaagcttgaatcttggagagggtgagatcacaaaagccttcaaccgtaggggatccaagccagacaagtcatcaccaacaactccaaagctgacccgtccagcctcccgtcaatccccttcagctccctccgctaaagtgtcaccgatctttgcaaagaagaaatccgcgacaccgaagaatgggctctcacaggttgatgacgacgcgaagagtgtgttcagtgtccagtctgaacgaccgaggaggcacagtatagccacgtcaaccgtgcgtgacgacgagagcctcgcaagctccccatctgtgccaagctacatggctcccacaaaatctgcaagagctaagttgcgcctccaaggatctgcagtgaccgatggtgcagagacaccaccggagaaagtagcctctgttggttcagtgaagaagaagctgtccttccaagctggaatggcgccgccttctccgatgaggcggcattcgggccctcccaaggtggaggtggtgaaggacattgctgagccaccacagccagaggccttggtgatcaatggtggaagcaagtgactcatatgacaagtaccaggagggagcaatggattctgcagatatatttcatccaatgaacaaaggtttaagattatatatcagctgtatgagttgccggcattgtttttccagttataaccacattatttgctctagcagattcgcaagtaccctgccagtcgattccatttgttgtttctgtaaaactatatcgatttgtcacttgaaacctttggtgtttgtatgtaaacaagtctcttctatttatgtgagccacatatttctttttgtg

SEQ ID NO: 15281 - DNA, 1913 bp, Oryza sativa
  ref <308>: DATABASE ACCESSION NUMBER: AK065810
  ref <309>: DATABASE ENTRY DATE: 2001-12-06
gagtagtggcgctacctctttcttctctctatctctcaacgagcgcggcgcgagcaagaggagcgcgcaccccggcgacatcagagctcgtcgacgccggggactctgcgcggcggctagggagttcgcccgccggagcaagggctgggcgggacaaagagaagaaatctgcagcgaacccatggcgattctgcccctctcgatttcccactctcttacctccgccttgtccgccacctcctccggcatcggcaggccagttgcccgcctcctccacccgcgggtcccctcccgtcccaccgtcatctgcctcgccgcgccgcccaaggtacccgtccccatcgcctcaccggcttcactaggggacgacccttccaaatgggacccggccgagtgcgacgcccttctccgcggcggcgagcaggtcgcctccgtgctccaggagatgctcaagctgatggaagacatggagatggatggctcgtttgaatcattggctgtggagttgatcgctcaaggagtcattgggaaaagagttgatgagatggaatctggctttctaatggcacttgattacatgatacagcttgctgagaaggatagtgacaatgagcgtaaatctctccttgaggtagtcaagcagacagtgctggatcatctcacaaaaaaatgccctccacatgttcaagtggttggacttctttgccagactgaaaagaaggatagcagacatgaattactgcgtcgtgtagctgctggtggaggtgtgtttaaaaatgataaaggccttaagtgccagattccaggggccaatcttaatgatattgcaaaccaggcagatgatctcttggagtcaatggaatcaaggcccacaattcctgatcgaaaacttctcgctagactagttatcgtaagagaggaggctcgaaatatgatgggaggtggcctgttagatgaaagaaatgaccgtggtttcacaacgcttcctgaggcagaggtgaacttcttgagcaagctggttgctctcaaacctgggaaagcattggagaggatgatcaaggatgttatgcagggcaaggcagaaggtgctgataacattgaaaatgcaaatgctggaccagattctaagcttaatcatctaactgggatatctggaaggggaagtgtgacaggcctcaagccacggccagtccgtccaggaatgttccttgagacggtttctaaggtggtatatatgcaaacaacacatctggcattacagcacaacatctagaatgggtacatcaaacaacactgaagattcttcaggaaatggccttctaatgctgttttctggacgacattcactgccctgttcaagtatatgaactccctagattcttggcccttttaagcttatgatattacagcctagtgggcaaaaggatcatggtatggaccttagtcttgctgcaaaaacttattgatttttttttaccagtgaatggcaaatcttggaggaacttgagtggccattactaatatagttaaaaatagaagcagaagaaatgatgtctgggcatgcaaaggccaatggtgatctctgggtggaatgtaatatttataccacatttagtgcagaagtaaagtaagagcttcgaaaagcaaatagtcaaatggacacagtgatatttagcttagcttcctacaatggatattaagagagtttagcttacttttgagtgaaatagaagatggccttagatctaacatgatatgtatcgcccttttccattttgcaggattttctttgtctcaaaatatattttcaaattttatattgctggaagccagggatactttttaccagtaaatgtttttggttttccaaacgagaatatgatcttgtgatgaatcgattctatgttttgctt

SEQ ID NO: 15282 - DNA, 2255 bp, Oryza sativa
  ref <308>: DATABASE ACCESSION NUMBER: AK065811
  ref <309>: DATABASE ENTRY DATE: 2001-12-06
gattctaaaaaccacaaactagctaggtaactctggttttttatcgctttctgaaactaggtggcaagatatatacctattctgaagcaatgagtttcctgctgaagactaggagtgaatctgacaagccgaagtcgccatcttctgaagaactgcagcaaaagcgcgctaccagcggtgagccattgatatccacgccgacctcctcgagcatgagaaacgaagaagagccgttgctgcctagctatattggtgaccagaggtcgccgcatgccatcgccttcacagcatttgatgccggtcaccatgttgttgtcgagcgccataccctccctctccatgagcatcttctatggatgctaaggtgggccacgtgctcaggacgtacagggagagaacatgagatgagatatgggtagaatgaatgaacagagatggatgaaagtaaggttttctctttttatctatagattgaatgggggagatgcgatggcccaaatgcgtgcgaatgtgggcgctggatttttgggctcatgctggccgcttgcgtgggagatttagggtgcgctttcagtctataggattagattcttatcgtttttcgttagcacgcttttcaaactgctaaatgatgtatttcgtgggaaaactttctataaagaagttgtttaaaaaagtccaacaaatttattcatcaaaaatttatatattaatacttaattaattatatgttaatcacatttctcgttttacattcggctaatcagcccatcctatctactgaaacgagcacacccttattctagtcttctgcaatttttactataatacatagggtttctaaaatttacacttaaattagacataaaagagccctccggtgcagtgatgtgcacatttatcttttacttttggaatggtgacatcttgtccgcgtatttcatttgttattgtcccgaacttctgcaaaagaccaaaagaacctcggcatcattaaaatctaaacgttcaaaaccatccaattttcaacctttttggtttggattcactaccagaaaacttatctttttatctaataccccaaaccacaactacaccggatatattaagaaccaatactaaaaaactctttagtaccggttctaaaagcccaagtctccgaaatatatttagcaccggtttgtgttatcaaccggtaataaaaatacatctttagtatgggctggtaacactaaccacgactaaagttgtctttaggattagttaaaaagaagcatcactatccaagttagacgtgtgtagtaggtgggatggtaacgtgtgtgaaaggctgagatcatgagagatcttgagtctaaatctcacatcccacatatttttttgccttagtatatatctttagtaccggttcattctaccgatactataaattaaataaagaaccggtactgaagatcatatctctcctagcgattaacataactcttgatagtgattaacaaatataactctaatttagcgatcacgcataaggatgaaagcaatttcaaaatttcaaaattaataaatgacttcaaaaactcctaaaaaattacccttgctataaagtatttatatcctacataaatgtgtgcttaaatctaaaaaaattttattcctacaagacaaataaactttgttttgttctagaacaaatttatgtgcatcttaaatacggttttgtggaatttctatgagactatttcagctgtaggaatgcactgtgtgagaggcacaggtcactggtggagaaaccttttttactcccagttggtaaccccctttagtcctggatttccaaccaggagtaggaatccgggactaaagatgcccatctttagtcccggttgaaataaccgggactaaatctttagtcccggttggtagcaaaaaccgggattaaagagaaagttctttacaccaaccaggactaaagagggatagcggcagtctagatggtcccttttcttttttcttgtttcttttttattttctcccgaatcgggtggcattcacatcccaaatcaaaccccaaatccccaaatcaaagtaacatcccaatccacatcacaaatcttaaagttactaacatacacaaatcaaatacatcacaaatcctaaaaaaattacacacaaatcaaatacatcacagactatacatctcagacccatacaatccatcacaaaattatacatattagtgaatcacaaaatat

SEQ ID NO: 15283 - DNA, 1389 bp, Oryza sativa
  ref <308>: DATABASE ACCESSION NUMBER: AK065812
  ref <309>: DATABASE ENTRY DATE: 2001-12-06
gacctggcactcgggcggcggcggcaatggcggaagaggggaggagcggcggcgtcgccggagacggcgtccgggtgtgcgtcaccggaggcgccggcttcatcgcctcgtggctcgtgaagaagctcctcgagagaggctgcatcgtccatgccacgctgcgaagcatgggagatgaggagaaggccgggctgctccggcggctcgtccccggcgcggcggagcggctgcggctgttcgaggccgatctcttcgacgccgccaccttcgcgccggcgatcgccggctgccagttcgtcttcctcatcgccacgccgtacgggctggaggcctccaactccaagtacaagaacacggcggatgcggcagtggacgcggtgcgcgagatcctccggcaatgcgcggaatccaagacggtgaagcgcgtcatccacaccgcctcgatatccaccgcctcgccgttgatcgacgtccccggcgccggcgtcggcgccgccgggtacagggacttcatcgacgagtcctgctggactccgctcgacgtcgactacccactccggagcgcccacttcgacgtgatctctcctcctctgttcttcctcctccaatcaagaacacgatgaagcaaaaaacagaagaaaccaaattaaacattgttttgcagaagtacgtgctgtcgaagatgatgtcggagaaggagctcctgggctacaacgacggcgagggccgggcgttcgaggtggtcaccctgccgtgcggcctcgtcgccggcgacacggtcctcggccgcgccccggagacgctggagaacgccgtgtcgccggtgtcccggaacgagccgtccttcgcgttcctgaggctgctgcagaggctggtcgggtcggtgccgctggtgcacgccgacgacgtctgcgacgcgctcgtcttctgcatggatcagccgtcgctcgccggccgcttcctctgctccgccgcctacccgaccatccacgacatcgtcgaacacttcgccgccaagtaccctcacctcgacgtcctcgaagagccggagagggaggtggcgagggtgcagccggcggcagacaagctgggtgagctggggttcaggtacaagtacggcatggaggagatactcgacggcagcgtcggctgcgcggcgaggctgggttacatcgacgcagccaagctcaggccgcaggaaggatgaatctgctacagatttgcaggatgaagaagatggatgatatttgttcggttttgaacaagtttttggtgtttgtttgtaatctcatgtgttctgaatacctctctcatgtatcacatgacgcatttctgcgtcagagaacgatattaataagtactccgtggagctcgctaggcacttgagtt

SEQ ID NO: 15284 - DNA, 3678 bp, Oryza sativa
  ref <308>: DATABASE ACCESSION NUMBER: AK065813
  ref <309>: DATABASE ENTRY DATE: 2001-12-06
gctgatgagccccaacaagtggctctgaagtatgaagatgcttaccagtatcaaaatgtgtttgctccactgataaagcttgaggctgattatgacaagatgatgaaagagtcacagagcaaggacagcttgaccgtgcggtgggatattggactgaacaagaagcgcatagcctatttcgtgtttccaaaggaagacaatgaattgagacttgtcccaggagatgagctgcggcttcgatattctggtgattcttcacaccctgcatggcagtctgtgggtcatgtgattaaacttacggcacaagaggaggtagcacttgaacttcgtgctagtcagggagttcctgttgatttgaaccatggattcagtgtggattttgtctggaagagtactagctttgataggatgcagggggcaatgaaaacttttgctgtggatgagacaagtgtcagtgggtacatataccatcaccttttgggacatgaagttgagcatcaaataatacgtaatacactaccgagacgctttggtgcaccaggacttccagaactaaatgcttcacaggtcttagcagttaaaagtgttctccagaagccaattagtttgattcaaggtccacctggcacagggaaaactgtcacatctgctgcgatcgtgtatcacatggcaaaacaaggccaaggacaggtccttgtatgtgctccaagtaatgtagccgttgatcagttggcagagaagataagctctactggtctcaaggttgtcaggctatgtgcaaaatctagggaagctgtttcatctcctgttgagcattgacacttcattatcaggttcggcaccttgatacatctgaaaagagtgaattgcataagctacagcaactcaaagatgaacaaggtgaattgtcaagcagtgatgagaaaaagtacaaggcattaaaacgagctactgagagagagatattacaaagtgctgatgtgatttgttgcacttgtgttggtgctggagaccctcgtttagcaaacttccgattccgtcaagttcttattgatgaatctacacaggcaacagagcctgaatgtctcattccattggtgcttggtgtaaagcaggttgttcttgttggagatcattgtcaactgggcccagtcatcatgtgcaaaaaggcagctcgtgcaggattagcacaatcgctctttgaacggcttgttatccttggagtcaagcctttcaggctacaggtacaatataggatgcacccttgtctttcagacttcccgtccaactgcttctatgaaggcacactgcaaaatggagtaactgtaaacgagagacagacacctgggattgattttccttggcctgttccaaatcggcctatgttcttctacgtgcagatgggacaagaagagatcagtgccagtgggacatcatacctcaatagaactgaagctgcaaatgttgaaaagattgtaactacatttttaaggagtggtgttgtaccaagccagattggagttatcacaccttatgaaggacaaagggcatatattgtgaattatatgtcaaggaatggctctcttcgccaacaactatacaaagaaattgaggtagcaagtgttgattccttccagggaagagaaaaagattacataatcctgtcttgtgttagaagcaatgagcaccagggtattgggtttcttaatgatccacgcaggttaaatgtcgcattaactcgtgctcggtacggtatagttattcttgggaaccctaaagttctaagcaagcagccactctggaatagtttattgacacattataaggagcatgagtgtttggtagaaggacctttgaacaacttaaagcagagtatggtgcaatttcaaaagccaaaaaagatctacaatgatcgacgactcttcctgggtggcggtcaaggtgttatgcaaggagctagttttggtgctgcaggcacaaacccagtggcagataagagaagtggtagggggaaagggcattcctttgttccatttggcccaccaaatggggctcataaacctggtgtgcacccatctggctatcctttacctcgtatgcctttccctccatttgctggggctcattctcaaccctatgctattccaacccggggatcattgcacggaccgattggagctgttccacctgtgcctcaacctggaaacagaaactttggacctcgtggaaatactggtggccctattggtgggcaccttgctcaccaacagagttctcagcaagctatgggaggcatggggtcagcttttaactttcctggcctggagaatccgagcagtcagccttctggtggaggtccaatgtcccagactggattgatgacacagatgcctgtccaaggtctcagtcaaacattccgcgatgggttttccattggtgggatgtctcaggacttctttggagatgatttcaagagccaaggatctcatgtggcatacaacattgctgatttttccactcaggcttctcaaggaggctatggtgttgactactctcaaggaccccaatctggatatcctgggaattatttgaaccaaaatgcacacccagggtattcccatatgggtgcagcaaatgacattgtctctcaggatcacatggcccatggttcacatggaatgtttacacaagcgggatacaatgactcttcacaagatgagtcatcacagatgcattttggaatggctggtcctggtcttcagtctcagcccatgatgaacccgctctactctcagtcatatgctcattacaacacccaaccgcagtctctccaacctcctccccagtgatcaggaaagcttgtgatataattgctgaagccgcattaagttttggaagtttgatgggttgtatccttggcccacagcagcttggttgtgcctttctgcactgtaatgcagaaacgatggtgcatagacatcagttgcaagtattgggcacaagcatatgttggagcactacatggatatttattgaggcaagctttgtacaagatggctatggctgtcgaccattgaccattgctgaggagcacaaggattgcaacacatctctttcttgtcatggtagttcacagtggggcttgacaacaagaggtggcaacttgtgcactgagagatgctgacgacgctacccacatcgcttcacctgtatagaagacaaaatggagcttatagtggtacgatgtcaatacttcaggattggctggcgccgtgaagtctaaggtgcagccgctatcgcctgcctccatggtaccacgaaaacgcttgcagattggctttgtataggggtatagatggggggtggccagccctttcagaactctcgcacatggccattatatttatctgaacattatgtatgctttctttatagtttttgatatttaggttcacagaaatgatgtttggtgatcttgcctgaaagaacgaatgctagagcttgtagtcattgatggagatcgcgtgattttcttttttggatcagctgtcattttatggagctggctggatgctggtaaacccgtgatgggttttctgcgtggttgattccacaaccgtgagagcaaatgttctgtcacatgttttgataatactatatttggcctgtgttctgctg

SEQ ID NO: 15285 - DNA, 2526 bp, Oryza sativa
  ref <308>: DATABASE ACCESSION NUMBER: AK065814
  ref <309>: DATABASE ENTRY DATE: 2001-12-06
atggggccaatgagattattagaaggcatcataagcagagaaacagagaatctgttggccgtggaatcataagtggagaaaagacacaagaaaagcctctgaaccagttcaggcatcaggcacaagatcaacattctagctatgcttttcgtatgaagcagacacatctagatcatagagatagagttaatgaagtacaggcagattctattgatcccacagtttttagtgagtcaagatgcattgcgctgattgatgagactactgcgacgcgtataaattgcacaacggtgcactctgttggacccaaacctataaatgtagataagaatcaggcacaggctcccaactccaagcggatcatacaacaggcacaaaaacagccttcttatattgcaatttctcaagagaatgctcaggataagcatgcagatggtgtggttcatgtccaggaaaagcaattgaggactgcaagtcaagtaaaccatagacaagagacatgtgctcaactggacaatcagactgttgcaggggatagcagtgggagaattagatgcccggaaaaagaacaatcggaaccttttagctgcacaattcgcaagagaaaaacgaagagtttgttggctaattcaaattcaggtcttgaacttaggcgcagtaaacgtttggccaaagattctcctgctgcaaaagacaaaaaacacagcaaaaacaagtcttttgagcagcaggtttctcaaaatgaccaagtatctgctgcagtcatggatactgaatcaatacacagggatcctgttgagaggcaagctgcatcttcaactggccacatgccagctgccatcacagacagtgaaccatcagaaaatgagcctgatgatctgtatatgccttctccagatcagagtttgtctaactctccagatatcgacagaatcattaacagcatatgccctagttcatcccctaggcatatgacccctgaaaaagtctctaatgagtttgacaacgtccagttaactacaccaccaccttccgatatcgacatgtctgatcctgagcattttgcatgtaactacgttccgcaggaagttagaaaggcccttgcgaagctaagatctagtaattcatcatttgagcgtgcgatgtcacaggcaagttctggtgatgtgcatgcattaagtgattctgaagattgcgacgaacgctggaatgttggtaccaagaggaatcaagggtgtggtcgtggtcgtggtcttacactctgtctcaaggtgtggaatttggctaagggtgtccgcattccagtgctattgaacgcttcgggggagcctgttgggaaagaggcaggcaccttatctacctttctgggtgcattagcacgtgacggaatattggcacctctgacacatcaagattggagacgtgttccagagaaaaacaaggatgtgatgtatcatattgtcaagctcaaatttgacattgctccagctgctgaattctggatcatgaagtgtataggaagaaagtggaagagttggaaagctctcttaaaacaaaaacattatgatactcatgaaacggtggaggaatgccttgctgatcaaaatcctcgcgttctcaaggaacagtggcaatatttagttgcatattggggtacggaaaaagcgaaggctgtgagtagtcgaaataaagcttgtcgggcaaatgtaaccgctacgcatactgcaggaacaaagagctttgcacggataattgaggaggagaagcagaagcggcctaacaatgaggagcccactgctgcggatttgttcctattgactcatacacacagaaacgggaagcctatgaagaaggaaaaagctgatatcattgcacgagtccgtgaacaatctcataagcaagccgaatgctcaggaagtgactctgcagcacacaaagtcggacttgaatcctgctccattggcctgcgtgggaagaggggtcatcgtcggaaggcagtcttgcaggcatccttcaaggaagctgaggaggctaaaagaaaggctgaagacgaggcagcgacgctgaggaagaagatggtggcaatggaagaaagtcagaagaaactgcaagaggatttggcgaatatgaagagtacagttagtgctatgcagaagacgacgtcaactggtgacctatcggatggtcaaacgcaaaactttccacaggtccaaaattcacgaagcgctcatgagattttgcagccatatcttgactactctgcactgtacgatccttctgcctcccctagtccacgatttcgatgataatcgcaccacagacaatgccaatatgcatggttgattccatcttgatcgtggaatggtgtatgaaacgaagaggtttagacgtttagttggccgttcatgtgtaatgttggctctctaaacccggagcccagtgcttgtactcttctgttttattggctactgtaacaggatactctcttctgttttgtttacactgactagaactacttcacttcgc

SEQ ID NO: 15286 - DNA, 3593 bp, Oryza sativa
  ref <308>: DATABASE ACCESSION NUMBER: AK065815
  ref <309>: DATABASE ENTRY DATE: 2001-12-06
gaccgccgctgcgccgcacaaccacaacccatacgcaactccacccaaaaaccagcgtcgcatcgcacgcgcaagcgcagcacgagcacagtgaggaggagcttagcttagcctagctagcttagctctaccaaaagctctctgtagcttgcttgctgcccagtattgggaggggccgaagggcaatggtgggaggcagccgtctgttcctcctcctcctcctacctttgctgctgctgctgctgggcgccggctgcagagatggccgccggtgcgccgccgcggccgcgcagactcagaggctgccgcagcaagaagttgaagcacttaagggaatagcacgcaagcttaacaagatggattgggacttcagtgtggatccatgcactgggtctaaaacttgggttaatgccagtgattccaatagttacccaaaatctagttatcctaattttccagtcagcaatctgacatgtgattgttcattcaagaacaacacagagtgtcatgttatcagcttggaacttatgcgtcagaatcttagtggagttctacctgaagaagttgtcaacctcacttatttgacaaatcttgacttatcacgcaatttcatccaaggaccaattccagcatcatgggctagcctacctgtttttaatctgtctctccagggaaatcgcatatctggaacagtacctaaggagcttggacgcatgcccttcttgaaatctataaatctagaaggcaatcagcttgagggtcatattccaccagaattcggtaacatcatcagtttggagagatttttcatttctgcaaatgacatcacaggagagttgccttcaaccttttccaggctcacaaatatgacagatttccgaattgacgggaccaatatctcaggaagaatacccagtttcataaaaaattggcaacgggtcaacagaatagacatgcagggtaccttgatgagtgggcctattcctccagaaatttctttgttgaacaacttaacagaactgagagtgactgatttgagtggaccgagcatgaaatttcctcccttacaaaatgcacagcaccttacaaaagtggtcctaagaaactgctccatatatggtgaaataccaccttaccttggacagatgcagtatctaatactcatggatctaagcttcaacaagttgactggtcaaattccacaaaattttgacagaatggtggcactacaactacaatatttgtacttaagtgacaacatgctgactggagatttgcctggttggatgttgaaaaacaaggcaagcaacaaagtaaacatggatgtgtcgtttaataacttcacgggtaaccctccaaatgaatgtcaacaagcaaacgtaaatatggtttcaagtttttcatcctcaaatgacaatcttttgcaaccatgtttacgaaagaatcttccctgcatggacaaaccacgctattcctccctatttattaactgtggtggcaaaagtgttgaggtcaatgggaatatttatgaggatgactcatctcgaataggaacatcaacttttgttttatcaaatgacagaaaatgggcctatagtagtacaggagattttgtgggtaatccagatgctgattacattgctagaaacacatcagaactcacactggatcaccctgagttatacactgaagctcgcctctcacccctctcactgaaatactatggagtctgcatggaaaatggtgaatattctgtagaacttcattttgctgagattgtgtttacagaagatcatactttttccagcaatggcaagcgcatttttgatgtttttatccagggtactaaagttttgaaggattttaacattcaagatgaggctggtggtgtccatcgtgtaattacaaaaactttcacaaccaacatcacagataatacattggaaattcacttctactgggcaggcaaaggtaccacaggtgttcctgaccggggtgtgtatggtccattgatctcagctatatctgtgatacaattaaacaggaaccatcatggaatctctactggattgatgattactataatagtagcagcatgtttgattgtcatacttgcgctaattctttgctatatcaaattcttccggaaaaagaatctgaaaggaaatggtttacaattcttttaccatggaaggaagaccgatacttcagatcttcagacacggacacagtacttctttagcttaaaagaaattgaatctgcaacgaaaaattttgatcctgcaaataaaattggtgagggtggctttggacctgtttacaaggacgtggagatcatcaattgaaactagactggccaaaacgatataatatctgccttggaacagcaaaaggcttgtgctatctccatgaagaatcaacattgaaaatcatccatagagatattaaaccatcaaatattcttcttgatgaaagactgcaaccgaaaatatctgattttggtttggctaaactgaatgatgaccgtgggcgtatgagcactcggatagctggaacagttggatacatggcacctgagtatgccacgagaggttgcttgacatgtaaagcagatgtatacagttttggagtggtgacattagagattgttagtggaatgagcaatacaagtagcatgtcagatgacgaatatctccatcttcttgactgggctgaaagattgaagcaggaagggagactactggaaatcgttgaccagcgtcttggttctcactactctcaagaagaagcacttaggatgctcaatgtagctcttctatgcacaaacacatcacctgttcagaggccaagaatgtcttcggtggtgagcatgctctgtggccaagcccctctagaggttgtacctgatgaagatttgagtggatacatcaggcccagttactcccaatccaatcaatccatgaacaacagcctaacggagtggtcctacgcgccatcgagcgatccttcgatcttgctgcagaacagtatggagagtggttacctcccatcttcaagctccccttcttcaaagctgtgagctgcagcaccaggattagctaggatgaaatgttggcaattgttttgagcccaatgcagcaactgtacatatgcatatgcatttgctctgtctgtaatcccctgtagtttggcattctgtcagttgtcctcagccttctcatccatggcatatgacaattgatatcaatgatgcattgccatgatgatatattcttcacaaggggactggaagcagatattggaatctgatgctgctgatgtgatggtacatatgaattgagcaacttctcaggggcaccacttgagtttcttgtttgttagccttggtcatcatgtatctagtaaatgcaatgtacaactaatctgtgcaaatgtggatatctagtaagtttttttttttcttttcttttctagctaggaaggttattgtttggtgggcaagtagagaagacatgtaacataataacagttcagtgcaaactagtttctgcccttgttaacttaaaaaagaaggaaaaagtacactcaaggcc

SEQ ID NO: 15287 - DNA, 1847 bp, Oryza sativa
  ref <308>: DATABASE ACCESSION NUMBER: AK065816
  ref <309>: DATABASE ENTRY DATE: 2001-12-06
gaaactccacttgtcggatctctctctctctctctctctccctctctctctcgcccatgtaccatctccatggacgacctcgccgccgcctcccctcctcacccgccgccgccgccgccggaatcccacgtgcctccgcccccgcagacgccggagaaggattcatgtgaggatacaggagacatgaggatcagtgaagaaaagccatgcacagatcaggagttagatgctgatcagatgaatagttctagctttaatagttccagcgagtgtgagaatcaaacacctagcaatgatgaaatgactggatcagagtccaaatctgaggcagctcaaacagagggtggtggatcgagtgaagagaaggtcctgaagaagccagacaagatcctgccttgtcctcgttgcaacagcatggatacaaagttctgctactacaacaactacaacattaaccagccaagacatttttgcaagagttgtcagagatattggacggcaggtggaagcatgaggaacctccctgttggtgctggtaggcgcaagagtaagagctccactgcaaattaccgcagtatattaatcacgggcagcaatctagctgctcctgctggagatgctcccctctatcaactctctataaaaggagatcaaacagcaacggcagttaaatttgcacctgattccccactctgtaattccatggcctctgtgctgaaaattggagagcagagtaagaatgccaagcctacctcaacagcacaacccagaaatggagaaacccagacctgcccggcttcaggaacaacttcagatagtccccggaatgaaccagttaatggagcagttagtgggcatcaaaatggaattgttgggcatagtggagtccctcccatgcatcccataccatgcttccctggtcctccttttgtgtacccatggagtccagcatggaatggcattcctgccatggcaccaccggtatgcacagcaccagctgaaccagcaaattcttcagacaatggaagcacagctagtgttcagtggagcatgccaccagtgatgccggtaccaggatactttccggtaattccatcttcagtttggcccttcatttctccctggccaaatggtgcatggagctcgccatggattcaacctaattgcagcgtgtcagcttcatctcctacaagcactagtacatgttcagacaacggctctcctgtcctaggaaagcactccagggactccaaaccgcaaggagatgacaaggcagagaaaaacttgtggattccgaaaacgcttcggatcgatgatcctgacgaagctgcaaagagctcaatctggacaacccttggcattgaacctggtgaccgtagcatgttcagatattccagtcgaaacctgaaagcagggagcagatatccggtgctgcacgagtcctgcaggcgaatccagcagctctatctcgatctcaatctttccaggagacaacgtgatgtatattgaagaaatcgtgtgacaattgtagaacatgttactactataatttaagcaagtgctacagcctgaaggatgattggcgatgtaggcgctgctgcaaacatggaggcagcgtgatctgtactattgaaacctgaagagtactattcttgacatttttctataatttgcctgtggagcatgcaccagtctactgggttcatgatcaggctgtcagcatatgttttgttgtacaataataataattgttaatagctttgcctaaaggatactgatagtattctgctgatccttcagctctgtgatcaatggcccatatatttacctgacaagtttcagaaagg

SEQ ID NO: 15288 - DNA, 1094 bp, Oryza sativa
  ref <308>: DATABASE ACCESSION NUMBER: AK065817
  ref <309>: DATABASE ENTRY DATE: 2001-12-06
gagtccacttatccaagactccaagtccaagccccactcgcttgctggaataaagaaatctcaggcttttcttctactaagagataatgtaggcagtcattaccgtcgaaatcagcgacctgcttgatgccaccatggggagtgtggaatctgctggtagtggtaattgagtgtgatgacgaaccatcagtataaaatcggtgcctgtgggttaaatttcttgagagctagcgtatttgaggattgggaattgtggtggccatgaggaacccctgcatttggtgttgcttggttctgctgaccttggtggtctgcgacagttgtttgcacgaagagaggaaacatcttatggacatttgcgatgcgttcctttggccggctggcaatccgcctgactggagtagcagagattgctgccggtgggagagggtgacctgcagctccatcacagggcgtgtcacggcccttgatcttgatgcagcttatccgtcgtggtatggcctactcaactgcagtatgttccttccattccgtgagctgcagaatttgtccttgggaaatgccggcatcgcgggatgcatgcctggtgcaggttttgaagtatggtctaatttacgccaactggaaatcctcgatctatctgaaaatgagttgaatgatagtagtatcatgcccttggttggacttgcatctctgcgttccccattcctcggtgggaacgccataaagaatgactttactgtccaaagattaagcaaaatgaagctggatattcttgatctaagttggaatggaattttcgggaacatatcaagaggtatggcatctcatttaaagtttttgtgaaagcataaaggtgcaatagtaaatgagtaaatgaccgtgtcatggttccaatattttacaactgtttctacgttgttcaaaataatctcagccacgcttacaaattaatggcatgcagtttgaagttcaaactttgaacaccgatgtgagtgtggtggaaaagtgaataactttacactttacattggggcaccaaatttaagtacatgattattatggtagtaatatatcttgttctccttcaatcg

SEQ ID NO: 15289 - DNA, 3553 bp, Oryza sativa
  ref <308>: DATABASE ACCESSION NUMBER: AK065818
  ref <309>: DATABASE ENTRY DATE: 2001-12-06
gtccgtttaagcccctccccatactaatcacggcaaaaaccccttgccgccgtcgacgccttcccgccgccgcccgacctcgccgtcgccgccgatctcgccggccacctaggtggtcatgtaactgattccgcgctctatcttcctcgcctgtctccgcaggtatgctacacgggcgcaaatgcgtgagccggctggccgctggcggcgtggtggaggcatcgccggcggccaccgtggagaggccagcctcgtacctccaccagctagcagtgttccagaccagcaggagcttggctctgctggcgcggaacgtccataaccagttaccggtccagcagcgatccctctatgattcagcaagcacctgaagcgtgccagtcttgcgctgagcgctgctatttcccactcctttgaaagcttctcaaacggagtccacaaccgctcttcaaattaacaactgctgcagcacgtggccaaatggtttgctgaatgtcagacgcatctatgtgttcagcccacatgcatacctcaccaccaagaaccaacttctgctgtgccgggttcttgatatttctcagtggttcattcatataaaatccatcccatgtaacttccaagtgatctaggtaccacttatcctggttgctcacaatgcatctcaaaccagcagcaacaactttctctgcaactccacctccaagcctgttataatttgtggtgaaaaatactagctgttaatttccaatagctgcacaaacagatgatttctggctgggtcctcctaattaggagaagaaactgcactatataatggtattgaaacttttcttgcaatcctttcaccttttcttaataaaggtttgcaatcccattacttcaataaatttccttgtttaaacaacattcctctagttttatattacttgttggacattgcaaaatacagatactaccataagttgttctctatgaatgggcatttactgacgtgtaaacaaactatgcaaactaatttgttcaaagagaaatttagtgccatcacaatgatgtataaattgacaaataccatccaatgtaagcataacatatggtcgcaggaccaatattagaaatatctaatgacatattccagcttggtgatctttgccttcttcaaatgagaatgtgctatatttgagatttggcaaatgtggtcattgtttcttataataggcatgacaatataatttggcaagagcatacaactttgttttattttcttttcctaacaaggatgctgataattttttatataatgacaatcaagaggcagttaggaaataccagttatgcaccacagttctgcggtctagtttgtctccaaagttgttaaaggtttcttccctacaaggacaagaaagtgtatcaatagctatttgaaagatctagatctgcaaaaccaagtcacataccagttaataacttcgtagccatgtgattttgctatcttttgagctctcaatacaaaatatctgtaggcatcagattctttcataccatgttgggccaacctgcacaccaggaaaaatacttcagattagatcaaatgactgatcatccctgctacagaaggacctggtgatggtggtgagtcggccatcaccaacacatctacaattggtgggatcttctgcaggtagaaaaatagatgataatgcatatgtcatggttatttatgggttgatgcttggttgcaaaatgttttggcctcagaaacatatataattttcatgtttagttcttatttttttaatctgttccaaggctcgggtattttgctacaataaagagaaaatattgtcaataagtgcatatcaagtatgctgttgctcttattctttatactagttctagataagagcataccatgctttaacgcgtggtgtggaagtccagcaacctgaaattcatagtgagtaattattagattactaaactactatatgatatgagatctgctgctctgcaggggagatacttttgcagacttacttgtattgacctcatcacctcccaaatggacaaacttgaacttaaaaaccttgctgaaatctgaaagagcatcaaaagttattagtgaatattatacaagatcatcaatttgtttttcacaatatattcattattcggttcgttgaactgcttttttttttccttttgttggtaagtataagataaatggctgtttttttctctttcaaagtaataaaagtaccactcaaaatataacgtgatttctgttggtaaaccgtgaattacctgaaagaattccattaatcacttggaatgtagattcgctgctgacatcaagtggttctttacaagtagctgatggccacaacgacggataaccaacacccctaaaacaaaaagaaatgcgcaatttatttgcaaccttttgatattcctactgtcatatctagttaaataacttcatccgtaaggcactgtgctttctggatttaaaaggtataccatgagtacaacaaaaacaaaggattcaggttttcatcagtaaaacctgaatagtcatggagcatatgctagagaagaacagcattggcatattaaatacttaccatgagagagcatggccaggaacatcaatctcagctaagacattgacacctcgtcgttcagcatacctgcagattattgataagttatcttaccttggttaaatccaacagcatagctaactgatctctaaattgatcacatcattctccaaagaaggaatgggttttagagttttgttttttattttctgctgagttccctttgcaatatttatataaattacttaacgtggttttactgcatgctcttagctcctgttacttcatagtgaaggtaaataaattcttatgtccagccataaccttagagtgatatttgctaaattctgctctttcgcatgaaaaatgaaagacagaaaaactcactgaacaatgtcgatagcatcatccattgtatatctctctgagtaagagtatgcaccattccataattttgggtatgaaggtatttctataggaaatgactgttcatccacgatatgccaatgaagaacattctgcatgatgatagagtaagcagattatatgatgcaactaaaactaaaggaatatctggagaaggaccattgcaatggagagaattatcaatcaagattgaagaactggtttcttgtgaaaagatcaaacctaccaacttgctgtaggtcatcgaatcgattacgctttttattactgggacaggaaggtaatgccttgaagtatctgtaggatgccagtgcattgagttgaaaaaagatcaggtattatctttcctcaaactatttgaggacaatagtagatgtatcagataaatcctttaaaagaaagagatatcagacgctatttttacatgcacaatatttactgattcttcatataagcctagtatggaacatgtggagtaagtatgagcatccatcttagaattattcatgatggtggttaacaacacc

SEQ ID NO: 15290 - DNA, 2343 bp, Oryza sativa
  ref <308>: DATABASE ACCESSION NUMBER: AK065819
  ref <309>: DATABASE ENTRY DATE: 2001-12-06
ggtgttccccttttcttctcctcttcttcttcctctcctcctcctgatcctgatcgagaagatctcaccttgatctcttgccgtgtgatctctagctctcgctagccctctgaaccttgcagtttgttgtttgcacccggtgaaacatcttcttttgtgcaggtaggagagacagcaaagcagagataagagttctatatttgcatgtagttcttgtcttggatctcactggctggctgtctcctctctgcagcaaggttcgttgggctagcttgtgtgctagatctgtttctacttgcgtttgcgttgcttggcaagcaagatatatatatatatatctatatctatctatctatcattctatctccctacatatttagagctagcactttgtgtgttctttgggtttgggacacactcatatacgcgtgttcatgagtggaaatggaaggagctgcaagggcaagaattagggtttgagatataggagtataatgatgatcccggcgaggcatatgccgtcgatgatcggccggaacggcgcagcgtacggatcctcatcggcactgtcactcagccagccaaacttgctggataatcaccagttccagcaagcgttccagcatcagcagcagcagcatcatgacgcacgccaacctcgtcgagatcctcatggacgcgaatcagtacgcggcagtgttctcgaacatcgtgtcgagggccatcacgctggaggtgctgtccaccggcgtcgcggggaactacaacggtgcattgcaagtgatgtcagtggagtttcaggtgccatcgccactggtgccaacgagagagagctacttcgtgagatactgcaagcagaacgcagacgggacatgggccgtcgtcgacgtctcgctggacagcctccgccctagccccgtcctcaaatgtcgccgccgtccgtcaggctgcctcatccaagaaatgcccaatggctactccaaggtgacgtgggtggagcatgtggaggtggacgacaggtcggtgcacaacatctacaagctgctggtgaactccgggctggcgttcggcgcgcggcggtgggtcggcacgctggaccgccagtgcgagcgcctcgccagcgtcatggccagcaacatccccaccagcgacatcggcgtgattacgagctcggaggggaggaagagcatgctgaagctggcggagaggatggtggtgagcttctgcggcggcgtgacggcgtcggtggcgcatcagtggacgacgctgtccggcagcggcgccgaggacgtccgcgtcatgacgaggaagagcgtcgacgaccccgggaggccccccggcatcgtcctcaacgccgccacctccttctggctccccgtccctcccaagcgcgtcttcgacttcctccgcgacgaatcctctcgcagtgagtgggacatcctctccaatggcggtatcgttcaagaaatggcccacatcgccaatggccgggatcagggcaactgcgtctcacttcttcgcgtcaacagctcgaactcgaaccagagcaacatgctgatcctgcaggagagctgcacggacgcgtcggggtcgtacgtcatctacgcgccggtggacgtggttgcgatgaacgtcgtgctaaacggcggcgacccggactacgtcgcgctgctgccatcgggcttcgccatcctgcccgatgggccggcgcacgacggtggcgacggcgacggcggcgtcggcgtcggctccggcgggtcgctgctgacggtggcgttccagatactggtggactccgtcccgacggcgaagctctcgctggggtcggtggcgacggtgaacagcctcatcgcctgcacggtggagcgcatcaaggcggccgtctccggcgagagcaatccgcagtagcttcgtccttgaatcaaacaaaagcttcttgtgctttcaatttcaggagcagcaaaattttggagctttcatcagtgggaagtcaagaacgcacctcagactgtccttgccatgtggtgcccatatatagtttggattatttttcgctagtttttccgcaaattcgggaaatttcaaaaaaaatgtgtcaccactacgcaagggcggttggttcgggtattgacttcctcttcatgttcgcctctcggatgctgctaccttatgaatttagggttcttctggagtacaaaaaaaaccccttaatttgatctgtaatttctgttgttcagacttcccagtacctagctagctagtaggagttgcagaatagagatctgtgtccctgtcttatacttttagttctcttcagtgtttgatcagtgctgtttcaatccg

SEQ ID NO: 15291 - DNA, 1296 bp, Oryza sativa
  ref <308>: DATABASE ACCESSION NUMBER: AK065820
  ref <309>: DATABASE ENTRY DATE: 2001-12-06
ggccgcacttcatccccccctcccctccctccctccgccggagcgccgtctcaaaatggccgccacctcctccaccgcctccgccatggcggtggccgccacctcccctaccattgccactgcgccattctcgtctcttcctctccgccttcgcctccgccccaaacccctcctcttcacttctcgcctcctcctccccgtccccaagtcctcctcctgggttgaatccgtctcggaggaaggggaggaagaaggcgtggaggaggattccgaggaatccggtgccgcgggggaagacgatgacggggaggacaacgacgaaaagccgcggcctgagccggtggccgcctctgggttcgagttcgcgtcgccgccggagggctacgtggagccggccccgttcgacgagctgcccccggagtcgcccgaggacgtggcagcggcgtacgaagcgctctacgggccggcctttagcggcgagacggtcatgggcaacaacgtcttcgaggtcaaggtggtggatcccgtcgacatggaccgggagcagcgccctagcgacgagttcagcgagcgggtcgtgcaggtcaatcgcgtcaccaaggtcgtcaagggcgggaggcagttatccttccgtgcgatcgtcgtcgtcggcgacatgaagggccacgtcggtgtgggcgttggcaaggccaaggaggtcaccgaggccatcaccaaggccgccatgaacggccgtcgcaatctcgtcaccgtgccgctcaccaagtattcgaccttcccgcatagagcagatgcagactatggagcagccagggtcatgttgaggcctgcttgccctggatctggtgtaattgcaggtggagctgtgagggtcgtgctggagatggctggggttgaaaatgctctggggaaacagctgaggagcaagaaccccctcaacaatgcaagagctaccatcaaggcgacccaaatgatgaggcagttcaaggatgttgctgcagagcgcgggcttccaatggagcagctatggaaataatcaaataaatcaaccttaaattccctccaatatttttctttctccatttcttgagttcattttcagttgtatctgtcagtggggataatcctacatttaagtcctctccccaccctaaatgcattatgtgtctccacatatacatggcaaagctttagatgaattgatctgcgaatacctttagcttcactagtaatagtgcatgtgcaagacacgttccgcacgtataaatgcgagtttattatgttttcccactatgc

SEQ ID NO: 15292 - DNA, 3034 bp, Oryza sativa
  ref <308>: DATABASE ACCESSION NUMBER: AK065821
  ref <309>: DATABASE ENTRY DATE: 2001-12-06
gggtctctgatcagtttgctttgggcgtggtcttcctcgagtcccccacatttcttcctcccctccgtacggatacacacactctttctctctcgtgactgatccgactccgccgccgccgccgccgccgccgccgccgccgccgtctgctgctgctgcggggggtgggaggagatgaagccgaagagcctcccgttcatcgccttcgagcacaagcgggatgcctatggcttcgcagttcggccccaacacttgcagcgttacaaggagtatgcaggcatctacaaggaggaggaagaggagagatccgatagatggaagaattttctggagaggcagtcagaaccatcgggacaggaagagaagggtgaagctgccgggcgtgttgtggatagcagtggaattggcggttcttcgttgctgcaggagaagattgtgcaaggaccacacaagatcgagatatggaagccaatcagaccatccctgggcaacatagagcagatcatgagtgtacgtgtcgaggagaagcaatcacctgcttctggcaatcaggacacgaaggatgtcatccatccggtgaaggttcaagagggcaagttatctgaggattcagatgatgagttctatgatgtagacaaggttgagactagtcaagaaatgcattcaagtgatagtgcgaatactggcattgacaacaggggtcaagaggaaaattttccttcgatggaagagttggagtgtctagtccatggtggactgccaatggctttgagaggagagctatggcaagcttttgttggcattggagtgcgtagggtaaaagggtactatgatagtctccttgtggcagaaggtgaactagaagataccagtggttcgcgttcttcaacctcggatgttgccggggaaaatactgaagtatcttctgaaaagtggaaagggcaaatagagaaggacttgcctagaacttttccaggtcatcctgctttagacgaggatggaagaaatgctttgagacgtttgcttctagcttatgctagacacaatccagcagttggttactgccaggcaatgaacttctttgctggtctcttacttctattgatgccagaagagaatgcattttggacattggtaggaattatcgacgactattttgatggatacttttctgaagaaatgattgagtcgcaggtggatcagcttgttttagaggagttggtacgagaaaaattcccaaaactagcaaatcacctggattaccttggtcttcaagttgcatgggttactggaccatggttcctatccattttcaccaatgtgcttccttgggagagtgttctccgtgtctgggatgtccttctgtttgatgggaatcgtgtgatgctattccggacagctcttgcactacttgagttttatggtcctgcacttgtgaccacaaaagatgccggtgatgcagttacacttttgcagtctttagctggctccacttttgacagcagccagcttgtcttgacagctcgcatgggatatcagtctgtagatgaaacaggattgcaagagttaaggaataagcatcggccatctgttctatcttcaatggaagaaagagcaaaaggtctaggtgccttggacaccaacggtcttgcatcaaagctctataatttcaaacatgatcctgaaccactggtgtcaataagtgattcgcaagatcagatgagtgatgtgggagatgggaatgccaaccaaagtgattctggaaatatggatgatatgtatggcggtctgacagtcagttctgagattgaagctttaccggacccaaaggaccagatctcttggctgaagtttgaattatgccgattgctagaggagagaaggtcagctgttctcagagctgatgaactagagacggcattgatggaaatggtcaagcaagataataggcggcaattaagtgcaaaggttgagcagtcggaacaagaattgtctgaactaagacaaaccctattggataagcaggaacaagagcaagcaatgtgtcaggtactgttgcgagtggaacaagaactgaaaattgcagaggaagcacgcatctctgctgagcaggatgccgcagctcagagatacgctgttaatgtgctgcaggaaaagtatgaggaagctatggcttcactcgcgaaaatggagaacagggctgtaatggcagagacaatgttggaggccacactgcagtatcaaactagccagcagaaagctcttctttcccccttgccttctccaagaacatccatgatagacgcatcccctggtcgagcaaaccatgattcatcacaggagttccagcccaaaaaaataaacttgctctcaccattttcactgagttggcgcgataagaacaagggaaagcagaacaatgttgatgacagtgccaagcttactgatgcacatgatcaaagggaagaaataaccaacaacaatgacgagaagcaggtagaaacaccaaaactggatgtgctagaagagtctatgggttcacccaaagaagataacaagtcgagagtagaggtgccaaaggaagacagcgatttggcaagcgtccaagtagtcgcaaatgatatgaatgggcagcatgaacagttgcaagaaataaaactggattgaacagttgcaagaaatcacaaaccaaccttttgcatatatcttcaccactatggtattcttttatctgatcttaccatggttgtcgagagagttaaacctggagggcttcaaggttcgaacacgatcattgctgtacctattttttgctctgtccccttctttttaattgtttcctttttttttttttatcattgccactcttgtaggtctataggttactttttctctccattattactcgagaagagaaaaaaagggcgaaagttatctggttgtccattagttaactttcgatgtaaatgcatcaggggaaattaccaaatgtagaaacacactttgcaattatggtatgcttgtttgtgaatcg

SEQ ID NO: 15293 - DNA, 1906 bp, Oryza sativa
  ref <308>: DATABASE ACCESSION NUMBER: AK065822
  ref <309>: DATABASE ENTRY DATE: 2001-12-06
gattctgaattccgcactcagattttcgggcgagaagacgagtgaccaagttgggacgggagcacgagcgattggcgcagggcagattcatcaggtgcgcgcgaaaatcatcctcttttcgccatctctccgattagcctgctttgattccgtacgcgttcatgttgaatcgatgtcttagatcgggcttgtttggtttggccgatttagaattctgggatgggtaccgcttctgttccagatcttgctgttcagaattcagattggctgcggggggtttgatgtgatgttaggatgtgtcatgaagggaaatcgaattgttttatcgaagtatttctgttgtagttctagtgctttgtcaggatctgggaatggatctgaattcttgataagatgttcgtgtgttacctcatatatcgcgtgtcactcatgatcttctctgcggatttttgtgggggatcattttgtccgtaccaacatatttgctcaaaattctattacgaaatctctcctccatgttgtttgttcatattccagcgtaagaaattggtttcatgtagcgtagcttgtgttgcagcaatgaatatgctgccatccctgtacatacacagacactatacttgttttacagttcttacacttgggcagcatcatgtcaatgggtgtttggccaagcccaggacagccccaaaatttttcagcagaattctgggactagttgtcattttttctttttctgtggtaaatttaacttaagcttgtttagttatagttatgcagcatccaggagcagttagtttgatagattatgaatgtatataggcatgagcaacagcaaccatttcttttttatatttttattagcactcaaatgtgacaactaaaacttcactggtattggtgtagtactatcatacacttccaagatgtgtaccttattctgccttctgacatattccacattgaagaaacttctgtgcttcttattttgccttttgacatattccacattgaagaaacttctgtgcttataaaatagtcacttccaaaatgctgtgtgacagcataaaccgtatcttccaaaatgatagacatattttaacacttcctatgtatatgcaatacgactttggatgaaactctgttgttctgttggttttctgtaatattagtgctgcaaaccttacatttgaaactcatattatcatgcagagggataaagcaagatggtggccaatggagatgccccggctagagggagtgcagcagctgctgcaagcttgcgcaggcgtagaaccaccagcagtggcactggtggaggcggtgccagcacaatgctccagttctacaccgatgaggctgctgggcgcaagatgtccccgaactcagtcctcatcatgagcattgggttcattgccgtcgttgctcttctgcatgttttcggcaagctttaccgcacctccgcctaggctgtcattatcttacccgcatgcgaaatttgtcaacagaggaacccgtagcctaatggaatagcaaatgactatcagagtatgaaaaattttgctgttaccatcataccatggaatcttatatagtaccttacaatactaacctgttgtggttctgtccttacaagtcgtttttggtcattgctaatagttaagtcttatgttagtttctgtagttctgtcatatttctgctcttatctttatcagtccttttcttacctgtggccatctccccttatctctgaagttggggcacttgatccttttgtttatatctctatatgttaaggatctgaagcccaacactacaatgcagtatgtgtttgttgtttgaaagacagttggattgacatgacattctaccagtgggatgtttgaataaattcaaatactgaat

SEQ ID NO: 15294 - DNA, 2918 bp, Oryza sativa
  ref <308>: DATABASE ACCESSION NUMBER: AK065823
  ref <309>: DATABASE ENTRY DATE: 2001-12-06
ttggggaacacaccagagggttcagggaggtatgtctggtcagatggttgcacttacgatggtgagtggaggagagggatgaggcatgggcaaggaaagacaatgtggccatctggagccacctacgagggtgagtactctggtggctacatttatggtgaaggcacatataccgggtctgacaacatcgtctacaagggaaggtggaaattgaatcgtaagcatggacttggatgccagacgtaccctaatggagacatgtttgacggttcttggattcagggagaaatagaaggccatggcaagtatacgtgggcaaatggaaacacttacgttggcaatatgaagaatggcaagatgtctgggaagggaactcttacttggaaaaatggggattcatatgaaggaaactggttagatggcatgatgcacgggtatggaatctatacatggaatgagtgtgggtattatgttggtacttggaccaagggactgaaggatgggaaaggcacattctatccaaaaggttgcagagttcctgttaatgatgagctctacatcaataatctaagaaaccgaggtgtgctgcctgacattagaaggcagaatcacggctcacgcatccttcactcttcttcggttgacatggggaacatgaaggttggcttaactcgggaatcttcaggtccttcatctagaaggaactcaagtgagcaacctcattcgaaaaatgtatccttggaaagacggtggagccttgaggtggccattgaaaaattcattggccatgacgcaactggaagctctggcctagaaagatctgaaagcattaatgattctgatctgcctatgctggaacgggaatatatgcaaggtgttctaatcagcgaggtagtacttgacaggagtttttcggattcgtccaagaaggcaaaacggcgccagaagaaaattgttagggagacaaaaaagccaggagagacaataattaagggtcacagaagctatgatcttatgctcagtctacagcttggaatcaggtacacggtaggaaagattacgcccattcagaaacgtgaagtccgtgcttcagattttggtccacgagcaagtttctggatgaccttccccaaagaaggatcacgacttactccttcacatcctgcagaagacttcaaatggaaggactattgtcccatggttttcagaaatttgagggagatgttcaagattgatgctgcagattatatgatctctatatgtggaaattctgcacttagggagttatcttctccaggaaagagtggaagtgtctttttcctatcacaagatgatcgattcatgatcaagactcttcggaaatctgaagtccaggttctgttttatgcttaaattttcagagatcatataagcgtgctagaaaattctttaatggtagattcttcgataaattatacattataagtaacaccacctacttagcaagcggaagttaaaaacatttcatgactctatatgatccttgcaggttcttttacgaatgcttccaaaatattaccatcatgtccgtacttatgagaacaccctcataactaagttttttggcctccacagggtgaagccttctagtggtcaaaagtttcgctttgttgtaatgggtaacatgttttgcacggaattgaggattcatcggagatttgatttgaaaggttcatccttaggccgttctactgacaaaatcgaaattgatgagaacacaactctgaaggatttggatcttaactattcattttatcttgaaccttcctggcgtgaggctttacttaagcagattgaaactgacagtgaatttctaaggacccaacggataatggattacagcttattgcttggtgtgcactatagagctccccagcaccttcggacgcgtgcatcttatcatcgaagcatggcagcagatagattaactgttctttcagaagaagacgctcaggaggacgatgctttcaactacccggaaggtctagtgttggttcaaagaggtggtgatgaaaacagtgtggttgttggccctcacataagaggtagccgtttacgatcaacagccgctggatttgcggaagtagatctactacttcctggtacagccaggctgcagatccagctaggggttaacatgcctgcaaggacagagcagaaccctaaagaagaggaaagcaaatcgtttcgggaggtgtacgacgtggtcctttacctgggtatcatagacatattgcaggagtacaacatgtcaaagaagatagagcatgccgtcaagtccatgcagtacgactccatctccatctccgccgtggacccccagttctactcggagcgtttcctcaagttcatccagaccgtctttccagaaaattcatagtgccccagccagcagccattgcgattatttcgtccgcggattgattctcctgccttgtgttatgacatgaacttcattcatagtgcctcagcagcaggtactaattttttgccgagcagcatcctccttgaaacgatatggcactgcgggatggcagggaaagcacgcgaatttattctttagttctgaaggtgctgaaactgaaatgtgcgaaaggcggtcatggagagctggagatgggagagaatttgacgtctttctcttgatggaaggaaggcacaaccgcacatgtctagggcaatgtactaccgtcggtgccatgtgcttgtgagcctctcttgtttgggcacaacacaacaaatcagaagcaaaagcgcagtgcactcatatgtgccagaaatatattttccattccagagtatactgttagttgtataggattacagtgaattgccaccttggtcttaatgttgtatgaaagatttttcacgtttttgtg

SEQ ID NO: 15295 - DNA, 3446 bp, Oryza sativa
  ref <308>: DATABASE ACCESSION NUMBER: AK065824
  ref <309>: DATABASE ENTRY DATE: 2001-12-06
gtgatctacaaccagtatagttgtttcttgaaataattctgttctgcagcgctacctagctcttgagtccttaccagctagccgtacagtcttgcaggcgtgcggcggggatcatgtcgaagggagcgatgggaagaacttccatcatggagaagcaggaggaggcgttgaaggagtgggagcccctccatgagagtatctctaagctgctgaagggtggacgcatcaccgacgcccgcgaaaggcacagcttggcattcatggagatggaactgggcgtcattgtcgcatacctgaggatgccgctgccaccacacacagattgtcctggtgtcgatctcatcgataaccagatccagtaccactggagttactacagggatgtcgtgatatctctgtataatcagtacggagaagaagcacctaatgcggggctgctgcgaaaagccatgcggtgcttccgtcgccgaaggtctttagagtataacattccgaggacagcgtacagtctctaccgtgagtgctccagtgatccacgcctcgagctcccaagctcggagctcatgccatcgccgcatcaagcagcccaagttgaggctggtgccctcaatgatcatcttgttggcatcgacagcatggcaaacgagatgctcagatggctcatggccaccgacaagggtctccgggtcatggccattgctggacccgccggcattggcaagaccacccttgccatggagctccaccgtcgactcaggagcaagcttgttcttcaaaccatcctgaagcagatcatggagcaactggatgcaccatcaccaaacagctcggaaatcaccatgtccatgttggaggacaacccggagctgttgactcgcaacatatcagaacacctcaaggataagagatactttgttttgattgatgatatattagacgaatcagatttggaaataatcaagggtgcatttcctaataataactgtggtagtagaatattgtttacggcacaacatgagtggatagctgggtggtttttgtctaattataatggggttgtgcataagatgaagcctctgaatgactcggattcagagaagctacttcgcacaaaagcttttagttccatggatgatttacttccagacaatcttaggctattatgtgatgaaatcttgaacaagtgtagaggaataccattgttcataactggtatggcagattggttgaaacaacagcaacacggcagctctgcagttcttagggtggaacaagtacgcctactgctgaaacagtttgaatactggctatcatttgattacagttatgaattgagcctatcgtcactctatctaagcatgtttccacagggatatgtgtttgataaggatcatcttgtcatgaaatgggaaaacgatgggttgatccgtatattggagtctagttcagaatatggagagttgtatttctctgagttggtcaacacgaacatcattaccccagtaggagagaactatggacccaatcttgatgaagatgaattgtgccagtggcaggtcaatcctttcgttctgagttttcttgcctccagagcagccgagaagggtcttgtttttaccagctcaacactcacctcattaccaagctgtggtggcaacaacactcggataaaacggcgcctagctctccaccaccctgatccgctactccccgaaatgctgcaacaaatggatttgtctcatactcgttcactactcatatctggtgcagtcgacagaacaacagtccctctagacaagtttggatatttggtgtttttggatcttcaaggctgggagaatttgaaggatgaggacctactgcagatatgcaaaatgtttatgctgagttatttgagcgtcaggaacacaagggtcagcaagctcccaccgcaaatcaaggagctgtgcaacctgaaggcattggacgtcagccaaacccacatatttaagatcccatcagaagtgtgtgagctagaatatttggagatcctggaactaagaggcacacaaataaagcacatgccagataaaattgtggagaaaagaaagtacgaacaactttacggtaatggttctgtatttggaatgattgactcaaaccaaaaagtgctaacaaagatatcgaagaagatccaccaattaagatatctaaagacgctagcaactatcgatttaagtgaattctctgcaaagtcaatacagtctctcggtgatctggagagattggaggtcctcgcaataacatggtcctttcaccagtgcagtgacgaagactaccaagaggccctacggttatccatagaaagatggaggaagcttaagtccctcaccattcattgtgggctcggttgttccatggagtttctgggttctctaacaaaaccacctgaaggacttaagaaatttaaggtaatagccggaaaatttgtcagtgttccccgatggatcgaaaggctcgtgtatcttactttcttgcagatcacggtttgcaaacaagtggcagacgatgtcaagatcctcgcaggcttggtcaaattgcagcacctggtactatgcttggagttcattcccgaagaagcaatagtgattgagacaaaagggttcaaagagattgagagattctcccttgattgccctgtcccatggctgaccttcgaaaaagaggcaatgccgaagctcacatatcttcgactgaatctgtacgcgttcccagcgagcgagatgagtgttccttcaggtatcagcaaccttgaaaagctttcggaggcaaagatttgctacaatgcacggtacatcaatagtcccaacgttaagaggacagtagaggtagtgagcaaggaggtcgccaagcatcacaactctattgaccttttcatcaacggtacccaaatagaagttaatcaggctggtgaggagaaggcagagagtgcaacaagattcaaccaagtcaatccgccagaggatgttgttcaggcagaagatgaggcggcactgaggagagaaacagagtttcagagcgagaaagaagatgaagatgaagcagagtgccatgcctagctcctattgaaaaggaaatgatgtccgcctctcctgacaatacatctcacagaacagtgagataataactcctgcatcacgtggtcgcttctgtattgctgttggtcgccgtgtacatatgtggcccgcaatttgcgggctaccatcgttatattttctttcatatattagtatgtatgaattatatggttgttttaggatatatatatagacacacacatgtaaataggtgtcaattaattgctactaattagacttctaatggcttgctagcaacatatttaatttctctctacatgtatataaacatggatgaagctagaacgaatattaacttatatcccatac

SEQ ID NO: 15296 - DNA, 2844 bp, Oryza sativa
  ref <308>: DATABASE ACCESSION NUMBER: AK065825
  ref <309>: DATABASE ENTRY DATE: 2001-12-06
gttacaaaatatcaatgattaaagtcaaacgtggagagcatcgtctttttagattagcagaaaatttgtgcatgaatttgattctctcactaagagacttctttttggtgaaaaaagaattgaagggtccaactgagtttactgaaacacttaaccgcataacgataataagccttgctatcaccatgaagacacgtggaattgctgaggtcgaacatataattcatcttcaaccattattagagcaaattatggcaacgagccagcatacatggtcagagaagactctaagatattttcctccccttattcgagattttttaatggggaggatggataagagaggccaagctatccaagcatggcagcaggctgagacaactgttattaatcaatgtaatcagctactctcaccatctgctgagccaacctatgttatgacatatttaagtcacagtttccctcagcatcgtcaatatctttgtgctggtgcttggatgctgatgaacggacatctagagatcaacagtgcaaatcttgcccgtgttttgagagagttttcacccgaagaagttacagcaaatatttatacaatggttgatgttcttctgcatcatatccaacttgagctgcaaagagggcatcaaattcaggacttactctctaaagcaattacgaatcttgctttctttatctggacacatgagttacttccattggacattcttctgttagctcttattgatagagatgatgatccttatgctttacgccttgtgataaatctccttgaaagaccggaacttcagcaaagaattaaagcattctgcacttcgcgttctccagagcattggctaaaaaatcagcctccaaaaagagtagaacttcagaaagccctcggtaaccatctctcagggaaagaacgttacccccccttttttgatgacattgctgctcgtctgcttctagtcatcccgttgataatttataggcttattgagaacgatgccacagatatcgcagatagagtccttgcagtttattctacctttctggccttccatcctctaaggtttacatttgtgcgtgatattcttgcatatttctatggtcatcttccatccaagttaattgttaggatcctcaacgtgctgggtgttagcactaagacacctttctcagaatcatttgcccagtatctagcgtcatcaaattcatctatttgtccaccaccggaatacttcgccaaccttttgtttggccttgttaataatgtcatacctcctttgagttgcaagtccaaatcaaacccatcggatgctgctggcagtacagcacgcacaacttataacaagccttatacatcttccgctggaggaatcagtaactctgatggtcagagggcattttatcaaaatcaggatcctggatcatatacacagcttgttttggaaacagcagccattgaaattctctcactttgtgtgccagcttctcaaatagtatcctctctagttcaaataatagcacatgtacaagcaatgctcatacagtcaaatagtggtcatggaatgtcaggtggtttgggccaaaactctggggtgccgacttcttcaggtgggggagttgaacctgttggtgccaaccgaccaaacaccacagcaagtggaatcaatgcatctaactttgtttctagaagtggctattcctgccaacaattgtctgttctgatgattcaagcttgtggtctgttgctggcacaactcccaccagaattccacacacttctatatgcagaagcagcccggatcataaaagattgttggtggcttgctgatagttcaaggcctgttaaagagcttgattctgctgttgggtatgcactgttggatcctacttgggcttctcaagacaatacatctacagccataggtaacatcgttgcccttcttcactcgtttttcagcaatcttccacatgaatggcttgaatctacccataccgtcatcaagcatcttcggccagtcaactcagttgccatgttaagaattgctttccgcatattgggtcccttgttgcctcgtctagcctttgctcgacctctgttcatgaagaccttggctttgctgttcaatgtgttgggggatgtatttgggaagaattctcaggcttcacctcctgtggaggcatcggaaattgctgacataattgacttcttgcaccatgcagtcatgtatgagggtcaaggaggtcccgttcagagcactagcaagcccaaactagagatattgacgttatgtgggaaagtaatggaaattctgaggccagatgtgcaacatcttctatcccacctgaagactgatccaaactcttcagtttacgcagctactcaccccaagttagttcaaaacccatcttagtattacaaggccatggaggagaactgacatatttcagtcggaaagatgggaggttgttcgaatgtgtttctagaaggcgagattctaattgccgctgcttgttaaatgaaaatttgcttgctccttatggccatcacaaattcatgaatgaaaattagcctgttaaatgaaaattacaagttcatgaatgttgtaaaatagaccagacctcatcccctagatcttgctggagggataaaggttgatgatttacagtagttgtaactaatagcttcattaggccgggatgtagattgagattgccctagtggttagagagagacattattctcccgatccatgttttcactttgtagctagcgttgttgtacatgaatgtaaaatacttgattcagaatttataacataaacaccaaattctatc

SEQ ID NO: 15297 - DNA, 3286 bp, Oryza sativa
  ref <308>: DATABASE ACCESSION NUMBER: AK065826
  ref <309>: DATABASE ENTRY DATE: 2001-12-06
gacttcctccctgcctagcgaaagtctccccccctctctccttggcctcttcctccctggtcggtagcgcagcacacgcatccgcgtgaacccatcctcctccctcctttccaatctacctgcaccaaccggagacgcccgcgcccagctacccctcgcctgccccccgcgcctcgcgggagccgattcgattcgaatctaggtacacagagaagcggaagcggcagcggcggcggcggcggaggcggagatgaacaggagcaaggcgaagctgtccggcgtcctgcacaagggcttcaaggccgacaagtgcaagacggcgctgcggatggcgctggcgcggatcaagctgctgaggaaccgcaaggaggtgcaggtgcggcagatgcgtcgaggggtcgcgcagctgctcgaggccgatcaggaccagaccgcacgcatcagggttgaacatgtcataagggaagagaagttcatgcaagcatatgacttaattgaagtatactgtgaacttatggtggcacgcatgtccattattgactcacagaagacttgccctattgatctgaaagaagccatagccagtgttatatttgcatcaatgaggtgttcagatgtcacagaacttgcagatgttcgcaagcatttcacaagtaagtatggaaaagagtttgcagcagcagctcttgaagtgcgacctgacagtggtgtcagccgactggtcattgagaagctgtcagctggagcacctgatacacagaccaaaatcaaaaccttgacctctattgcagaggagcacaacatcaaatgggagccaaaagcatttgaggagaaattgccgaagcaaaatgatgatcttctgcatgtgacctcaacatatccgggaggaaatattccaactaggggatcatctgcttctaattctggcatgccaacttcacagcctgctgcaccttctcattcatatatggaatcttccaattctcacatgtctacggcacattcatattcatcagctgaggttccagacaatagggctccatatgtcactgccaattctaatgctttcccccaagaaaacagaaggggttctgatgctccaatgtcccctaggtcccagcatggtcctaacagtttctctcatgatactgctggaggttcaaatgtttctagaccttactcccaatatggtgcaacagttccagatacagatacagcgtccaggagggaagagttcaatcactctagggagagaaaatcttcagttagtggttccaattggaatatagaattcaaggatgcaacatctgcagcacaagcagcagcagagtccgcagagatggctagtattgctgctagggctgctgcccaacttgctagtcgtggaaacctttctgcggagcaaaatactggagcttttgagtcacctgcttatacccatgaaactacacccaggaagcaacaagctgaacatttaatgaaggatgggcagaggagttctaatgagcagagttcaggggcttatgatccaagactcatctcaagtaatgatgctaggaaggatggggggagaacagaaacaagccgtgtaggtagtcagaatatgccaactaattccttgggtcaatccccaccatatagccctcatattcacagtgatgagtatgacatgccaactgatccgcatcgttctcattcacccgatcctcaatattctgatgattcatctgagaaagaaagcaactttggaagacctgaggatcatcagtttaatttacctggagaaagattgtccgaggctcaacttggtgggcacaacatcaaggacacggaaagcaagcatgctacctttgatcaagagaacacagacaactactacagcaactatagctcttcccatggtacattcacccatggcagcagtaccatttgggacagtcagaatgataaagctggacctgattcttcagctgttgtttttgatcaatatgattctgatgtcggagaagaaaatttattggatcctttctcttcaaagcacactgaagaacccactgttgaagatcacaagggattctcaagtgcagattggggtcaacagcatagaaatgaatctccagttaatcatagcagctcaacactattttcaggaacagaagcaaacagaaaagatgtttcctcacctcattcttatgataatgtgccacctacatttgactcggatggtgttagttctgatgaggaaatgaccacaggcatgcatgcaaggtctttaaggtctcattccagaggatccgatttttccgagagtagagaaaatataatttctggaaaggttgtccatgatgttaatgaaaatattgaagatcatgtatccatgtccaggaagaattaccttaattcatctggttctaatgcattcaataaggagcgctacagtgaaagttcacctagatctgattactcatgggttgatggggaattggatcgtacaaaaatcagagatcttgaagaagaaagagtgccacataaattggaaggtgcatcatcattgacaacaggagaaaataagaatcagctgttttctttaggcaggcaaacttcaacatcatctgctgactatgatgaaggcgatccaggcttgaactttggaaggctaactcctggactaagaaacaaactccggcaacctcctccgtacataaaggattctgggaatacctcgttgcataaggttcctaccgccattgaaaaatcagtgcactctgaagaggatacctcgtttggaaatacaagaaatacttctacaggtatggccaggagttcgttcggtgcagattacaacagtgaacttcatgaccaaaatcaaagtgttggagcaagtgtggaagctagatcaaccatgaggaattactatgggtcagaaggtgatagagggaagttatctgagcaatcttataatgctccaagttctgtgatgaataagagttctggaggtgtaaattccagtcaagatctgtaccatgaaaagccaggtgctggagcccgcaggggaactacaacaaaaactgccaaaagttactttgattcagatgatagcgaggacgaattggcacaacgcaaggaggtccagacaaagtggtctagagagcagattcaatcacgcaggactcagatgacatcagatacaaagaaagaaaccggtgtccgagttggagtgcagcatgctgatgaaactgaggcgaaatcacctgctgggtcattttctaggtttactgaacaaagg

SEQ ID NO: 15298 - DNA, 3110 bp, Oryza sativa
  ref <308>: DATABASE ACCESSION NUMBER: AK065827
  ref <309>: DATABASE ENTRY DATE: 2001-12-06
gagttaaccggcgcggcgtccggcgaccgtacactcggcggaggccgcagagcggcagcggcaggcggcggtgccgccgagggcagtcggctcggctcccgcggcaaagcgggaacgggagagagagcagggcggcacacgcgcgcgctgaggctgcgcgcggtgggcgcggcgtccggcgatgcccgggcaagagctataggaaggcgaagtcgtgggctacagccccagtccccagtgctaaggcagtttctgattacccaagtgtagatgtgatggacacccatcacagcgatcaatatgcaaagagcagcctgcagctgcaattcagggacacctctgtttcctttgaaaacaacaattctgttttggataagcatgatattacaagccctcaagttggcatgacttttgagacagccgatttggcatatcggttctacttagaatatggctaccgtgcagggttcggggtctcaaagaggacttcccatagtgttgatggggtgaaataccgtgcaacatttgtttgttacaaaggcggcattgctaggatcaagcctggtctcaaagctcgaaggaggcttgttgcaaagactggttgcaaagcaatgatggtagtcaagtataacacaactgaaaaccagtgggaggtagtttttgttgagctggagcataaccatccatgtaatcctgaaatggttagattcatgatgtgctttaaagatctccctgactggcagagggagcaccgcccattcaatgccaagactagattgaatccaaagattcactctggcagaggcaggccacccaaccaaaacaaagacttcatggtgaaaaaaaccttctcacaatcaaattattccattgaagcagcaggcaaggctggaaagctgagatttgcagagggtgatgttgaggcactcttggtcttctttgataagatgcaagctcaaaattcaaactttttctacaactgggacatggatgatgaaggtcggctcaagaatgtttgctgggtcgatgctagatcgagagctgcataccagcacttctgtgatgttgtttgctttgatactgtttatttgacataccaatttgtcattccattggttgcttttcttggaatcaaccatcatgggcaatttgtgttgttgggatgcggtttacttggggacgaatctccagagactttttcttggttattcaagaaatggctaaaatgtatgaatgataaatcacctgaagcaattattaccacccactcaagaccagtggtcaaagctgttgctgaggtatttccaaatactcgtcacagatacaatctttggcatatcatgaaagagcttcctgaaatgtctggaagagttgaggataaggaggcaattagcctaagaatgaaaaaggtagtcttcgacactattacatcaactgattttgagagggaatgggttgagatggtcaatcagtataaccttcatgataatcattggcttacaaccttatttgaagagagggcaaaatgggtaccagcatatgtcaaggatactttctgggctggtatatccactgttcgccgcagtgagcggttggaggccttttttgatggatacattacaccagagaccacaattaagacatttattgaacaatttgatactgctatgaagcttaggtctgaccgagaagcgtatgatgattttcgctcatttcagcaaaggcctcaagtcttgtctggtctactctttgaggagcaatttgcaaatgtttatacaatgaatatgtttcagaagttccaagatcacttgaagcagctgatgaacgtgacttgcactgaagtcagtaggaatggatcaatagtgacttacactgtgaccgtcattggtaaggagaggaagtatgactacaaagtgatgtataacagtgctgagaaagaggtgtggtgtatctgcaggtccttccagtttaaaggtattttgtgtagccatgctcttgctgtcttgagacaggaacttgtgatgctgataccttataaatatattctcgatcgctggaggaaggactacaaatgccccgaggaatccaaggaaactcccatctcaccaaaagcgatcaaagctacagggaagggcacaaaaccggaaaatgcccgtgaagataaagtggacaatctgtacaagcatggtcaccagtactttgctgacattgtggaaatgggagcaacggaccctgatgcaatggagtatgttttgtcggtcatgaaagaagccaaagagaaggtacggaagttcgaggaatctcgaaaagatagaaggcctggagacagtccagtttctactggtaagagaaatggcaagtcttcaagaccatccaatgaggatgggggcaatggcatatcagattcgacacctgcgactacaacagtggcgacagtcgcggtggccacatctacaacaatgcaggcaacgcctacaatggtggctatagcgcctacttcggcaactgtgcccgccggaatgtttttggtaccaatgcacccacatccgatggttttcccacctttcacccctgcagtaccaccagtggtagcacctgcagtgccacctccagcaccagcagccaatgtgggtgatgtggcttccaactccacaaggaagagaaagaaaagaaaggggaacaaatgatgttcctaatactgattatgcctaactcaaatttagtcctacaagctgcaccaggccctcctgtccatgtgtaataatggtttatcatcgtctcctgctgcaggatgatctgcccctctgaatgctttctgtgaattatcccccttgacttggaactgtccgtgcagctttggactgtctactgtaaattgatatggaaagtaatgtattatgtatgtagtgcagcttaggaatgttagtctctgtttctgctcatgtggattgcgacctggagcagcgcagtaccaagactaccagtagcgtagcagtaccccttgctggttggtagagtaccattttctttcctttctggagtttgtcactttatgtaatgatgtaatcacactgaactttattgccaaccactaatgcttagtttcatcc

SEQ ID NO: 15299 - DNA, 1153 bp, Oryza sativa
  ref <308>: DATABASE ACCESSION NUMBER: AK065828
  ref <309>: DATABASE ENTRY DATE: 2001-12-06
agaagcaggacgaagttgtagctaggatagaggagaggattgcagcttggacgttccttccaccagataatggcgaatccattcaaatattacattatcagaatggcgagaagtatgagccacactatgattacttccatgacaaaaataatcaagctcttggaggacatcggatcgccactgtgctcatgtacctttcagacgttgggaaggggggagagaccatctttccagaagcagaggggaagttattacaacccaaggatgatacatggtctgactgtgctaaaaatggatatgcagtaaaaccggtaaagggtgatgcccttctgttcttcagtctccaccccgatgcaacaacagactctgacagcctgcacgggagctgcccggtcattgaaggtcagaagtggtccgcaactaaatggatccatgtgaggtccttcgacatctctgtcaagcagggagcttccactgacgggtgcgaggatgagaacgtcctctgcccccagtgggctgcagtaggggagtgtgccaagaatccgaactacatggtgggtaccaatgaagcacctggcttctgccggaagagctgcaatgtgtgtgcacagtaagttactgatccacccttgtgatacatagcagcacgccctcgataattgttgccgcggtaccgggtgtatataggactgagcatagcatgtgtaacctggaaggagttaagatgtactaagatccatttcgcctatatgcacctagaaaaattatagccagactcttgtttctgttcattgttcaagctcgaggctagttactcattttagctgaagcaatggaatctacgaccacggattgtacactcttctttgcttcactttctgtggcaatcgattgcttttcttcttggaaaggaaagttattcttctggtgaaactggttgcttgcaatttacaaaaacgagagacaactcaattgatctggaccagatttgataagtagactcgtagtatgtatatatcaataatgtctggtgtcgttttacttgttgggttgttgttcagttgccgaatcgaatggaacacctatgccctggcctatgtgtaatgtatgatacccaatctaccaaaccaaataaatttgcttttatgttcct

SEQ ID NO: 15300 - DNA, 1469 bp, Oryza sativa
  ref <308>: DATABASE ACCESSION NUMBER: AK065829
  ref <309>: DATABASE ENTRY DATE: 2001-12-06
gtgtaaaccccaccgtcccaacgcatttccttcctcctcgcctccgactcaaatccaccccgcgtctccgcctcaccgcagacagagagagagaggccaagcatggcggccgccaccgccgaacccctcgccgtcgccgtcgccgtcgcccacaccgccaccgccggcacggaccactcgccggccccgctgcctccccctcccccgcactgcaattacaaaagcaaattgcaagagtatcttcagcaggcaaataagcagttgccaatctactgtaccaagtgcaagggtgaacaccatcagcttaagttcaaatccactgtcatggtggatggtgaggagttttcatccactttttgtcatagacgtgtgaaggacgctgagcaggatgctgctaaagtagcctatgataccttgcttgaaaggaaagagactgagactgatgatgcagatgtgtttgagctcattgatcaggatgttgtgttcagcaaatcaattcttcatgaatatactactaagacaaaaactgatcaaccagaatactctgtaaccaagacagaagggtccgtgactccatatgtttcatctgtgtcatttgctgggcatacttatactggtggagctgcaagaaacaagaaggacgcagagcagaaggcagctcgtgctgcggtcaagtcacttttagctacagattacacttccatggcgaaaattgttagatcgaaggaaaagctcatcagggcaatctcaccttctgggtacaacaaaggaatcgacagtaatccaacaaacaagaaacttccttttgctcctataaaattcacacccccttccatattcaaactatatgatggagaaatcgacatgctttctgtgccacaagctctatttgcccctctagtcgctgctgaggaacccaaagtcagaccagcagctgagccagcttccaacccatctgagcaagctgtccatgtatcaaagaagcacaaggataacaaagtcagaggaccagaggtcaaggaagaaagagttgcacagtagcatcttgcccttcacagcctgaggagtttggattccatctttctgtgctggaggttgacaggctttggtgacaacatggtgctgtgtaggtgatatgctaagcagctagtgatcatcagtacaatgggcggtgttcaaatggcattagattggagtctgtttccttttcttctgtaattagaccaacaatatcagtcatgtggtagtagtagtagtggccgaacaaaacagtagcaacgccatgaagtatgaactacccccgtccgtccgtgctaggctggtagttttatggttgttatccactctgttcatgtgtgtttagttcaaagaaaatctgttccgagtcgggatgatcagcaaatgattttgttcttctatgcactgagaatccagatgcatttatcctaattgcttgtctaattctccct

SEQ ID NO: 15301 - DNA, 1922 bp, Oryza sativa
  ref <308>: DATABASE ACCESSION NUMBER: AK065830
  ref <309>: DATABASE ENTRY DATE: 2001-12-06
cgggtagatcgacgctggtgtagctattgctaacattattgaccagagcattagctagcgagcccaataaatttggtagctaataccgcctattccgccacgtaccgacgcccgttcccgcagatggcaccaccctcgcactgccacaccatcaatggcggtgccccacggaatggtgccatcccggaggtggagacgacgacgtcgacgccggcggcgtcagataccgcgctactgctcgacgctgacgagttccggcggctcggccaccaggtcgtcgacttcatcgccgactactacgccggcctgggcgactaccccgtccacccaagcgtcactcccggcttcctgcgccgccagctccccgccgacgcgccgtcccgcccggagcccgaggcgtttgcggcggcgctgcgggatgtccgcgacctcatcctgcctggcgtgacgcactggcagagccctcgccacttcgcgcacttcccggcgtcgagcagcaccgtcggcgccctcggcgaggcgctcgcggccggcatcaacgtcgtgcctttcacgtgggcggcctcgccggccgccaccgagctcgagatggtggtcgtggactggctcggcagggcgctgcacctgccggagagccttctgttcgccggcggaggcggcggcacgatcctgggcacgtcgtgcgaggccgtcctctgcgcgctcgtcgccgcgagggaccggaagctggcggatatcggcgcgaggaggatcggcgacctcgtcgtctactgctccgatcagacccacttcgcgttccgcaaggtcgcgcgcatcgccgggataccgcgggagcactgccgcgagataccgacgtgccgcgacgacgtgttcgcgctctcgccgaccgcgctgcatgccgccatgcaggccgacgtcgacgccgggctggtccccttgttcctgtgcgccacggtgggcaccacccagactaccgccgtggaccccgtccgcgagctctgcgccgtcgcggcgcgccacggcggcgtgtgggtgcacgtggacgcggcgtacgccgggtcggcgctggtgtgcccggagttccgcgacgtgatcgccggcgccgaggccgtcgactcgctcagcatgaacgcccacaagtggctcctcgccaacaacgactgctgcgcggtgtgggtggcggcgccgtcggcgctggtggcggcgctgggcacggagcaggagtacatcctcagggacgcggcggcggagggccacgacgtcgtcgactacaaggactggggcaccacgctgacgcggcggttccgcgcgctcaaggtgtggctcgtgctccgctgctacggcgtggagggcctccgctcccacgtccgctcccacgtcgccatggccgcggcgttcgaggccatggtgaggggcgacgcgaggttcgaggtggtggcgccgaggcggttcgcgctggtgtgcttccgcctccggtcgccgccggagagactcggcgtcggcgtcggcgtcggaggcgagaaggcggcaaacgagctcaacaggaggctcctggaggaggtgaacgcggcgagctcggggccgtacatgagctccgccatggtgggtggcgtgtacatgctcaggtgcgccatcgggagcacgctcaccgaggagcgccatgtccgcgaagcgtggaaggttgtccaggagcgggccacgtcaatccttcgtaaacgtggctaaaacatctcggtaggtttgatccaaattaagcatggttttctccaagcagattgataaactatgcttttcggattgacacggcaaaataatcctgctgcgtattatattcttcacttaatctcttgactaaattagtagagagattaattgtgttgcattatttaaaaaaagaattatagaataatttataaataagt

SEQ ID NO: 15302 - DNA, 1571 bp, Oryza sativa
  ref <308>: DATABASE ACCESSION NUMBER: AK065831
  ref <309>: DATABASE ENTRY DATE: 2001-12-06
ggtgattctcgatcgctcgctcgctcgcacttcagttctggcggcgcgcgcggtggcagggccggccatgacgaagtcggccacctcgctcctgctcggcgcggccctcgccacggtcttcttcctgctctacacctccgtctgccgcgacctcggcgacgggcctccaaaatcctcgccgccgcgctgggcgcatgcgcaggagcaggggaccgccaccgtcacgccggccacgagggtcgtcgacgccgagcaggggaccggccgcccggggaggcaagaagaggaagtggttgctccaagagaggagaagcagaccaaggacgaagcggcttcgcgcagcggccatggcggcggctcggtagagcagcagcaaaaccagcgaaggatcgtgatgcccacaagccaacagaaggagacgccatcgtcgccgccccagcggcagcagcaggacctgggcgagctgctccggcgagcggcgacgccggacaagacggtgctgatgacggcgatcaacgaggcgtgggcggctccggggtcgttcctggacctgttcctggagagcttccggcacggcgagggcacggagcaccttgtgcggcacctgctggtggtggccatggacgggagggcgttcgagcggtgcaacgccgtccaccaattctgctactggttcagggtcgacgggatggacttcgccgccgagcagtcgtacatgaagggcgactacctggagatgatgtggaggaggaacaggttccagcagaccatcctcgagctcggcttcagcttcctcttcacggacgtggacatcctgtggtttcggagccccttcccgcacctatccccggatgcacaggtggtgatgtcctccgacttcttcgtcggcgacccaacctcaccagggaactaccccaacggcggcctcctgtacgtcagatccagcgccagcaccgtcaggttctacgagcactggcagtcgtcgcgggcgcggttcccggggaagcacgagcagttcgtgttcgaccggatcgtcaaggaaggcgtgccgccgcacgtcggcgccaccgtgcggttcctcgacacgggccacttcggcgggttctgccagcacggcaaggacctcggcagggttgtcaccatgcacgccaactgctgcgttgggctgcacaacaagctcttcgatctgaggaatgtgctcgacgattggaagacgtataaggaaagggttgctgccgggaacatggactacttctcatggagggtgccagggaggtgcatacattgataggtgtgggtgttttctcagggcttgtgcggttaatccctccctcctctaagaaaaaattcagcggatttaatttcataccttatctaccccgatcattttcttaagagatcaaccgaataagccctaaatgaatttgagttgggacatgatgagaggggggtgttcctgcatgtaaagtgctattgaattcaattctttcttattagtggtagcttgtacatgatgcatgagaaatgtactcaactagtgtgtctaagatgcatatgagacattccctatt

SEQ ID NO: 15303 - DNA, 1160 bp, Oryza sativa
  ref <308>: DATABASE ACCESSION NUMBER: AK065832
  ref <309>: DATABASE ENTRY DATE: 2001-12-06
gattcccgttcttcacctctcgctcctataaaatccaacgtggacaaccaaacgtccaaggccacacacaaactccaaacccattactctcctcacgacattctcgcgctctcccctcctgtaaagatcggtggttgcgagcggcgccacggtaaagcggagcaaattactcctatatattaccctgcagcgtagaccgatcgatcgggcggcggcggcggcgtatggctgggagcgcgaggtcggcggcagcgaagcacgcctaccggatgttcgcgccgtccaggggcgcagcggcgaggtgccccggaagccccggggcggacgagttcgacgagtcggacgtgtggggctcgtacggcgcggccggcgtggagtccagccccgccgagctaggcgcccggggccgcgcgatcccgtccgcccgcgccggccggaaggccccgctggatcgggccgccggctcgctgccggtgaacataccggactggcagaagattcttggggtcgagtacagggatcaccaggccgctgctgcggagtgggagctccagggcgacggcgacgacgactacgagtacggcaaggtggccggcgtcggcggcgtggtgataccgccgcacgagctggcgtggcgcggccgcgcggcgtcgctgtcggtgcacgaggggatcgggaggacgctcaaggggcgcgacctcagccgggtccgggacgcggtctggaagaagaccggcttcgaggactgaccggcgagctagctgatcactcccggtggttggcctcgccgcgcagacgtgcagtaggtttaaaatgagtacttagtagtactaattactttattctcttttgttcttatttctttttctttcgccatggacaagataagaaattgggtagtattcctagtcctataaggctagatgcaagagaggacaggaagagtgggtggtttgttcaatcaaggtgtgacaattttaagggcacctggagatggttggagttggttgatcagctgatcgatcctgtattttttttctacccttcgagtatgggaaattccacattactgcacagtgtatgtattataccactgtagtatgtagtatgcagaattgtacatgccgttttgtgcgaaattgcagagagcgaagaaattc

SEQ ID NO: 15304 - DNA, 944 bp, Oryza sativa
  ref <308>: DATABASE ACCESSION NUMBER: AK065833
  ref <309>: DATABASE ENTRY DATE: 2001-12-06
gaggtcattcagctaatctcacccccttctctgaattttctcatcattcttgtatctttcttgatgcaaccatcgatccaaccatcctctgaatctctgatactactatatttttctttggtcgatctgcgagataggccgcaatggcgtcgtcgtcttcgctgccggagatcgtgagcttctcgcctgagtccgacggatcgtcgtcgtcgtcggcacctctgatcggcggcgacggcgagctcgtcgtgcagctggtgccgcgagacgtctctgatgggatcctgggcaagttcgcggacaccagcgagttcgacttcgactacgaccagagcggcctctggtcgccgctggtgctgaggccggaggtcctcctgctcgcgcagacgccggccgggcgccgccgccgccgccaccaccaccgccgccggtggaagcggaagaagatgctctgctactgcttctggtgacatgaaattggtattttggcatcattggcttggcttcttctcgagtgcagaattgcgtgcttaatgatggagtaggtatctatgcgatgcaacagaagaaaaaaaagggggtcaatactccaacacaagagggtgtccaatccacgcatgtactgccaaaacattgtgaaatactttttttttggtacctgatgctctgtaattaccattgatttctttaacagctttactgtttttccatgtgaaatttattgatgcatcgtgcgtgtactgatctaaagaagacaaatgttgtagaattacttcgcatcatgcgtaccacgtgttaattttcagccttttagttagaggaaattaagaacatgaatggactgtatatatctgcatgatatctagatggacaaagaagcggaaaataagcttctttgtagaattgtaatctctccgtttcacaatataaatcattatagcatt

SEQ ID NO: 15305 - DNA, 4024 bp, Oryza sativa
  ref <308>: DATABASE ACCESSION NUMBER: AK065834
  ref <309>: DATABASE ENTRY DATE: 2001-12-06
gagtaatcagtaaacgttctgtaaaggttagccatcaataaattatcgaggaattagagaagcaacttttttaagcatagattagtaaagccgaaatttgtgggcaagtaggttgtgcagtttagcttgggttgagttcaggcaagaaaatttagaagataggctgtagtataggctgtttggactttggaatcgatctgtccaacactttgatattttgtgatgattagatgcattccctgtgattatgtgcttacatttttattctcatcaatcctttcaaagtagcttgctatcgccatcagactatcacctgtgattatgatttacatttaattttagcgatccacggctttatgctgaactgtaacaatcaaactttactatgcgcacttgtttgctagctaaagtgatatatgtgcctatatcccctatttatctattctatatagctttcagcaactttcttctttatactattgttactatagtctatagtccttccggtagtttgccaacctacctatcgcctaattttgttcctattatgaacctgtatttctcttgttggataatctgaagtacctaacctgagctcttattaagctgagtttcaggactgatgccagtctgctagtcaccaagattgatcttcctttgtcatgtttctctcagtgacatcagtagcttcattaggccttttatgtgataaataactgcaatttttaaatagggatcaccaaacccatatggccatatagaagagctgtataaattcctaacactttgcttggtctagtttgtttgcattcatctatcatacagtggtacagggaacaagacagggttccagtgctggaggggagaggaggcagcaaaaggctcgctctgtaacttactctacatgaagtcactgtagagttcagatcttggagcttccagttactagtacagctctacagtcatgttgctggtagtcagtggtgatgtcaggcagcagaacttcaatgagtcaggcgcggccataatggagcgtcaaacagcacgaaggaccccaagtagtgtgacacagatgccagaatttccacctgcttgtgttaaccttgctaaagagctcactgcaagatgcagagccagagcactgcaacttacggatgatgagatattgagcataacacaagacttggaaagtgtcatcgagaatttatgtgattatattggcagggtacctacatcagcacttggcagcaatgcttacacagatggtgcggtcaaagcactctcagtgaggggcttcttagaggatgatatgctgacaaatgcagtgaacagcatgcctaataggaagtatttccatgacagcaacatgccaaggctagtggaatttctgcagggaatgtaccatgaatccgatgaatttggaggccacttgttcagctctctcccagaggtctcagaatacattgaaccactgtatgatgcactcttctgtccactgacaaatcaggtaatgactgatcctgtgttaacggagagcggtgtgacatatgaaaggagagccatagaggaacattttgagaggtttgctgatagttctgaaaatgtcatatgccctgtcacaaaaatgccattgcaaagcaagacattgatgaacaatgcttccctgaagagcgtgattgcagaatggacaatgaggaatgaggcaatgcggatcaggattgcccgcactgcgctctcactgtcaagtacggaggctatggtgcttgaggccatacatgagctgaagtcgttggcaaagctgagggggaaaaatagggagcagatgcataagattggggtcaccaggctcttagcacggttgttggacaaccacaatgtgcagattcggcatagcgcgctggagcttctgtgctttttagttgaggatgaagaaggaaaggatatcattggaaaaactaaggccattgcccggacaattaagctcttgtcaactaatggcaccgatgaaaggcatgcagccatctctttcttgctggagctttcaaagtcacagctattgttggaggatattgggtcaactgctggaagtatcctgatcctcaccacaatgaggataaatgattctgatgatccaattgctgctcagaaagctggagaggtcctaaagaacctagagaaatgttcaaagaacatcaagtacatggctgaaagtggctatctagaaccccttcagagtcatcttgttgaaggttcagaagagatgcaaatggagatggtcggctacctagccgagctaatccaagagcaggagctcaccattgacatcaacggaagcacgtcgggggtcctcatcaagatggtgcacagctgcaacaccgtggcgcgtaaggccgcgctcgacgtccttgtccagctttcctctcaccgccccaacagcaagacgctcgtcgaggcaggcgtcgtcccggtcatggtggaggagctcttcatccgaaaggtagacgacgagccgctcagctacaaggccatggccgccgccgtcctcgccaacgtcgtcgagtccggcattgatccggacaacaccgtggtgaacaaggaaggccacgtcctcacgtccaagtactccatctacaacttcgtccacatgctcaagtgcttcatgcccgacgagctcaacctcagcatcatccgtgtcctgctcgcgctcaccgcgcacgccaaggcgctcgccgccgtggtctcggtcgtcagggagaaccaccggggccactccgtcgtggagctcatgagctcctggacggaggcgctcggcgtcgcctcgacgaggctgctcatcaccctgtccgcgcacatggggcacaccatcgccgagaggctctgcaagacgcagggccagccgaggaggctggtcaggagcatcttccgcgccggccgcgccgccatcaccgagcggcacgccgccgcggtgacgctcctgtcgaggctaccgtaccggaacgtctcgctcaacctggccctcgtgcaggagggcgccgtgccggcgatactgcgcgggatcgaggagatggggagcggcgcggcgaggatgacgacgagcaggcacgccgcgccgtacatggagggcctcgtgggcacgctcgtgcggctcaccgcgacgctgtacaacccggacgtgctcaaggcggccatggaccacgacttcgcctcggtgctcaccgccctcctcgccagagcagccggtagcggcgaggtgcaacggctcgccgccgtggggctcgagaacctcagctaccattccatcaagctgtcccggcctccgccgccgccggaggacgagccgcggccaaagaagatgaccatactcaagcgcctgaaagacgcaagggtgcataaccatagcagcagcaagaacccaccgctgaacgtctgcccggtgcaccgtggcgtgtgcacgccggcgacgacattctgcctcctcgaggccggcgccgtcgagggcctcctcgcctgcctggagaacgacgacgcccgtgtcgtggacgcggcgctgggagcgctgtgcacgctcgtcgacgacagggtggacgtcgagaaggccgtggtcgccctcgccggacagggcgcggcgaggcgcgtgctcgcggcgctgaggcagcacagggggaacagcctgtggcacaggtgtttctccgtggtggagaagctgctggtgcacggggacgacgtgtgcgtgagggaggtgaccggcgacaggatgctgcccacggcgctggtgagcgcattccaccgcggcgacgcgaacgccaagcaggcggccgagagcatcctcaggaggctgcacaagatgcctgactactctgcaacctacatgtccgtggaattctagtgctttcatttcatcgagtaaataaatatataccaccggtaaatagcagcagatatttgctgccgtgcatatatgaacatgatgtttcatacatcatcttgtacatccggtcgcaaaatttatctcagtagcatatcc

SEQ ID NO: 15306 - DNA, 3669 bp, Oryza sativa
  ref <308>: DATABASE ACCESSION NUMBER: AK065835
  ref <309>: DATABASE ENTRY DATE: 2001-12-06
gaggctgtacctaatctcaatgaagcagtggctgaagaagcagcagtggctgatcaagaggatgaccagcttggaggtgatctccacggaggtgccatccatgtgcttccttttgatatcaacttgtatgcatctgaccatcaaggagaaatacatccaggtaaccttgtaaacatgaatagaaaacaattgatctttgtagatatggcttgcataaatcactctaaaatctttgccatttctctgtaaaaatgatctataacatgtgcattgatgcaattgctatcttcttggaacaaaattgatctttcataagattgagaaaacaattaggacttgattttttttctttgatatttaccaactcaattctgtctttgatatttatacatgtatctacctacaactaatcatgatatgctagattctacatggataatttcctttacagtactggtattgagctaaattgtttgtagctcaagcaacatcatcttaatataaagtaggaataaacatgagaaatcagaaagcaagaccactgttttcgtctatttgtaaaatcatgaactggaataaaaaacaaacaacttttgtatcttcctttctaatgtcataatttcagctagtactataaaagaaagttagattgtacctccaatgttgtgcgcaaagagctctgaacttcagcacgatatatggaaccatggaccaatatagaataatctgcatggaaccatggatcaatatagaataatctgcatgcaaaaattattgtttttggacatgtgttaacggctgttaagtactgaattaatgccgtcaatacttacataagaccataaatataaaacatccaatatagtggtagagtttatttctaacaatttccatgagtgttgctgtatattcctatgcaggtgacaaactaccaaagttgagaggaaatatacatgaaggtggaggagaatcaaactcgtatccgaacttatggagttttggacccagaaacccaattaaacacctccaaatggaccaaacattcataccaatggatttaggggcctaaaatgagtgtccaggccgaaaaccgaagcgaacggagccgtcccaggttcggccgaaccctgagtacggatgaaccctcacgaaggccgttggcccaggccaaagttgcgtttggtagcaatccgcttaccaatgacggttatggccattttcaccggtagaaaccgtcataacatggacacttgacaacacaagagagaagatgctctttggatgcttggaggatctccactctctcaagtcacctccacactataaatacccctctcctccctcattctcacacacaccaaagcatgagctgaattataagaggctctagtatactttattgtatattagattagggagagagtaaggtagaagaaatcggaggaattacggagttgtcggtaatcttctcttaattctgtatcttgttaattactttgctttaatagaaatatcattctgagtaattaagatttacttagtgagaattactttttggttagttcctaattagcgtacaggatcattgttcactatagtttattaatttatagtgattgctttagtgtttgatcggcactagagtagttattaattgcgtagacgcggtgtctaggtaattaatttccagtggttgctgcgtatcccacagtacgtttgaggtgggtgtagaggtggtgacagccctcaagagaacttaagtcctccctgtccaggtacgtaatagagcaacatctggaaacagcgggttgccagtgcctgaagtattgcgttaggattaaaattaagctttccctagacactgtttcttattaggaaatcctctatgccctctgcccacattagctttgtgtccttggatgaacctgacgatgagttgaactcacacgttccctatggaaatcgatactctggaatactcccaggtgaagtgttacatctgtatcttctgtgcgcttgcggattctatctataacgttaagaaataccaacaacatggtactcacatggtatttgttattgtagacgatgccgatgccatggatcaagttctgcaagtaaatggaggtcacaaccataatgcctttccttttgatctcaactttgatgccgatgaggaagacctacaaatgcatccagacatgcaagagtatggcgtgtatgcgggtgatgtggaagttgttttcgaacaagaggagttggatgattcagatcaggaagatgaacaacaaaacaaaaatctgaccaaaatacaaaggcaacaaatatatgcagcattggctggaaaaactaacaatggaaccctaagaaaaaatgctacaactgaagttgcagcaatgtttaatgtgaaaagggctagagtgcaagcaatttggtgaagagtgaagcaatgtcgtgccaagggaataccaatcgatgtaaggtctaggaaaaaaaagaattgtggtcgcaaaaagaatgaaatcaacctgacagatgttgctaatgttcccttgcaactaaggagcactttacggtcatttgcatcagcctcaggtataccaaagaacacgctgcacaggatgttgatagaagggctgctaagacgtcactcaaacacactaaagccattgttgaaggaagagaataaacaatcaaggctgcggtggtgtctttccatgttagattggcatactttgccaaatgaacccaagttcattgatatgcgaaacattgtggacatagatgaaaaatggttcaatacaactaaaaggacaagaaccatttacatggtcaattgggaggatgatccatacagacctgtccaaaacaaaaattctattgataaagtgatgttctcggcagcagttgctaggtctagatacaatgaagaaggtatctgcacttttgatggcaagataggcttgtggcctttcaccagaaaggaaccagctcaaaggacaagtcatattagatgaagggggactctagtcaccaagacaatcaaggttgatcaagataccgtaaggtcatttctgattgctaaagtcctaccagctattatagcaagttggcctcgagaagaagcacacaacactatatggattcagcaggataatgctccctctcatgtcccagtggatgatactcaatttgcctatgcagtttcccaaacaggtcttgcttgttagaggttacgaaagctgatggtggaaatggatacaagattcctcatatgggtaaagagaggctagagcgtctagacattctccccaatacacttagttgtggttttgagctatatgataagattccggcagttccgacgctccagtttattttgaagtggtcgccgaggtcccgtcagctgaagagcaaggcaattcatacatatatcattgattatattgagcctatttgcaaaaacccatgcttttctctcaaaattgcattacttttgtaatgtcatgtgggatggttttacccatacttagcctttgttaccctgagtcattgatagcttgggttaataatttgacaagatgattggtctaggattgcttagccatgcttagatcaactatctcacattgggattcactataatatagtccttaatttgctgttgcc

SEQ ID NO: 15307 - DNA, 995 bp, Oryza sativa
  ref <308>: DATABASE ACCESSION NUMBER: AK065836
  ref <309>: DATABASE ENTRY DATE: 2001-12-06
ggtcccccctcccaccccctctctcctctcctctccaaccacgccgcgattcccccatttttacctcactacctccgcccccgaaaatcccaacaattttttgatccttcgccgccggcaagcgccgcggagggttccccccaggtaagccacgcgctgtcgcctccgctcgatcgccccgcctcctgtccccgccgctcgccgcgggcgtcgctccggctcagatcgaccagatctcgatcccgtttctagggggtttggctcacgttactgttcgtgcagggagtggagaggagaggagcgggcgggttggtgttgggaagggagggatggggttggaggaggacacgccggtgacgaagacggtgaaggccgcggcgacggggctggccgcggggaccatctggggcacggtcgtcgcgacatggcacgacgtgccccgggtcgagcgccacgtcgcgctcccggggctcatccggacgctcaagatgtgcggcagctacggggccacgttcgccgccgtcgggggcctctacatcggcgtcgagcagctcgtgctgagccagcgcaagaagaacgactacgtcaacggggccgtcggcgccttcgtcgccggcgccaccatattcggctacaaaggaaggagcatcccttctgcgctcatagctggttcttgcctggcttttacatctgctgcgctggacgttggcggcaacactaccagagtggacaatggcaaagagtactatccctacacagtcgagaataagcccgctcattgactgaagttctgtacgtgtagcccaagtcctgcaaaaccgtcagctcggtgaattttgaagctgatgcttactttcatgtctgttttgttgatgtactagctcctttgcaaatccttggcattgttgtgctcgagagagacctatacaacagtctcggaataaatatttttgcttgctttatcgtgatcatcgatcacaataaacgccttcact

SEQ ID NO: 15308 - DNA, 1143 bp, Oryza sativa
  ref <308>: DATABASE ACCESSION NUMBER: AK065837
  ref <309>: DATABASE ENTRY DATE: 2001-12-06
gcctcgccgtcgcccaccccttccgctttccgccgccgccgccgccgcagcagcagccatgtcgtcgtccgccaccggcgtgaacgtctccgaccgtccgatttccccggacaccacccgcgtcgcctgggtcgggacgggcgtcatgggccaatccatggccggccacctcctcgccgccggctacgcgctcactgtctacaaccgcacggcctccaaggccgaggggctcgtctcccggggagccaccctcgcggaaagcccgcgcgcggccgccgccgcagccgatgtcatcttcctcatggtcggcttctcctccgacgtccgctccacctccctcgacccctccacgggtgccctcgccggcctcgccccaggcggattgctcgtcgacatgaccacttccgaccccaccctcgccgcggagatcgccgaggccgcggccgccaaaagctgcgccgccgtcgacgccccggtctccggcggcgaccgcggggcccgcagcgcgacgctctccatcttcgccggcggcgacgcggccgtggtcgcccgcctggcgcccctgttcaagctgatggggaacgcgctgtacatgggcgggccgggcgccgggcagcgcgcgaagctgggcaaccagatcgcgatcgcgtccaccatggtcgggctggtggagggcatggtgtacgcgcacaaggccgggctggacgtggcgaagtggctggaggccatctccacgggcgcggcggggtccaagtcgctggacctgtacgggaagcggatgctggagcgggacatggcggccgggttctacgtgcgccacttcgtcaaggacctcgggatctgcctgtcggagtgccaggccatggggctggcgctgccggggctcgcgctcgcgcaccagctctacgtgtcgctgctcgcgcacggcgagggcggcctcggcacgcaggcgctcatcctcgccatcgagcggctcaacaacacctgccttgacaagaaaccggagtgagctctgctcaggctcagctcggttagatgtgttcgatcgtgtaatggaatggttggatgattgcttcgctctgtctgtttacagtacagtggttaaaagattcagatcaataaaagaagcatacgtggtgtttc

SEQ ID NO: 15309 - DNA, 3101 bp, Oryza sativa
  ref <308>: DATABASE ACCESSION NUMBER: AK065838
  ref <309>: DATABASE ENTRY DATE: 2001-12-06
gatttttcctcacccacccatcgcctcctctccgccgccgccgcctcgtcgccgttgacgccgccagcccgccaccgcaccgccgcctctctccccccctctcccctccgcgcgctccctgccactgcgcccccctctctcccgcgccgcgcgccacgggctgcaagagggagagggcgaggcgaggtggcccctcctccggccgccgccgcgctctctctctcactcgccgtgctgttgggcgagttacttgctccctgggaggtggctctcccccctccaggatcctctccggcggctgccggcacgcttctctctcgtgtgctagatttccgtgagctggtggttcggaagccctaacgttagcttggttggaattctccgggcaagctctgttcttcacgtaatggaagaaactagcattgctattgagattgatggggaggcgatctgtctggacagtgtaggagataatgaggagcaaggaactcaggagaaccaagagatacaaataatttatgatgctgaaaatgagggacaagttgctttcgacaatggagaacagggaaaggaggaacatcccatgaggaatgaagaggagaaccaggaaaatattcctgtaattccaagccgtgaggagttgactgaagaattgcggaacaaaattgccaatagtgaagaagaagcttacaggctgtactgtgactatggacatcgtatgggctttagtgtgaggaaggggaaacagtactactttacagggaccaaaactattcgtacaaaagactattactgctcaaaggaaggtctaaaggacgatgagcagcttactgaggcaaactttaataagccagacaccagaactaactgtaaagcaatggtccgttatagagttgattcggaaggccattggcgagttattcagattgttcctgaacataaccatgagttggttcgacctgaagaggtacacttgctgagatcagtgaggactctttcaattcctaagcccggtgtgctgaatgcaatggtaaatgctgaaatacaagcaatgcatgaaaatttgcacatgaatgatgatggtgctgaatgtcagagtcagcttggcatccaaagttacactctgcttgaaccagaggactctgaggcacttgtaggttatttcaagcgtagaacaattgaacaaggtatgttctactgggatgtgctggtagaggatggccgaatgacaaattttttttggagggatggaagaagccgtgttgattacgactgttttggagatgtcgtggtgtttgacacagcatatcgtaccagcaaatataatatgatttgtgccccatttgttggtgttaatcaccatggccaagatgttatgcttggttgtgcacttctgttagatgagtccctgacatcctatgaatggttgttcaagtcattcttagattcaatgggtggccatcctcctaaaacaattttcactgttatggctgaaactatatccaaggcaattgaaggcgttctccctgagacacgtcactgcatctgtcaatggagtattgaaaagaacctacagtcccatttaggcactctaaatgtttctggaacatttcatagcatgttgacaaaatgcatgagagaatgtgagtcagaagcagagtttgaggaaacatgggcaatgatgcttaacgaatgcaatatgcaggatgaccaatggctctctgatctgtatcagcagaggcgtaaatggtccacagttcatcacagggatgcatttgatggtggaatcaattcactcgataggagtgatagttcaaacaatgtcctgagcagcattgctaatgaatcaacttcacccactcaatttattcttgactttgataaattggtagggagttggcgtacaaatgaatccgccgaggacattcagtgcacccagacatccccagaatctagagttaagcataggagtattttggagcatgctgctgaagtttatacgcgcaaagtctataaatctcttgaaacagaatatctagatggatgcagtgcaacttcataccaggaaatgcagtgtagtgaaacattgtaccggtttgagttcattttgcaaagaagtggcccaaaagttcaggtagtttttcttgacacctctaccatggaattgagctgtacttgtaaaaaatttgagacaacaggcatactttgttcgcatgcaataaatgcacttgatctcaagaattttgatagaattcctgaaaggtatgttttaaaacggtggaaaaagtatgttaggaaaggaacatatctatttccatctgatgagtttgtgggacaagattgcacagaacctgggcttgcatttcgtaacaaagcaatgcgatttgtgtatgatctgttgatgaagagcaaaggtcatcaggatacgaggaaacttattctggatgtgtttgaaaatggagaaaaattagtagaaagcctatgtgaactcaagagattgaatgcccatgcctctggaagagagaaagatggaagtaaggttgaaaagcggaagaaaaaatcagccaagcaagaaaaaagctcaagaaatgttaaacaagcagtttcatctcagacagctgacacagttttagttgatccaccaaatcaaaatcaatattttgcaacagaagatatggcaacaaactcatctatcggtagacctttcttctaccaggggtttccttctgctggtgtttcaacaagtcagattcaggggcatacgaatattcattctgtgcctcagtgtgcaccacaggaatattcagcctatggcgcagctcatcctcctccaacatttggtggtggaagaaatttctgaagaatgtagagcattgatgtgtgaatagctgaagttcatattctttgacatattgttgtatgtgcatggtctaatcgaacgattttgctaggcagtagtcaccttacctagcagcaatagaagtaggcctctccttattgtataaattattgaatttgctaattgttgtactagttgtaaatttgctattcactagttgcatgaagtaaaaaaatattgtgctgtagggaatagatgaatt

SEQ ID NO: 15310 - DNA, 1844 bp, Oryza sativa
  ref <308>: DATABASE ACCESSION NUMBER: AK065839
  ref <309>: DATABASE ENTRY DATE: 2001-12-06
gtcaaatggaggtgctccagttggcccaaaggtcaaggccagcagtcgatcatcaccagattctagagcaactaatgttcaaggaagggaagatataagcaagattagcagaaaacttgcaactcgggatcctgagcggagaatggttgagagaaatgggattaaccaagggaagaataacaatcaagtgggcatggcaagttcgtccaatgtgcttgtgcaaaataacagaaagcaaaatgctatggttaagcacaaggtgaattccaagccaccaacacccaaccggcaaagaagcaacacacattcaataaatggcactatgagaaaggttgggactgccggcacaccgtctgaaaacaatactcaaggtaacagaaacgtggaattgcggtcaactggccatgcaaatagaaggcaaaattctacagccaaatcaatccccaagccaggaagattaccagatgggaggatacattcagtgaaaacccgtccaagtgataaagatattgctgacagaagccaaaggcgtgttcggcacaatattgtaatagatgagcaatcacctttttccatgaacaagaagaaaattagcactgatattgtttcattcacattcaccgcaccagttgataaaccattatctggttatcgcctacccaatcatttagtggaaaaacagtttatgaaaaacgcgagctcagtaccaaattcaagcgagacatcgagtgctaaatttgattcaattgatggtgattatttgggtctccttttagagcagaagttgagagaacttacttctggggttaggtcaccctactgtaagccagccaaagatgttcggatatatgccccatcatcagtactggaagattcacaatcagcatgtgaaacatcgagcattgcatctactgattatgatagggagtccgtccaatcctataaggatggaaaaggcagtttcacccagacagatcttgcatcaaagagtggtcagtcatctcaatctgtgaagtatgataatgatgccatggatcaaatggagatagagcgccttcacctcagtcccctttcaacatgggatgcttctgtttcaactgaaaccggtagctcaacagagagctggagaagcgcaaatggaaccaaagtatttagctcaacggaaggtgcaacaacgtctaattctgcatgcttcagtaaattcctggaagctgacgctttctcggagtattctgacacagcctcatcaatcactgtgactacgacggatatccccccatcagatagcagcagttcaagccgaatggattgcagacaggagattgatttcataagagggcaaaacactccgaatgaatcggaggctgctcttcgaatgtgtaaacgagatactgagtgtgagatgtgcatactatttcaatgccggctacggctcatggttcttggggatggcaattctgaagaagctcacagctgaagaaatctatgcggagatgactgatctgaaggttgctgaggagtggatggtggatgaactcgtgtacaaagaaatgagtagtcctctggggagctgggtagatttcaagttggagtcatacgaatctggcattgacattacaacagagttgcttggttccttgatcgatgaaatggttgctgatctacttctagtgtctgacacttctttgtagcaggtgttcttttcccactaatgataccagtttgacagccacaaacaaggtttttgttccatatgttggtctcacaaattgtaaattggtagtagttcggtcatgcaactgtgcatgttttgtcacgaaagattgataatgttgctactaacc

SEQ ID NO: 15311 - DNA, 2240 bp, Oryza sativa
  misc_feature (1186)..(1186): "n"=any one base of a, t, c, or g
  ref <308>: DATABASE ACCESSION NUMBER: AK065840
  ref <309>: DATABASE ENTRY DATE: 2001-12-06
gatcacttccatagatcccctcctcttcttcctcctgctcggcttcctcacacagagcttctcgttgcattagccgacggaggccaccggtgaggagagcccgaggaggagcaagaaatgtctggcaacgacggagacatgaagatgagggtgatcgtcgtggaaggcgatgagacgagtaacgccccgaaggatgtatgctgcgagtacaccctcgatggctccgtggatatcaagggctcaccggcggtgaagggcaagtccggcggatggctcgccggcggccttattcttctgaaccagggtctggcaaccctggcgttcttcggggtaaacgtgaacctggtgttgttcctaacgtgggtgctgcagcagagcaacggcgacgccgccaacaacgtgagcaaatggaccggcacggtttacatgttctccctcatcggcgccttcctcagcgactcctactggggccgctacaagacctgcgccatattccaggccatctttgtccttggcctcgcgctgctgtccctgtcgtcgcggctgtacctgatcaggccggtcgggtgcggcacggagcacgtgccctgcgagccgcactccggcgcggagctggggatcttctacatcgcgctgtacatgatcgcgttcggcaacggcgggtaccagcccaacgtcgccaccttcggcgccgaccagttcgacggcgaggacccggccgagtcgcactccaaggtctccttcttcagctacttctacctggcgctcaacctcggctcgctcttctccaacaccttcctcagcttcctcgaggacgagggcaactgggcgctcggcttctgggtctccaccgccgccgcggccaccgcgctgctgctgttcctcggcggcacgctccgctaccggtacatccgccccagcggcaacccggttggcaggatcttccaggtcgcgttcgccgcgtgcaggaactggaaggccggcgagtcgccgggcgccgtgacactctacgagagcgacgagaaggcggattccggtgggaggaagctcctgcacacggaaggtttcaggttcttggaccgtgcggcggtggtgggcgctaacccgaagcttggcacgtgcacccaaccgcgtgacccctggaagctgtgcacggtgacgcaggtggaggaggtgaagagcatcntgcggctcctccccatctggctctgcaccatcctctatcggtcgtgtttcacgcagatggcgtcgctgttcgtcgtgcagggcgccgcgatgcgccgcaccacccggttcccgggcttctccgtcccgccctccagcatgtcggccttcgacatcctcaccgtcgccaccaccatcttcctgtaccgccgggccgtctgcccgctcgtgtcgcggctcacgggccgccacaccggcccaaccgagctgcagaggatgggcctcggcctggtgctcggcgcgatggccatggccaccgccggcacggtcgagcacttcaggaaggccggcgccaccacggcgatgagcagcgacctgcacatcatgtggcaggtgccgcagtacgcgctgatcggcgtgtcggaggtgatgatgtacgtcggccagctcgagttcttcaacggggagatgcccgacgcgctcaagagcttcgggagcgcgctctgcatgatgtccatgtcgctcggcaactacttcagcgacgtcatcgtgagcgcggtgaccaaggccaccgccgtgcgcggccgccccggctggatccccgccgaccttaacgagggccacctcgacaagttcttcttcctgctcgccgtgctggccgtcgcggacttcgccgtgtacctcgtgtgcgcgagccggtacaggagtggcacggtggacgtcgaccggagcgacggggaggaggaggatggcgtggccggcaggcagatggcggcaacggtgtaagcgtcaggatgaatcggccgtctgctcgcgctcgatagatgcatggcaggctgtcgtggttcttgagacggagactgcagactcttcgaggggatgagttgcattgggacgagttggtttagcacgacaagtctccgttgatgataggacatgcacggggggatagtgacacgatactaaagaataagaggtcgcctacagatgcagtattgttctatcatgtacgcctgtgtttcatcgtttcacatttttctggccaatgtaacaagagaacgcgactgttactgacc

SEQ ID NO: 15312 - DNA, 1838 bp, Oryza sativa
  ref <308>: DATABASE ACCESSION NUMBER: AK065841
  ref <309>: DATABASE ENTRY DATE: 2001-12-06
gaaacagacccctaatctcgtcctagctccaaattgaacgagccacgacccgtccgagaggtgtatcgtcggcggcgacttcatccgtgggcagatcgacctccacaagcttcgcggcgaggtctagtctagacgaggtcggcatcaacttcatcggtggccgtgcttcccccttcatcccctctgcttggacggggatccaccggccagatccggcgcatcttcaggccaagggtgagctcgtcgccctcccctcttgggccaacgtggattcccggtgactggatccgattcattcagtaaaataattggaggaatccctccaaacggatccgatttctccctgccatgtcgcccttgggaccttgtgcaagccccagctggtccgacctctattgatctcctcctaatcatcctggaacgactggagcttcctcatgcacttgccttcgccgcagtctgcactacatggagttccgccgccacggctgccggtgtcccacgttctcgcactccatggatcatgtcttggggtaaccacgttgataaaaggctggacgaaaggcgccgctcggcggtgacctgcaacctctaccaccctgatgatgcagtcgacaagatctatagtgtcagttttccaaagggctcctttgttgcgtgctacggggcctctcacggctggctggttttggcgaatgatctctccaatctcgtgcttcacaaccctgtcacactggccatgatccccctcccaccgatcaccgatttcgcttgcgtggaggcggtctatggcagcgaagaagggaacttggaacactaccttttggaaacaaacagcaggtttgaagcatatcggttagggatatggttctaccaaaaggcagtgctgtcttgcagtccatccagaggcggtgactacgtcgtgatgatcatccacaacaacggcgagtggctttctttcgtcagggcaggacagagcaagtggcaggtggcttcaactctaagtgggggagacagatatctcgactgcgcgtaccacaaagggaggttccacgccgtgacattgcacgggatggtggagaagtgggatcttgatggagcgagcaatggaccaacaagggaggttttttatgccgcaaggccctacggaggattaggattaatcctcactcggcatctagtgtcgacgccatggggtgatctcctgcaagttcgtgcgattctcgcgcatcactacccagatggtatagcattccaaatctgcaaagttgatccggatggatgcaagggggtggtgcaggagaatgttttgatggatcatgcactattccttggattgaatcactccgcatgcttacccacccagaatttgcccgggatacgacctcactgtatatatttctcttctcccgtgataatacatgcattcgattggcttcttggactacgtgtttggggaggtgtaaggacgtacgacctggaaacaggaaaattcgagcgtgcagttcccttttgtgatgttaaagaacagatctacgggttatttccatctgaggtttggatcactcagaatttgcaataattagaaaacaagattgttatctgtttagaagcatgtctatggacattatagttaggtactcactatcagttttaagcttgtatcgatcatttttatggtaccctacttcaagattcggaacattgagatcgatattcatgtgttgatggcggtgtacaaatctgtttctgattgtatttgttgtggcagtgatgtcagatttgttttgtggtgggagattgctggtgattgcttttgtgatggcaggatgtactct

SEQ ID NO: 15313 - DNA, 1216 bp, Oryza sativa
  ref <308>: DATABASE ACCESSION NUMBER: AK065842
  ref <309>: DATABASE ENTRY DATE: 2001-12-06
agaggagaagggggcacgccgccacgccatggcaggagaggaaatcggcgcgagcgaggagcacgggtgcgccgcgggaggcgagcccatgaacgactacgagaggcagcggctggcgcggattcgggagaacgaggcgcgcctccaggccctcggcatccgccggctcgccgcgtcccctctcctccacagcccggcttcatcggcggggggcaaggggaagcggaagagccgagccgccgacgcggacgaggagtacctcccgtccgacggcggagaggatgatgatgaggaggagagctcgtcgaccagcgaccaggatggcgaggaagaggaggacgccgaggcttcctctaggtctcggaaaaagggaaagaaaaaggtactgaactcaggaaagtcttctcaagttacgcatagaaaagagaatgctcacctcgctgattctgtggatgatgatgcagccttacagcaggcaattgctctgtccctggcagaatctttagaaaattctgtgccagcaatgagtggagaaactccaagcacagggatgaaaggaagtggtagcacaccatgcaaaaagaataatactgtacccattcaagactcagctaaaaccatgaggataaaaaagcagggcaagagcaggatacaactgacagaagatgatgtggttgcattcttcttttcatttgatgaagttggaaaaggatatatcacgccgtgggatcttgaacgaatggccacagtgcatgatttcatctggacggattctgagatatcaaagatgatccattgctttgatagtgacagggatggaaagattaaccttgaggatttccgcaccattgtatcccgatgcaacatgttgcaggagcctgagaagtcaggatgagataacgagacacgatcggtcgatcttgttcaaagattcaagctcttttctttttgtggacagtgccttttttcaaagcctactgcatgagtgttacaagaggcgctgattgtgcatatgaaatgaggcaatgaaacccagaacagcatgagcatcaagttcaggcttcaagctgactaggttattgctgttctgcactactctcccatgtaaactaatgtctgtaaaactaactatagaatatgcgttcgtcatgaagttgtaagactgacatgcaagttgttccatcgaaaagcgagtgtccctattatattctgcctt

SEQ ID NO: 15314 - DNA, 1261 bp, Oryza sativa
  ref <308>: DATABASE ACCESSION NUMBER: AK065843
  ref <309>: DATABASE ENTRY DATE: 2001-12-06
ggaccagtagtggcatcggcgcatccgctcctccccttccttctcttctctctcctagtcgtcgccggcggggagcgagcgatgctgacctcggggctgctgcggccggtcgacgatgcgcacgcgatcgacgaggcggcgctgctgcgctacgcggcggagcacgtcgccgggttcccctccccggcgcgggggctggccctgacgcagttcggccacggccagtccaaccccacctactgcatcgaggcctccgcccccggcggggtcaccgcgcgctacgtgctgcggaagaagccgcccggcgccatcctccagtccgcccacgccgtcgagcgcgagttccaggtcctcaaagctttgggcacttacactgatgttcctgtccctaaggtgttctgtctttgcactgatgcaagtgtaattggaactcctttctatataatggagcatctagaaggactaatatacccagacaacaagttgacgggagtaactccaactaaaagaaagactatatatcttgcagctgctgaaactttggctgctatacacaaagttgacgtgactgcaattggactgcagaagtatgggagaagagataactattgcaaaagacaagtagaaagatgggggaggcaatatctctcttccactggtgaagggaagcctgctcgttaccagaagatgcttgatctagctcattggttgaaagaacatataccaaaagaagattcatcggcaggatttggaacaggtcttgttcatggtgattaccgtgttgataatcttgtttttcatccaacagaggaccgagttattggtgtacttgattgggaactatctactttgggtaatcaaatgtgtgatgttgcatacagctctttgccgtatattattgatgcaacaactagtacaggttattcttatggtggatttgaatatactggcattccagatggcattcccccactggaagagtacctcgctgcatactgctctatctctgcaagaccctggccggctgcaagttggaagttttatgttgccttttcgctttttcgaggggcatctatatatgcaggagtatatcacagatggactatgggtaatgcttcaggtggtgagcgtgctagattttctggcaagattgctaatgctatggttgaccgtgcctgggatatcataaatagagaaaatgtcctgagagaacagcctgctaggggtatgcatgcctcaaatggcccatcgcaagaattcc

SEQ ID NO: 15315 - DNA, 2065 bp, Oryza sativa
  ref <308>: DATABASE ACCESSION NUMBER: AK065844
  ref <309>: DATABASE ENTRY DATE: 2001-12-06
ggcggattccagaaggttctggaagcttctggggcaccccacgcacagccgccggcgcccggcccggtgccggaagaggctgcatgcatgagtagtcgcgccgccgccgtagaggagcagcatggggatggtcaccgccaccgccgccgccgccctcctcgcctcgccgccgcagggtcatcttggaaggcggtgtcacctcgtggtgcccgggctacggctgaggccgccggccagctcatctcctccccacgccgccccgccgctcaggttaagcaattttgtcccaaggtgttacatcacaaatgttgaggttgatgttagtcatacgagtgaacaagaggctctagatgatcacccaccattgttgccagcctgcgccattccagttgtacacctacgagatgttccggatgctagtccttttcccctgcatgagagtgcttcccattctactgattttgaagagctacccgtcttgtctgagggtgagctacatactatagcggccacccctgcccaccctgctggattatatgctctatacgctagctacttatttggtaacttggtggaacaactttggaattttgcttggcctgctgcactggcaattctccatccaagcctattgcctgtggctattgtcggtttcttcacaaagctttcagtctttattggggcaccaatagtagggaaacttatggatcatttccctcgaatacctatgtacacagggttgaatgctgtccaggtagccactcagttgatatcagctgcaatggtcatctatgctatgaagaatgtgacccatgcatctacgtccgccgtagttctcaaaccttggtttatcgcactagtggcagctggagctattgaaaggcttgcaggattggcactaggagttgctatggagcgggactgggttgtgttgttagcaggaactaacaggccagttgcattagctcaagctaacgctgtgcttaatcgacttgatcttgtttgtgagactgttggtgcttcagtttttggccttctgctgtccaaatatcatccagtaacctgtttgaagattgcttgtggtctaatgatatgcagtttccctgtcctggttgtgttgggtcaactgattaacagattctcctgccatgctcttgattcctctagaaccccgagtgaagaatctatctgtgccaatctattggatgttcgtaagattgttcaaaatggcttgagtgctatcagaaatggctggaatgagtataagcagcaaacagttctacctgcaagtgtagctaccgtgtttctaaatttcaatgtagcacttgctcctggtgctataatgactgcgctattgatgcatcgtggtattagtccgtcgattgttggtgcttttagtggattgtgttctatcatgggccttgttgcgacattcatctcctcaagcttggtggaaagagttggaattctaaaggcaggagcagctggattgatagttcaagcttcactcttgtcggtcgctctcgtagtgtattggactggttctatttcacagaggacacctctacttatcttcctggctgctatcgcattatctcggttggggcacatgtcatatgatgttgtgggtacacagattctccaaacaggtgttcctgcatcaaaagcaaatcttattggtggaatggaggtctcaatatcaagccttgcagaactagtcatgcttggtatggccatcatcgcaaacgacgtttctcatttcggtttcttggcaatcctatccgtgtcatcggttgctggtgcggcatggatgttctgccagtggttgggaaatcctacagatgagcagagggaactgttcatgtttgatccccatttccaagttgaaccaatgtaagtaaaaaaaaaaacaccattcatgccatcaccttgttaagaaagatactagagttcagagtatttgacttccatactggacgtagcaagaactttgtgccacttctttttcccaatttaccatatgatcttgaatattgaaattacaaatatcaaacgttacatcgcc

SEQ ID NO: 15316 - DNA, 1240 bp, Oryza sativa
  ref <308>: DATABASE ACCESSION NUMBER: AK065845
  ref <309>: DATABASE ENTRY DATE: 2001-12-06
ggtttccacttctcgcggcaaaaacctccaccggagacacggagcagataaggcggccaccccgccctcgacatcgagcgaatcgaggcttcaacggttaggctattggatgaggagaaaagaatggttggtgtggtatctgtaagcgaagcagtgcagattgcagatgaaaatgatcttatactggcaatattatcactcgatggagatcctccggtgctccgactattccaagagaaagattacaaaaagcacaagtacgaacaacagaagaagaaaagaactcagcagaaaagatctgttgcaaaacgcatgggcttgaaagagctgaaaatggggtacaacattgacattcatgattacagtgtgagacttaaagctgcaaggaagtttctgaaagctggcgacaaggtcaagataatggtaaacttaaaaggcagggaaaatttgtataaaaaacaagctatcgaacttcttaggcggttccagaatgatgtcggtgagatggcaacagaagaaagtaaaaattttcaggaaaggaatatatatcttgttcttgttcccaataagatagctatacaaaaagagcaggatgagctgaacaaaaaggatactgcgatagaagacagtgaccaatcagatgaccaaccagaggagagtgaacctgtgccagcacaaccggaggaaagcaaggagactgagacagaagtctcagcaaatgtttgattgaaccataaagtcttggggatgtcttctcagatttcgtaaggtactgttaaatgcaaggctgctgctgctgtatttaactccacgcatgtagagttttgcccagacggtcacacagaacaaggatcaatatcgtcaagaagctgaaactttgtcatttcagcattgcagaatgatacttccggagctgtgaatcctcttgaattgcacagaccaagctggctgtgaatcgtgagactagaagcatgaatcgatgatacgaaggtttgcttgtagctgtatcacccatagcagtgtagttgatatttgatcacacgattttgtttgtgctttgccttgttcccttcccagtaatgctgtagagaagagtaattgtatgtatctactgtcaaatgcttacttcggattttgacctttgcctgcaacaagagcctgataagaggctgtgcgattttttgtcttcttttttgcatgagaagtaccaatatcattctggtttgaactgattatctcg

SEQ ID NO: 15317 - DNA, 911 bp, Oryza sativa
  ref <308>: DATABASE ACCESSION NUMBER: AK065846
  ref <309>: DATABASE ENTRY DATE: 2001-12-06
ggataaataacaccccatgcatgcatttcaccatgaccaaaccacgcctaaacctagctagctaataagctccaaggctccaagcaaagtaattaagatgaccatgaaagtgaagagcaccatgatggctgcttccatgctgctcttcctcctcgtcctcgccggcatcgtcaccgccaccaccaccaccaccgacagcaacattcgcctccccagcaacggcgccgccggcgaaaccgatggaaacaaacaggcgaaatccagaccgtgggagtgctgcgacaacatcgagatgtccgtgctcaagatctacccgccgcggtggcgttgcaacgacgaggtgaagcagtgcgccgccgcctgcgagaactgcctgcagctggtgcccggggccggcggcgaagatgtcgtcttcgtctgcgacgactggtacccgaccaccaaccctggccccgtctgcacgccgcggccgtggggcgattgctgcgacaaggccttctgcaccaggtctctcccaccgatctgccactgcgccgacgaggtggcgtcgtgcgccgccgcctgcaaggagtgcgacatggtgaattcgtcgtcggagccgcctcgctatatctgccgcgaccacttcaccggcgagcccgggcccatgtgcgcatgaactgattaactatagctagctatatcaagctagctgattatattgatcctttcaccaataaatatatgttcgcgtcgttcgcgatcgatcgaacgatcagtctgcgtgtgttctagcttgttcgtattcgtacatacgtacgtgtgtacaatttgtctgtgtgttgtgtctatcgtgtggtttgatgttggtatgcgtgttatgtcatgtgttacgaagttatcatgataaataaaagacgaatgagagatct

SEQ ID NO: 15318 - DNA, 1886 bp, Oryza sativa
  ref <308>: DATABASE ACCESSION NUMBER: AK065847
  ref <309>: DATABASE ENTRY DATE: 2001-12-06
ctggggtgagaggtgggaagccaaagtgggagaagcaaaaatattctcagggcaggtaaggtaagcgaaggcgagaagagaagagacgagaagagaagagagagaaggggggatgagcgcggcggcggaggaggcggctgcggcggcggcggcggaggaggtggagggggtggaggcggggaagaagggcgtggcggatgcgaaggggaaggggaaggagaaggtggtggtggcggaggaggattctgcggtggcggcgggctccgggggaagcggaggcgggaggaggacgttggtggcgtacccggcgcgggttgcggggtacaaggacgtggtggcggacgcggcggtcttcaggagggcgctcgaggggttgcacgcccagatggggacaaagctcaaggtgccaattattggtggaaaagaccttgatcttcatcagctgtttaaggaggtcacttcacgaggtggcattgataaggtgaagtccgataatagatggagggaagtaacagcatcatttattttccctgctactgcgacaaatgcttcttttatgttgaagaaatactacatgtcactattataccattttgagaggctatacttgtttgaggcacaaggctggtatcaagaaactgattccagaagcatttcctgtatagaaatgaaagctgaaggtcaagcttcccggaaaaggaaaagaggaagcaattcttgttcttcagacctagctgcttctttggataatgatgtacaagtgataattgatggtaagtttgaacatggctacatagttaccgttatcatgggctcaaaatcaacgaaagcggtactctataattgcaccgaagaacctgcagtgccaactgcggtgcctcatgttgcaattgacagcgctgagggcatacgtcctcgccgccgccgccgtaggaagaagttaagtacaacagaccccaaccatcctaaaccaaacaggagcggctacaatttcttcttccaagatcagcacaggaagctcaagccagaatatcctggacaagacaggcttatcagcaagatgattggtgaacgatggaacaatttaggccctgaagataaagcagtatatcaagaaaaaggtgtagaggacaaggcaaggtaccagagacagttagctctttacagagaacagagaacaggccagccaatcagcaacgcggtgcctatccagcagagacttcctcagaaagaagtgacgattgatgaggtggactctaaagtcagtgaaggtgatatcctgctgtccaaccaaggatacagcagcagtaccagtagcagtgatgaaaccgctgattcgggagaaaaaaatgtggaagatgatgaagagtttaacacagagacatctcctgagccgagcatggaaacaacagattctcatggacagcctgatccttctgctgatggggagcgctttgaactgcgccgcagggagaaccctaagattgatgagaaacgtgacatgccacctaattaacgcttgtgccgagttgaagggaaaatttctgaaggatttttgttgtaggatcagattgctgttttgtttcactttacctttgcatcgtctctagagactgatgcgctatgctagcgcattgaatatcttctttttttatactgttagcaatttgaattgctctttcttaggtgaagtgatcacgggtcacttccgggcatccttgatgtccgataaattagagaaatgatattattttattattcactgtcgtcataggagtactgagtacaccagtttgttgctcacattagaacccattacaactgtaaagactggagtaatatttttaatagttggtagaattggttatatggcatcgaagttggtc

SEQ ID NO: 15319 - DNA, 3895 bp, Oryza sativa
  ref <308>: DATABASE ACCESSION NUMBER: AK065848
  ref <309>: DATABASE ENTRY DATE: 2001-12-06
gaacttaggtgatcggcaacctgtgtattcatttttgggattgactcctactttaaaggcttcacttcgcctcatttttttcctgactgttcaatacttgtgaatggagtacggtaatttgcgacgtcaagcagcttccttgaaaaagagcctcttcgatcaggcttgtgctctgttcatctcaaatttcaagcattatagttgaggcatatctgagactctgcaaatatatccatcagtccttttgctatatcttcttctgctatttatcattcagcaagacatagaatacagtgttttgatggacatcaccttacagtcatgccattttaattgccataccatggattgacactattgcacacagataatgaaaacaaagctaaggagaatcagattgaagcacattatattaatataagtgggttatcgatatttctgtagagttcattccatttcgtacttatccccaccccagttagcaaagaaatgctttaaaatcaacgcctttcaccatttcggaactctcttttctggtctttatcttagtttaacatgtgttaagtgtgctggtttaacaaatcgttttgtattgacagggttacttggatgagcaattttgtcaggttgaggatttgcaggatgaagcaaatccaaattttgcagaggaggttgtttccttgttttttaaggattcaaccagggtaatgttgaattttgagcaagctattgagaagcatccgaaagacttcgccagatgggacacacacatgcagcaattgaaaggcagctgttctagcattggtgcctccagggtgaagaatgaatgcacttcattcaggaatttctgtggagaagaaaacgccgaaggttgcacgagatccttccagaaagtgaagagggagcatgccgtcctcaggcagaagtgggagtcctacttccaggtaatcttcaccagccacttcgtacccagctttcattaatggcaatatatgtttgttactaaggttgtgttcacctcgttaccattttcaagcttgccaaattctagcaagacaacatagcattaccaacataaccttaccaaaataaaattttgtaaggccttaaaccaaataccacctaatgttactatatactccctccatttctaaatatttgacgccgttgactatttcaaacatatttgaccattcgtcttattaaaaaaattaagtaattattaaatcttttcctatcatttgattcatcgttaaatatactttcatgtatacatatagttttacatatttcataaaaaaatttgaataaaacgaatggtcaaacatgtgctaaaaagtcaacggtgtcaaacatttagaaacggagggagtatttcaccaaaaaaaaaaagggtaatgccaaagtttggtaagttttctttctgcaacaaactgaacacacctatggctaataaaccattcatttctccacctatctcataataaacacaacgtggctttgtgcagctgttgcgacaagctggtcctgctgggaccgcgactaggcctgcgggcaagtaagctataagcagccggctattgaattggtctcgggctgctgctgccgtggatgcgactaggctggtacacaagagcagcctgccgttgttctagtatgccactacggtgaaaacccgtatatagacgtgctacgacttatgagttgtgacatgcatgtctgcttgtttatgacaaaaataaaaccgatcaagattactacatcatcatgagattgctctctttgcccttattttgtccatgctgttgtccagattgcgatgggtttatatacagctataaccacagatgaaactgtccggctgtgtcggtgaccattgctatgctggagatagtgtgatcggccgacaaaagtttatgaaggtaatcaggactgatagccctgatagtgtgataggtattactgaactaactggaatgacaggggtgtatctgatatctatgtgatggacatgactgagctaactactactaagataagtactcctatatgcaaaagcatgagctatgttctaatcttggcggttaagttgcaaccactcaagatgtacattttgtgtttggctccttttacagctctgttacagtgttactgacaccggagcaaactctgacgacggaaaatttgaaaaccacaacctaagggtgtgtttagttccacgttaaaattgaaagtttgactaaggctgtgtttagatccaaagtttggatccaaacttcagtcatttttcatcacatcaatctgtcatacacacacaactttccagtcacatcatctccaatttcaactaaaatccaaactttgcgctgaactaaacatagcctaaatttgaaagttcaaagaaaaaagttgaaagtttatgtatgtaggaaagttttgatgtgatagaaaagttagaattttgaagaaaaagttgggacctaaaaccggccgaaatatgcaagtagtagttcctactttcacacaaccaatatggttcattccatgatgggaattcagaaatatttcctgtcaagctctcgctgagcagtgagcaccagcacgatgggaaaaagtggagtagcatttcgccgccggctttcatagatctttttttatctttttgaactttttaattttttaattttaaaactaaatatttccaagacttattttcaagatttgaacggtgtgacagtgttatttggtcacactgttctaatatagacaaaatgtctagattttgtaaataagtttcagaagtgtttattttttaaaataaaaaaattaaaaagtacaaaaagtaatttaaaaaaaatcctttcacgataccggcttgcggcttcacggaccgaatcaatcggaggtagccagtttggccactttggcgggagtgcgattaaaacctgtttgacgacgtcaactctccggcgtgccggcttaaggtagggctcatgtgtaaaagaaaaagaaaaaaaaactcaggtcgcctgcacgatgggaaagggtatccttgtaattgatacaggattcggcgtttgagtttggactctgcactctgccgcgcacgtcgtatgaatattggagcttaatcaggtcccagggattcaaacgcgtaccactattggttccgataaagatgttctacccaattggctccttgaggattccaaaacaaagaaattgtttactggagtacttcttgcgttgttcaaattatgctagactatagtaggaacaaagaacaaagaacaaaaatatgtctatgaatagttccacgcttttcaatgcttcaaagtcaagcctcaatgaggttaaaattttctattatcaaaatccaaactaactggaaagcaccaccggtgatatggggagcatcgaaagcaaatcgaagtaatttggttggggtttttacccaccaaaatttaaatcttggtgcgcatacaagttagcaatattagaaatttggtcttgtttagtttcaaactttttcttcaaacttacaacttttttatcacataaaactttcctacacacaaactttcaacttttctatcacaccattccaatttcaataaacttttaattttagtgtgaactaaacatacctttatcgttggcttctctttttaaacgtgtgttacttttttttaagatcttgttgttcatattattagatctttaaacgtgtgttactgtgttaggggatttattcatgagtgtattagtgtgatattacatgtgtagtagtttgtgtacgttaattggaaaaaaaacgaaactattcttaaaacaaattcgaattgccggtaacggcgaccagagcaaaactcacgcaagcgaagtttcaaatttg

SEQ ID NO: 15320 - DNA, 2728 bp, Oryza sativa
  ref <308>: DATABASE ACCESSION NUMBER: AK065849
  ref <309>: DATABASE ENTRY DATE: 2001-12-06
gagccgctcgtttcatttcttatcacttcccccctctctctctctctcccccctcctcctttctcccacctctcctctccaatggcttccctcctcacgctcccctccctctccctctccaaccctagcgcctccgccgccgccgcgggagccggagcggcggccggtgggcggccgcgggggccatcgcgtcgcccaactcggtgctcagcgagcacgcgttcaagcggctgcagctcagcgacgaggaggaggaggaggaggagggggcctacgggagtgacgaggagggggtcgaggcggtgggtggcggggagggggacgaggacgagctcgccattgccaggctcggcctgcccgagcagctcgtatccacgctcgagaagcgcgggattacccacctgttccccatccagagggctgtattgattccagctcttgacggccgtgacctgattgctagagcaaagacaggaaccgggaagacgctagccttcggcattcccatgatcaagcaattaatggaggaggatgatggacggagtgtgaggcgaggtcgtattcctcgtgttttggttctagcacctactagggagttagccaagcaagttgagaaggaaataaaagaatcagcacccaagctcagtacagtctgtgtttatggaggtgtctcatataatgtccagcagaacgcactctcccgtggtgttgatgttgttgtaggaacacctggtcgcattattgatttgataaatggcggaagtcttcagttgggagaagttaagtacttggtccttgatgaggctgaccaaatgcttgcagttgggtttgaggaggatgtggaaacgatattacaacagctaccagctgagaggcaaagcatgctcttctctgccaccatgcctggttgggtgaagaaattatctaggcgatacttgaacaatcctttgacaattgacttggtcggcgatcaagatgaaaaacttgctgaaggaatcaaactttatgctatcccgctcacatctacatcgaagcgcactgttcttagtgatctcattacggtgtatgcaaagggtgggaaaaccattgtgttcaccaagacgaaaagggatgcagacgaggtatcattagcactgacaaacagtattgcttcggaggcactgcatggtgatatttcacaacatcagcgtgagaggacactaaatggttttcgtcaagggaaatttactgttctcgtagcaaccgatgttgctgcccgtggtcttgatataccgaatgttgatttgattatccattatgaattgcccaatgatccagagacttttgttcatcgttctggacgcactggccgagctgggaaagcaggaactgcaatcttgatgttcacaaacagccagagaaggacagttagatcacttgagcgtgatgttggatgcagatttgacttcataagtcctccagcaattgaggatgtgctggagtcctctgctgaacatgtcatagctactttaagaggtgtgcacacggagtcgattcagtacttcattccagcagctgaaagactgcaagaagaattaggacctaatgctcttgcttctgcattggcacatctgagtggattttctcagccaccctcttcacgttctcttatcagtcatgagcagggatgggtgactttgcaactaactagagatccaggatatggaagggggttcttttctcctagatctgttactggctttctgtctgatgtttcttcagctgctgctgatgaagttggcaaaattttccttacagcagatgagaaggttcaaggtgcagttttcgatttacctgaggagattgcgagggatttgcttagtatggaactgcccccaggaaacaccataaccaaagtgacaaagctgcctgcattacaggatgatggtcctgctactgatagttatggccgattctcaaactcggaccggggtttcaggaacagacggtccaggggtggtggctcaagaggcgggcggggtggttgggactctgatggtgaagacagatttcgccgtggtggcaggagcttcagatctgacaatgatagttggtcagatgatgactttggtggcgggagaagatcgaaccgttcgtcatcctttggtggccgcgggtcatcttacggcagtcgtagctcgtcatcctttggtggccgctcatcatcttttgggtctagggacagcagcaggagcttcagtggtgcttgcttcaactgtggcgaaagcgggcaccgagcatcagactgcccaaacaagtagatggtagaaacaacactcttccctgccgctcgggagttgctccttctgggcttgatcatgttccaacaagcggctggactattcaacacatgccaaggaacaccaaagcccagtcccccttcatctgatccatacatgcccaacactattgcctgacgaagattttgcactggttagtacagctctgtgtcgtcattccgtcgtgaagattttggcacgctgaccaccaaaggagagccttctgttcatttatatgtaatacgggttttacagggacgttaaatttttgttaccacctgggagttctcaataggatgttaagattaaatgaaccgtgtgtacagctcgttcctacacgactggactggctgatgccatcagaaactgttcgcgccaattagaatcactgtccaatgtcaaacaacttt

SEQ ID NO: 15321 - DNA, 1700 bp, Oryza sativa
  ref <308>: DATABASE ACCESSION NUMBER: AK065850
  ref <309>: DATABASE ENTRY DATE: 2001-12-06
ttggtgaggtttcaaatcatctcgcttcacggtggtcgctcgcaagccacacacgcacgcacccccaccactcctcccattcgagaccccgcggggctctggattgcttgctcggaacctgggatgcactgcctcgcctgcgccgctccggccgcgcgcgccccgggcagtcgcgtcggcggcggcggccgccggaggatggctatcgagtgcgccgcctcctcccccttcacccgcgacggcgaggaaacggccccgaggtcaatgatggaaacatatggtgaaatgtcaagtaaacctgtattgcttgcgtcaaggaggaagcttgttgcattatcatcgttttgcttttgcttacattcttcaaggtacttctcagcacttgctttgggtgatccatctgttaaaattgatgatgtcactccaaagatttttccatctggtccactgtttccaactgagaaacggatcgcagagctttttgaaacaaatacttactctgttgtcaacatttttgatgcaactctgcgccctcagctcaatgtaactggtgttgttgagattcccgaaggaaatggttctggcgtagtttgggatgattccggccatattgttacaaactaccatgtggttggcaatgccctttcaaaaaaaccaaagcctggcgaagttgttgcgcgtgtcaacattcttgctgctgatgggatacagaaaaattttgaaggcaaattggttggtgctgaccgttctaaagatcttgctgttctcaaggtggatgctcctacagatctgttgaagccaattaacgtgggacaatcttcagctctaagagttggtcaacagtgtttagcaattggaaatccatttggctttgaccatgctctaactgttggtgtcatcagtggtttaaatcgagacattttcagtcaagctggagtaacaattggaggtggaattcaaacagatgcagctattaaccctgggaacagtggtggtccattgctggattcgaaggggcatatgattggtattaatacagcaattttcacacagacaggaacatctgctggtgttggttttgccatcccgtcatcaactgttctgaaaatagctcctcagttaattcagtttggaaaagttcgccgtgctggcttgaatgtggagtttgctccagatccaatcgcatatcagcttaatgttcgcactggatctctaatattgcaggttcctgggggcagtgctgcagccaaagctggtcttgttcctaccagtaggggttttgctggtaacattgttcttggtgatgtcattgttgccgtggacggtaaacctatcaaaggcaaatctgatctatcgagggttctggatgattatggcgttggagacaaggtgagcttgacaatccaaagaggcgctgaaactctggaggtaaccttgcctttagaagaggcaagtatctgatgtatttctagcagtaagttggcatccccgatctattgcttttgtaaatatcgcatttgctgagctgttcatgcctccaacctgaagcctttttcgtttgtttcttaaatactaaaacgaatcgattcagaactctctctctctctctctctcctctccatagatggtgcctcaatatacatcagagtttctgcttattatacgtcataatcctttgaagattatgatgcagtcagtcc

SEQ ID NO: 15322 - DNA, 1000 bp, Oryza sativa
  ref <308>: DATABASE ACCESSION NUMBER: AK065851
  ref <309>: DATABASE ENTRY DATE: 2001-12-06
gctccgcctccgcctcgtcgtcgccatcgacgcccccacccaccatggcggcgctcctcgcccggcaggcagcgcaggcgctccgcgcgcgccagatggcgcagctcgggccgtccgcgacggcgatgcaggggcacatccggacctacatgggcgcagggaagcccacgaggttcaaagaggatgaggagaaagagaagcttgcaaaggagatagcgaaagattggaatgctgtatttgaaaggagcatcaacacattgtttttgactgaaatggtccgcggtttgatgctgacactcaagtacttcttcgagaagaatgttacaatcaactatccatttgagaagggtcctttgagccctcgcttccgaggagagcatgctctcagacgctatccaactggagaagagcgttgcatcgcctgtaaactatgtgaagctatatgcccagctcaggcaatcacaattgaggcagaagaacgtgaagacggtagtcgtagaactacaagatatgatattgatatgaccaaatgcatctattgtggcttctgccaagaagcttgtcctgttgatgccatcgttgagggtcctaactttgagtttgctactgaaacccatgaggaactgctatacgacaaggaaaaattgcttgagaacggcgatcgttgggagactgagattgctgcaaacttggagtccgagagtctttaccgttgatttttgttactcatgataaggattcagcatttccctgttttactcaactagctgataaataagcaaactttgtatcataacctaaatacctggtaccatgcttttgtaccttggtccatcatttgttattttgtgccagggtaaaggtgcattaccatgtttttttcgatatcattgtactgttgtcgactcagatggcattttgaacaaaatattgtggttcagaatgcaccttttgttagtaaattgcttgcatctagacaatgcaggaccgatgcttctgt

SEQ ID NO: 15323 - DNA, 592 bp, Oryza sativa
  ref <308>: DATABASE ACCESSION NUMBER: AK065852
  ref <309>: DATABASE ENTRY DATE: 2001-12-06
ggctcgctcagccgcagccactccactcccatggcgtccctcctctgccctgccgccgccgcctcctactcctccctactctcctcctccttcccctccaggcggcggccccagcccagcgccccactggcgtctcccgccccgtcgtctcctccccgccctcgctccgtcgccgcggccgccgcctacggttacggcggcgacgtgctgatgaggcccttcgacacgcagacgctcctcatctccgccgccgtcgtctccgccgtctccctctccctcgtcctcggcctcaagggtgatccggtgccgtgcgaaaggtgcgccgggaatggaggcacaaagtgtgtcttttgcaacgacggcaagatgaaggttgaaaatggagtagtcgagtgccgtgtatgcaaaggagcagggttaatactatgcaagaagtgttcaggttctggttactctaggcgcttgtagccagtgccactgaacatttctttcctttttgttaactatggacgacagggtgatagcttgcatctgattatctgaaacaagctttgtacagatgaatggagaaatcttctatgtctcgagtttt

SEQ ID NO: 15324 - DNA, 2387 bp, Oryza sativa
  ref <308>: DATABASE ACCESSION NUMBER: AK065853
  ref <309>: DATABASE ENTRY DATE: 2001-12-06
gatcacacacacactctctctcctctctttctcgcccgtttccccaccaccaccaccaccaccacctcccctctcccattcgaccaaatcggcgaggggaatagcccccccgcgcgccgcgcctcctctcgtcgccggcgatggccgacggcgaggcctcctccggcgcgtacagggagttcaaggcgctgacggaggcggcggaccgcaagttcgcgcgcgcgcgcgacgtgccgctctacggcggcggggtggaccaccacagccggaaggcgttcaaggcgtacacgcggctgtggcgcctgcagcaggagcggcggcgggagctcgtcgcgggcgggctgcggcggtgggagatcggggaggtggcctcccggatcgggcagctctactacgcgcgctacctccgcaccgccgagccgcgctcgctcgtcggcgcctacgtgttctacgaggccatctacagccgcgggtacttcgccgccgcggcgcaggtggtggtgggcggcggctacaggcaccagggcctcctgatccggtacaaggagctgcggttcatcgcgcgcttcctcgtcgtggccatgctgatgcggcgggccgaggcggtggaccacctcgcttcccgcctccgttcgctcgtcgaggagaccaagtcggcataccccaaaaccaacttcaaggaatggaaacaagtgcttcaagagcttgggagattcttgaaagctgatggagcatacaagggatctagatcactgagatatgacaacttgtttgactcttttccgtcgaaccttgcacctattgcacgattccattcaaaaagagtactgaaactgaaagaagctgtattgacaagctatcacagaaacgaggtgaagttcacagaactaactctggacactttcagaatgctacagtgtctggagtgggaacccactgggtcttatcagattgctgccaaagagcttacagaaaatggcactataagtgatcagagtggaccctctggcctgattgatatccacctatcatcagaaatatctgatggaaatcttcctgcaaatcctcaaaaggcaatcatatatcatcctacagtatctcatcttctagcggttctagccacagtctgtgaggagctttctcaagatagcatcttacttgtctatctatcagcatcaggtttttccgagcagaacattacttctcaaaagtatgcctcaagctcatcatatgcaagggcaacttccgtgtatcccatcgataagccaaattccaatggcaattcagataatcatctatggcttggtccccgtggaagtggaggtccaaacaatctttatccagaagatctgattccctttacaagatatccactattccttgttatcgatagtgaaaatagtcatgcattcaaggctatacataatgcagagaagggagagccagctgccttgctactttcacctaggatagcatcagcaatgcctggtgtggaatccacgagtaatggaagccaatttacgtacttcctcacagctccaatgcaagccttctgccaattagctgggataacttctgacatagacagcgatacatatgctaacgcggaaatcatacttttctccgctttggaacaatatgaaggaatcctctgcacatctgttggattgaacaacgtctggggacaaattttaccagatccttttctcaggcgcctgatcgtcaggtttattttctgccgagcagttatattctattttcaccctgaggagaatggtgaacatataccaatctgcctacccagtcttccagaatcagtcgcgccaaatgctgaagccatcatggcccccatccttgagtttgcagaaaaccttgttgtgagcgaccggtttcatttccgacattctgtccacaacaataagaaatgatgatcaggagcaacaactcaatccttctgtagatacctccatggtatataatcaagttatttgttgatttgttcgtatttatacagcaaacggagcatgattcagtatgaacaggctgctgcagcagctgcagcttggagagggtgaatgatttatcatttttcgctgcttcatctccattgagcatctgtacaagtttggttaggtggtccttacttttgatctaggcagtgtagggcttctctttccttttctttcggtttgtggtggagaggacagtttgtaagctggaagaggcattttttagtaccccggaaggcaaattgttttttagggttagcccaatattttgagagttagtttactaccatcggatgcattgcgttgcacatttgtctagtgcacccaacgtttgtaattgttgtttgtcctgaatgaagggttctggattattgtctg

SEQ ID NO: 15325 - DNA, 3547 bp, Oryza sativa
  ref <308>: DATABASE ACCESSION NUMBER: AK065854
  ref <309>: DATABASE ENTRY DATE: 2001-12-06
gaaagaagggaaaaaaaatacgaaaagcaaaaaggaataaacggagggggctaaacaccaaaattccccctctccttctccttcccctcctcccgaaaccctcgccgccgtcgctgtcgaaaccctcgctgctgctgctgccgcacggcgcggcggggtaccgggtccccctccctgcggcggcgcggaggggtaggtctcccccccctcgctgcggcgtggcggtggggggtgcggtgccggctgccgcgccatgatcttgcgccggtggactgcgcctatccaataaaaaaaaaagataaagatagaacaagtaggttactttccgtaccatggggcgaccggggatggactccagcgaagggagggagagcaatggcgttgttcctgaacgtaatggtggtgctgtccctgcaaaacagcagttggacgggaaggacaccttgcggtacgccaacatcctccgctcccgcaacaaatttgccgaagcactccagttgtacaataatgtccttgagaaggatgaagccaatgtggaggcccttattggcaaagggatttgcctccaggcacagagcctacctatgcaggccatcgagtgcttcaacgaggccgtcaggatcgacccagggaatgcatgtgctctcacttattgtgggatgatatacaaagatgagggtcacttagttgaagctgcagaggcttatcaaaaagctcgaaatgcagatccttcctacaaacctgctgcagagtttcttgctattgtgttgaccgatcttggaactagcttgaagcttgcaggtaatacagaggaggggattcaaaaatattgtgaagctttggaagttgacagccactatgcgcctgcttattacaaccttggtgtggtttactcggagatgatgcaatttgatttggctcttacttgttacgagaaagctgctttggagaggccattgtatgctgaagcttattgcaacatgggagttatttacaagaatcgtggagaattagaagcagcaattgcctgctacgagaggtgcttgactatttccccaaattttgagattgccaagaataacatggcaatagcactaaccgacttgggtacaaaggtaaaaattgagggtgacattaatcaaggtgtggcatattacaagaaagctctgttctacaattggcactacgctgatgccatgtataatcttggtgtcgcatatggtgaaatgttgaattttgagatggctattgttttttacgagcttgctctgcacttcaatcctcgctgtgcggaggcatgcaacaacctgggagtaatatacaaggacagggataatcttgacaaagctgttgaatgttatcaaatggccttgtcaattaagccaaatttctctcagtcattgaataaccttggagttgtctacactgtccagggaaagatggatgctgcttcaagcatgattcagaaggccatatttgcaaattccacgtatgctgaagcatataataacttgggtgttctttacagagatgcaggaagtattacttcagccgtacaagcttatgagaaatgccttcaaattgatcctgattcacgaaatgctggtcagaatcgtttgcttgcgttgaattatattgatgagggctttgacgacaagctttatcaagctcacagggagtggggaaaacgcttcctgaaattgtatccacagtatactagttgggataacccaaaagtcgctgatcgtcctctggtcattggctatgtgtctcctgattactttactcactctgtgtcatacttcattgaagctccccttgcacaccatgactactcaaattacaaggtggttgtgtattctggtgttgtgaaggcagatgccaagacccttcgattcaaggataaggtattaaaaaagggtgggttgtggagagatatatatggtattgatgaaaagaaggttgctagcttggtaagagaggacaaagtggatatacttgtggaacttactggtcatacggcaaataacaagttaggaacaatggcatgcaggcctgctcctattcaggttacatggattggctaccctaatacaacaggtctgccaacaattgactacagaataacagattcattggctgacccacctgatacaacccaaaagcatgttgaagagttggtgcgccttcctgaaagctttctttgttacagtccttccccagaagctgggccagtttgtcccactccagcaattttaaatggtttcatcacgtttgggagttttaataatctagcaaagattacaccaaaagtattgcaagtttgggccaaaattttgtgtgcagtccctaactcccgtcttgtggttaagtgtaagccattctgctgcgacagtattagacagaaattcctatcaacactagcagaattgggtttggagccgttacgagttgacttgctgccactcatccatctcaaccatgatcacatgcaagcatattccctaatggacataagcctggatacgtttccatatgctggaactactactacatgtgaatctctatacatgggggttccatgtgttactatggctggctcagtccatgctcataatgttggtgttagtctactcactaaagttgggctggggaggctggttgcgaagtctgagaatgaatatgttagcttagcattggatttagcggcagatgttactgccttgcaagaactgagaatgagcctccgagggctgatggcgaaatcaccagtgtgtgatggagagaatttcacacgtggtctggaatctgcatacagaaacatgtggcgcagatactgtgatggggatgcacctgccctcaggcggttggatctgttacaggaagagccatgctccaataacaataagcaagattttgatgacaatcaggtcgcaaagctcgcagatctgaaagcacagagagtggatgccgcggtagatggagacaagcaatcccagttaacagcgcatgctgcagtagtaggggaagttcagcaggccccaataatggtgaatggtgtgagttcacctgtctcttctgggaaagttgaagcaaatgggcacataagccggtgaccaaggggagtcgagcatactccattgatgtgggaaacactgacccactgtagcttgagatgcaccattgctgtggtggacatttgttcttacagaattcgacgctttgcaggcctacactgggtgtctcatttgtctgacacccacaatggataagaaagaagagcacttctgtgccatccgacggtgatttctctggttacactttgacctttgtagcaaatgtaagattgatgggggatatgcttatagagtttgatttgtagaggtataccccctgtgtaggtttatgaacatgatggcttcagttgccatatgttagaagaaacagagaaagaggaggaagcccttgttgtaaatgcagaaaaaacagaactgaaaaactactagaatcaattgacggcggcatttcaacaggctgtgtcatgatg

SEQ ID NO: 15326 - DNA, 1540 bp, Oryza sativa
  ref <308>: DATABASE ACCESSION NUMBER: AK098939
  ref <309>: DATABASE ENTRY DATE: 2002-08-28
gaaaacgcttgagcggtggagccacagccgtacagccgtcggcggcggcggcggcggcgcgaccatctcctcgcggccagatgcgcgtgttccggcgccggagagcccaacgaatccgccgatgctaaagctccaagcttccctccctctcttccgcctccgtccccgccccagctcccctcctccctgcggcccccgtctccccttcgtcccaatttgcaagcggcggatgagcacccaggcgcagcccagtttcgcccctctccccacggcgcaatccgaatccgatgcaggggcagctgggtaccagttccggctggtttcctacaacatcttggcccaggtttatgtgaagagtgcgtttttcccgcattctccatctgcctgtctcaagtggaaaactcggtctaaagctgttctatcagaactcaagagcttcgaagctgacctcatgtgcatacaggagttggatgagtatgataccttctacaagaaaaacatggagaattctggatattcaagtatttacattcaacgatctggggacaaacgggatggatgtggcatattctataaaccaaaaagcatggaactggtccagaaggaagtactacattacaatgatttagtggaaaaatatgttcatactgatcatgtaaatagtgatacatcaaataattcttcaccaacagaagaagcaagcaagaaggtggataataacaagcatggagatccaaatgatccacgtttcagattgaaacgtgactgtgttggtttacttgccgctttcaagcttaatgatccttgtgatcatattttaattatggcgaacacacatatttattgggatcctgaatggattgatgtaaaattggctcaagcaaagtatattctttcaagagttactcagtttgagaaacttatctcgaataaatttaactgtaaaccttcagtcatgattgctggtgacttcaactcaactcctggtgacaaggtatacaactacctcgtatcagccaactccgattctacggacgaagctccgatcaaattacgcagcctttatgctgcgaatggaggggagccagagttcaccaactgcactcctggttttacaggaacactggactacatattcttgtcggacggcagttcagtaaaacctaccagtctacttcgtataccacgaggggattctgccgaagtccaaggagggctacccaactttcaccatcctagcgatcatttgccaatcggtgccgattttcaggtactcggcagcgaaggctgattgcattttgcacggcagcaacaaatgtcccctgggatcgttccccgtgatttgtttggatttattgtagaaacagtagcaaatttattaatatcaaccagaatttttgttacatggtctacacattggagggtatttgttattattatctttaaagtttcactaccaggatttcataggactaaagtttgtagctagaccttaagttccttatggagttatggtagtgaagggctcagatagcagacc

SEQ ID NO: 15327 - DNA, 2473 bp, Oryza sativa
  ref <308>: DATABASE ACCESSION NUMBER: AK065855
  ref <309>: DATABASE ENTRY DATE: 2001-12-06
tttatactgctcaaggccttacacgtcatgggagcattccatcagttggtgctggtctacaaatgggttctccaagcatgtcacttccaagttcttcatatcatatggctggactatctcatggactaccatatggagggagcgtgtcctttggttctccaaatcttcctggaagcaatccaatacaaaatgattggccaaaccaagccaacccgtatgctgtggatcaatttaatctacttccgaacatgttacagaaacaaatatcacttccaaatagcccaatgtcatcactgctattttctcaacagcagcagagattggcacaagttcaagtccagccatcccatcagaattacctaaatttaccacctcacctattttaccaacatcactccccagagttaacaggaaggtttgattctatcagcaatgttccttcattgagagacaagaggtcaaggtcaggaaggggaaaacacagcacacgtttttctcaaccattgactgatactggtagtcaaaatggtgatagtggtggactaaaattcaggtctaagtacatgtcatctgaagagatcgaatctatcttaagaatgcagcattcagcaagtcacagcagtgatccttatgtagttgattattaccatcaagcttgcatagcaaaaaagggtgccggttccaggcaaaaggccaattttgccccaacatcaatgaaagacttaccttccaagtccagatctagcagtgaccatcatgcatatcttcaggttgatgctctagggagggtttctttctcttccatacgtaggcctcggtctcttcttgaagttgaccttccttcatctggtgatggttctcatgatcagaagtcttctctgaggcccctggagaaagaaccaatgctggcagctagagtcactgttgaagatgccatctgcctacttcttgaggtggatgatattgaccgtctattgcagtctagccaggcacaagataacagtttccaactgaggcgaagacggcaggtcctccttgaaggtctagctacatcacttcagcttgttgaccctcttggtccgagcaaatcaagccattcatctggattggcccctaaggatgatcttgtttttcttcggattgtttctcttcctaaaggacgcaaacttttgtcacggtaccttcgacttcttacccctggaagcgagttgacccgtataatatgcatggctatttttcgacatctgaggtacttgtttgggggtttaccatcagattctagtgcagcagaaacaacagttgctcttgcaaagactgtttcatcttgtgtgctccatatggaactaggtgctcttagtgcttgccttgctgctgtcgtatgttcatctgagcagccacctctgcgtcctcttgctagctctgctggtgatggggcttctcttattattaaatcagtactggaccgagcaaccgagttgctgactgaccaccatgctgcagccagctatacagtgtcaaaccgaactctctggcaggcatcatttgatgctttctttggactcctgacaaaatactgcctcagtaagtatgaaagtattaagcagatgtttgtcatgcagtcaccatgctctgtaactggatctgaagtctcgaaagcaaccagcagggagatgccagttgagttgctacgtgcaagccttcctcatacaaacgatcagcaacgccagctgctgcttgattttgctcagcgaacaatgccagtgaccggtattaatcccactggggcaaatggtgggtacatcacctctgagtctgttcctggttgatatagctgaagatgccaaagggtcgatcgcaaatgcttaaaaggactcgatgcacttgtcttgcagatggcaattcatatatatctggagacatgcatgcccttcataagatgtgagcttggaagaaagttccatttgctcagggaaaaactagccttcttcagattgtgactttaggtttcagattaatctcgtagaccaacgatctcccctttctgtgggtcatttatatagcacccacctgatatgcatatgtacgtacactgttgtaacactatgctgtgatgaactagccaactcgttgggggcaaaatttagtttttaacattcatattccccagcgaagaagacgtccaagattagtgggcttagcagcagtggttgtacaggtactagggccttcctgtctgtcgttttactggtgtggaaggtgcctagcgtcaagtaaacactagtctggtcttaatctattttagtcaggaccaaagtgtgttggaataatgaagttctgtttattaggtttcttggaaggatacttaaaatgtcatggagatgcctgtatttccaggtgcctactgacactatatggtggggtactggaaactgggggtatatctcttaattgtaaatcgttacagtttgttgcc

SEQ ID NO: 15328 - DNA, 1213 bp, Oryza sativa
  ref <308>: DATABASE ACCESSION NUMBER: AK065856
  ref <309>: DATABASE ENTRY DATE: 2001-12-06
cctccaatagcgactccggcaagaagggcggcaaccctctggaagccatgggcgccttcttctcgtcgcaggtgaaccgccggaagctggtcaccagcgagaagcaggcgctggccacgcggctgtccgccggcggcgaggcgttccccggcagcgagcaccggccggccgaccggaagacgtggatggcggagctcgggccggagcggctgcgcgtgcaccagctggtgtggccggggacgcacgactcggcgacgaacaagatcggcatcccgttcgtgacgcgccccttcgcgcagtgccagtcgctgtcggtgtacgagcagctcgccgcgggcgcccgcgtcatcgacgtgcgcgtccaggaggagcggcgcgtctgccacggcgtgctcgcaacctactccgtcgacgtcgtgctcgacgacgtgaggaggttcctcggcgagacggcgtcggaggtggtgatcctcgaggtgcgcaccgagttcggccacgacgacccgccggagttcggcaggtacctggtggagcagctcggcgagcacctgatcccgcaggacgaggcggtgttccacaagaccatcgccgagctcctcccgcggcggctcatctgcgtgtggaagccgcgcaagtcgccggcgcccaagcccggcgagccgctgtggagcgccggctacctcagggacaactggatcgacaccgacctgccggagaccaagttcgagagcaacgtcaagttcctcggcgagcagccgccggtggccgaccggaggttcttctaccgggtggagaacacggtgacgccgcaggccgacaacccggtgctctgcgtccggccggtcacgcggcggatccacggctacgcccgcctcttcatcgccgaggtcttcgccaagggcctcggcgacaagctgcaggtgttctccaccgacttcatcgacggcgacttcgtcgacgcctgcgccggcgtcaccaaggcccgcgtcgacggcgccgcgtgagattgcatggccgggccctgtagtaattagaggggtcgccgcgtttagaggatttgcttcgtttcgccggtgtcgcagcgtacgtacagattagtttgtgttgttcgtgttagacacgtgatttatgaatgatttattatcatgcatgtgttgggcgttcgtgtgtgatttaattgttgaaatgtatatagtggtgaaattgctcgtgt

SEQ ID NO: 15329 - DNA, 2725 bp, Oryza sativa
  ref <308>: DATABASE ACCESSION NUMBER: AK065857
  ref <309>: DATABASE ENTRY DATE: 2001-12-06
gaaacggaagggagggatcgagatgagcaattattactgcaactcatcctcaatcggaacaagcagcgtcgccggcaacttcacctatgccgacgcgagcagcgagggcagcatggtgaccgcctccgtgctcatgttcgtcctcgccggattcttcttcatcctcaacctcttcggcggcctctccaacgtgggcgccatactcagcccgcgtgtccgcctcctcttcacctccctgctctccctcttcctcctcgtcatgtcctacctcttatccgaggccaagaacacggccaaggagctcgaccaggtcaccaccgtcatcggcatcggccgcgcatcgtcgacggacctcccgttcatggcaggggtcatcctcacctggatgctcctcgtcgagcccatccgcaagaaggtggacgagatcgccatgaaaggctactcgggcaccatccaccgtgccggccgtgtcgtctggctcggcagcctcgtcttcgtcaacatccgcagcgccggccggaaggccgtgttcggcgtcctctgggttctctgcgccaccaaggtggtgcaacggatcgccttcaccgaggtcggcaaacgctcctacgcctgcggcaagaacccttggattatcacctcctacatgatgtccacctcgccgtcgctgccggcccaaggcgacgccatgctaaagggttgcaggtacatcgtgacgggagaggaagatgcgcgtgttgaagccaccgccgacggctacaagttgaaggaggacagcaagtcgtccctcgtcaccgtcggcaaaatctgggtggagcaagggctacctggaacgggaaataatggtggcgacgagaaggcggagctcaagaggctgtgcctctctttcgcgctatccaaactgctgcgacggaggctggagcagctgccggtgccggagccggagatgagcagcgcggagaccagcgagtgccgcgacgtcatcttcaacggcctctacaagagcggcgacgcggtggcggtgttcgaggtgatgaacagcgagatcaacttcctgagcgagtactaccactccgtcgtccccgtcgtcctggcctccccattcttcttcgtcgccaactacttcctcctccccgtcgtcgtcctgtgcgtctgcgtcatgaccatcatcctctgcggcggcggcgacgtgctgtacgcgttccggagcatcaagacggacaacttcaccatctcctcgggcatattcgacaccaccatgtgcctcctcctgaccgcgcatcactcggccgccgccttcttcgccaccatcaacttcgccgtcaccttcctcctctacatcatctacatctacgaggaggtgtgggagttgttcgtcttcctcctctccaactggttcgcggtctcgctgctctccgcctacgtcgccaagacccgcttctgcgacaactccgccttccgtgctttcgcccgctgcatcctctccgtccggacatggctgggcttccatctccatccccaagatatgatcaaccaattctccgcgctcgacctccgttggccgccgctcaccctcgccatgcccatccctctcatcaccttgctcgtctccaccaagcccgtccccgtccccgtcccagtcaagcactccatcctcctcagctccctcgcctccgcctccgcctccgcctccaccaagtctgctctagcgagcttcgacgagctcaagacggcgtgcgagaacggcagcatcgcggaggtgatcctcatatgccacatcgccaccggtctcctggaacgcctcaatcctccgcctgatccggaggtgatgatcaccgagtccgacagcaagcggatgagctgctgcggctgtccgaacaagaagaagaagaacactagtagtgacaatttcaccgtcgcgacgacgctgtccagatactgcgcgtacctggtggcgttccaaccggagctccttccggactaccatgagaaggcggaggatctgttcaaggccatgaaaatggagctcaaagacaggctcggatgttaccactactacttctcgtgcggccgtgagcgagccgacgccatcatcaacaacatcaacagcaagaataacaacaaggagggaaccgtggacaagggcgcagagttggccaacaagttgctagaaaaatacacgaatgatcatgattcgatgtggacgcttctggcggaggtgtggacggagatcatcgtgtacgtggctccgtccaacgaggagcgtactatcatggcgcacaagaatgtgctatggcagggaggcgagttcatcaccgtgctttgggctctcatgactcacaccggcattacccgacaccgccgcctccgcgaaatcgctctcaaaatttcccaagacgacgccagcacgtcgtcgtcccaacaaaaatccgcaccggaccggatcgataagcagcacgaaatcgatatccatcgtcactagctaatgtgtgtaaatttgcttgcttgcttgatcgattgattgcttttggatgcgtgaatgtgtgtttgtttggcctgcagctttctcttctttaatgttattttccccttctctttctttctttcttttattcatttgttgtgaaaatgtctctactactgtaagtgcatgagtatgtgtggttatagagtctgctatactaccgatcttcatgaattaataattccatgcatttttattctgtcc

SEQ ID NO: 15330 - DNA, 859 bp, Oryza sativa
  ref <308>: DATABASE ACCESSION NUMBER: AK065858
  ref <309>: DATABASE ENTRY DATE: 2001-12-06
gtgcaagcaaagcaaagaacttcccttgcaccaccacctgatcggagaagtagctagctgcaggagagaaaccgaccaacaatgacggagtactactccagcaccgtggacgagtgctacgagaccaccggcaggcagcacggccacgggcacggccacggtcacgggcacgggcacgggcatggtggcatgagggtggagtcccacaccgacgactactacagcgagggcggcgagatcgaccgtgggaggaggaacaactccatgcactcgcaggagtacctgatgaggcagcagagcggccatggcggctacggctacggcggcggccagcagcaggagtactacaagcgggaggagcgcgagcacaagcagcgcgagcgcgtcggcgagatcggcgccctcgccagcggcgccttcgctctctatgaggggcaccaggcgaagaaggacccggcgaacgcgcagaggcacaggatcgagcagggcgtggcggcggtggcggcggtgggcgccggcggctacgcctaccacgagcaccgcgagcagaagcaggccagctacggcgccaaggagcagcagtacggctacgccaggatgccgcagcagcagggctactactgcaactgattaattattaatcacccccaaattattaataatccatgcgtacgtacgtaccactaaataaatactggctactacgtacgtatatatacggtacaataagatgagcaaggatgtacgtacgtacacgtatatacgttgctcacccacaatttcgccgccgcggccgcgcgccttattccaaaccagtgtatgtgtgtacgtacatctatatatgtactgtgatttctgt

SEQ ID NO: 15331 - DNA, 1863 bp, Oryza sativa
  ref <308>: DATABASE ACCESSION NUMBER: AK065859
  ref <309>: DATABASE ENTRY DATE: 2001-12-06
gtcaatgtaaccacagctatcgtctgccctagagagagttgagaccacgctgcctagtaggttgactccgccgcctcgaccagcaacgctgccgccatttgcacacgctagctcgacctcttgctctgttgtcgtcgttctcgcttccgatggcggctgcaggcggcggatcgttgctggatcagtcgaggcacgccatgcacagctgggtactcaagaatatagagaaattggcaggacattatggtgcagagttcaactctttgcgggcatttgaggacagggtattcaatgagaccagcagcattgatgattatatttctaaaatatcaacgaagatggctattttggagcgaccgcagtcttcttcaggtatgcagcatcaagggcagatgggaaatcaaacgaggctgcctactacagttatgcaagaacagccacagccacagcagcagccgcatttgatgtcaaataatcatcaccaaacacatggaggatggcagagcaatgttgcaagggtacagatgatcactggtgttggagaagtgaattggagggaggaaatgtttcagaagatcagcgttttaaagaactctttcttttccgagcttacggattttgaccgtttacttcacaattgccaaaaaacagaagaacagttgcagtcactacctaaaaagcaagctgaccaatacaagcggataacaaagctcaaggatgcggttaggagtgctctggatttattgcagctccagaagagcagcatcgatgaaggcatgaaggtgaaattctgcaagtacgaaagctccatacatagcctactcagattctacagggaaacaaaagctaaaattaatgagatgaatgcaaatcgtcataacaatcagcaagagcaacctgcaggcctgccgaggcaaagaattactgacagaactccatcgtcagctcgtcggcaaaaccgcaatgacaacgtgataggccaatcagaggataaattgcgatgcagggttgaatcagttgtagccaagaagaagcccatcgaccgcctaatcaacgctctgcggcacagtgtagaggatgaccgtacggacgtcaagaggcagaaaacacggcatgttaacagtgccctggcgaacgagatcgacgccatgaacgccaagctgatcgataccgtggttagaatcgccggtgagaaagatggtgggacagagattgaattcagctacactgcagtgtctcttgcactagacatgaagcagctatttgcagcatatgggacgtctcctgtcaagccggtgaaactattcgtccctgctgattaccctcgaagttctccggtggtctcgaacaacaacgatgatggagatgaacagcggcgaggaatgttcggcgagatctcgggcatggtcagtgcggcttttcactgcgcgctgcgtgagctcccgccgtccatgtcagtcaagcagatggcctcggagtggaattcctgcgtgcagatgatcatgaagaaatttgcgatacggcacggtggaggaacgttcagctccaggcatggccagtggatggattgcaccgttgaatgatttagtaccgtgaggtaccgatacctcgagatactttttgttgtaccgaagcaaatctcttaattattacatgaggatgaagtgatacggagaaccgtatttgatctgttgttattgctgctggagggtacatgcataatccgctctgtgtatcatttgttttgattaagctggtattgcttttgatatttctctgtctggattttgtaattggaacaagcaaaatcgcttgtaggacatgtatttctgaaaatggtaactatctatctttgaagagccc

SEQ ID NO: 15332 - DNA, 3738 bp, Oryza sativa
  ref <308>: DATABASE ACCESSION NUMBER: AK065860
  ref <309>: DATABASE ENTRY DATE: 2001-12-06
gacgcacaacaccacagcgctcatacccgctgcgcacacaaatccgcctcctcttccgctcgaatttacgattctgcccccctccgctccaccgcgcgaaggcgaagccggtagccatgaagctggaggtgatgccgaagcagagggccatggaggccgagcagagggaggaggccatggagatgagcgggctcgagctgtggaagcacgagaagcccgcgtccatggtggtgttcctcccgccgccgccgccgccgccgccgcttgtgccggcggcggcggccgcggtcgcggcggcgtgtggtgaggaggcgacgctggtgccaccgctcaacttcgcgatggtcgacgacggcatcttccgctccggcttccccgcggccgccaacttccggttcctcaagtcgctcaacctccgctccatcgtgtacctgtgcccggagccgtacccggagacgaacgcggagttcctcgccaagaacgggatcaagctccaccagttcggaatcgaggggcgcaaggtaaacgaaacatggaaaaaatttgagttatctttcgttgtcaattccgattcttactagaatcatataaaaccggttcatgttttccaataacgtatcgtcgtacggtttgatcatcgcgttgttcactcctgattggtagtgctgccactggcggtgattttgggggaagaattcgattcgtttgtgaatttattaatcatcaactgaatttccaaaaagggccccttcggctactcgcctaggctcctagttgttcgttgtaacgctggggaattttcattatctaaaaaagacctgctgaattttcaaatttcacggcgaatcggcagtggtccctgtcagcattgttaatcaagccagctgtgcggtggattttaaacaattctttttccagtattccgatttttttttatttgcgtgatcctgcaattacaaggctatcagtgagtgtgcatcatatcatcccttttggcagacagcatcttctctgtacaggaggtgcctgttcgtttctcttctttgttctgtttcttgtttgaatgatttcttcactgttctgataggtaggtaaattgtggaattactctgacacatgaattttcttgttgtggattcagggtgagcagcttaagttcctgttcatgtcctacttatctgctcaccgtcctgttcataccctatgttcttcagaacttgttggttttcgttggcagctttaatgatcccaacagtatatacaattttagccaatgttatgattcttttgattatgttaaatatgcattattgcaaaaaaaaagacagtttgtgaaagttttacgaatttaaaatcttgtcaaagttgtttgagtaaacttcttggtcaatgcagaattttgagtaatccgcattgggcttactaagctgtcaaagctatctgcagatagtgtccatttagcttcttgaggcaagttgcatgaaatggagttgtagttttccgctacacggatggcacctaagaatagatataatagattgcatgcccatatccacacattgtgctgtccaatatcttgtttggttgtttgccggacctatcttgttttgttgttgatgggagcactaacggtctggatctgtctccgttttttgagaactgtaattttgtgctagatacaaaaatggggagatgaacttgataattcttactggagagatactgattttcttttatgtactatatgtttgccgttaatttatcagttggatcacctcacatgcctgtggtcgtcaagcagcaatgggtctaagcactgggaataactttagctttatttcttgctgtactgtcaacacatggcttccatatattccccaatttcccactgaagtagctgtggatcttgtctatgtgtcttggttgccctggatgtaagatgtcatggtatgagtaaaatgtacatgattttgtaccttaattggaaatatgtttccgccacatgtagaaggctttgataaaaaaaaaacaaacatgtagaggcccaataaattatcaatatgtaaaacttcataattttgtcaacatttttaatgagaagattttggaaggcatcttagctgacaagttttcgtacagctttacctgtggatgattttgagttgttattttcggagtttactaatttacaacttggttatgcactactcatgaaattaatatacccaaattaggcaaatatgtatacagttacgcctcagattttctgagtgccattgttgagtttgtggtttattggttttctgtactggtcaagatcagttatctagtagtgtttgattttttctttcacccttcttgctttagctttatgctataaatactcaaaagcaaatgtcccattcattcttttttttttcaaattttgacatcatcgatgacctaactgaagttgagtagattgtcatttatatgaaccggcaaccttgtggtgtatgagtcatagttgctgtccataatccacagtttgctctgtgttggcactgtctgaccattttttgcagaagccatgagcaggaattcccaatgaactcgataggaattcttgatgcagggccactaggattttttttttactaacagggccactaggatggttgacctaattccaaatcctactttattttcgttagaaaaacaatgaaatctcttagatttagcaaagttgctttttttctctccattaaaaaaataggccctgttgctgaaattcactcaaggaaggaaactaggggactcataaaatagttcactgtcagagttttataggaattgaccatcttgtatttcttctgatctgcgttgaccttggtgcattttctccagtgacatggccaaccttactgaaaatgataaccttgttcctgacactttgtataaaatgttttaaatgtaaaatatttaggattatgcaactacgtgcaccacatatcacttataaatatgattcttgtcacaacaattcattatgcactctgttttttcttagtctgaaaacctgatatctccacagctgatgactgacaacatctgaactactgttgctacaggaaccattcgtcaacatccctgacgacaaaattcgagaggcgctcaaagttgtcctagacgtaaaaaaccaacctctgcttattcactgcaagagaggcaagcaccgcaccggctgcgtcgtggggtgcttgaggaagcttcagaaatggtgcttgtcttcagtgttcgacgagtaccagcgcttcgccgctgcgaaggcgaggagcaccgatcagagattcatggagctgttcgacatctcaagcttgaagcacctgacagcttcacattgttaaccaagagcgtgcgattcgcgctgtctcctcctctttaagtcctagcaaatctcccaaacctatgatcttctccctgcagctactgaatttgattcagcagtgaataattttggaacccgtagaatgaaccccgtaaaaaaagaaaatgtttgtaattgagttgagagttctagttttctcctgcttagctccctgcagatcctatgaaccagacagttgtgggtaggattgcaagaggttttttccccatttttttttctggtaactcttgcgaggaattcaccaattgttttcgggtactgaaagctgtactcgagcagcattgctcggcgggaatgaactttctcttgat

SEQ ID NO: 15333 - DNA, 2265 bp, Oryza sativa
  ref <308>: DATABASE ACCESSION NUMBER: AK065861
  ref <309>: DATABASE ENTRY DATE: 2001-12-06
gtagactagagaaccccgcatcccacttcttccaggctccagctcttcttcaccctaacccagatccgcggggacccagccgattcgcccagccacgccaccgagcgctcgtctcgtctcgtctctcgacccaatcccgtcccccggcgcgacgccccgccgcgcgatggccgacggcgccagcagcagcggggccgcctcggcctccggccccggtggcgggggcggcggggagtcggtggtgatcgactacggccggcgccgcacggcctgcggctactgccgatccaccggccagacgagcatctcgcacggtctatgggctaacagcctgagagctgatgactatcaagctcttcttgaccgtgggtggaggagatctggttgttttctttacaaacctgagatggaacgtacttgctgtcctcaatatacaatacgcttgaaggcaaatgatttcatttgttcgaaggagcaaggtcgtgtacttaaaaagatgcaaaggttccttgatggtgagcttgatccacaggttggaagtccacagaataaaactagccctacaaaacattcactcgctgaacctatgaatatgccggtctcaaaaatatccaagacattaacaaatgattttcaagcagccaaatgtccaaatttatttgaagaagatgagttcatcagttgcctgtctagcaaaattaatgaggcagtgggtatgtccttccaagttggtacattaggttctgatgttcaactccctaaagctgttgtaaagactgttaaaccacaactaaaaaagaaagtaggaggagcatcacaagacaagaaagtaggagaagcagtacaagatttattgtacacatgtaatataagctttcgaatagtggcagaaatcagacgtgcattgcctaaggagaaggatgctaatcacaataaagtagtagcagatatttctccaaactctattgcagaaaagctggccatgacaatggagtgccatggagatattgctggtttagcagtaaaagcctgcaatggccatctgaacttctattcagtcaccaatcagacaaagcagaacaaaaccagtatcattgtgtctacacatgctccagataaatctagtagctcaaagcaaagctctgtgaacaaaaatactgtaagagttccccagaaaagaagaaagcttgaaattaaaatgagaaggtcacattttgatcctgaggagtttgctttatatcaaagatatcagacaaaagtgcacaaggagaagaaagtttcagaaagctcatacaagagatttctagtggatacaccaatcgtgtttgttcccccgcggagtggtgataatacagttccaccttgtggatttggttcatttcaccagcagtacagaattgatggaaaacttgtggcagttggtgtagttgatatccttcctaagtgcctgtcaagcaagtatttgttctgggatcctgactttgctttcctatctcttggaaagtatacagctctgaaggagatagattgggtcaagacaacacaggagcactgccccaaccttcaatattattatcttggttattacatacattcctgcaataagatgagatacaaagctgcgtatcgaccatcagaacttctctgtccagtccgtttcgagtgggtgtgctatgacagtgccaaacgtttactagataagagcctgtattctgtcctatctgattttgcccaaatacaagatgagatgcctcagccacagaattctcatcttgatactgagttatcaaaaaatgacaattgtgagtctcccatcgatgaggatgatgaagatttgtcctatgatgactcagacatgatggttgatgaagagatggttcgatcagaatccaacactgatgtaatggaggattgttccagcataattgattttgaaaatgtcatgatggatctgaatggttctcgagttaaatataaggatcttctgggagtcgttggacgaatcgagaggaggcacctcgaacagctagaaaggcaattgagcaaatacgtgaaagttgtagggaaggagctatctgatcgcatggtttattccctgtagttggcctgcaattctgtcccaagggagcaatgcgaccatttagaggtacaataacatgtttatgctaatcgcttcgcagtcgaattctggtgggttcaggttggaggctggaatgacacatttttccggccgattcgttatctgtcattgaagtccgtattcct

SEQ ID NO: 15334 - DNA, 1250 bp, Oryza sativa
  ref <308>: DATABASE ACCESSION NUMBER: AK098940
  ref <309>: DATABASE ENTRY DATE: 2002-08-28
gagtggtcgtcgccctcgttgtttactttgcttaatttgcttgccctcatcctcatggctgcggcggcggcggctgcttctgctccccgcctcctcctgccgccggccgcctccaccttcccacaccagcacgagcacgtccgccgcaactggcaccggccccgccgccaggtcatctctgcccgcgccggcgcctccgtcgccgcccggggccttgatgcagacgacttccgccatccgctggacaagcagaacacactgctgctgagagcagttccagggcttaatgatatgggcaaggctttgctaggaccagtttctgagcaagttatggtacttcagaacattggatcgtctgtgctagtctctgaaaaccagctttcagatcttcatcagatcttgaccgaggcagcaaaactattgaacacagacgctcctgacttgtacattcggcagaaccctgttcctaatgcttacaccttagcgatcagtggcaaaaagccattcatagttgttcatacaagccttgtggagctgctcactagaaaagaactgcaggctgtgttggctcatgaactgggacacctcaagtgtgaccatggcgtgtggcttacatttgccaacatactgacaatgggagcatactctgtccctggatttggcatggttgctgggtttctggaagagcagctctacaggtggctccgggctgcagagctgacttgtgatcgagcggctcttcttgtagtgcaggaccccaaggttgtgatatctgtgctgatgaaactggccggagggtgcccgtcgcttgcggaccagctgaacgtggacgccttcctggagcaagctcgctcctacgacaaagctgcgtcaaaccccgtcggctggtacatccggaacgctcagacgagagagctgtcgcatcctctgccggtgatgcgagcccgcgagatcgacgagtggtccaggagccgagagtacaagacggtgcagcagaaggtcattcagctccagctcaatgatcacgatgcaagctagctaagctgcaggctggaccggcctgatcaactcacttcactgtacaagtagaagtagaaatggaatctagctgtatatgtttgtacatggatggaacggaaccgaactgttggaggtcagattgtattctagtgaagaatatgcacaccacagatatacaagaaaatgcaaagatatattgattctttaataagaaaaataaactaactgct

SEQ ID NO: 15335 - DNA, 3873 bp, Oryza sativa
  ref <308>: DATABASE ACCESSION NUMBER: AK065862
  ref <309>: DATABASE ENTRY DATE: 2001-12-06
gacttgccccctcccccctcgccgccgccgccgccgccgcctcctcggctcctccgccatccgcccatccccctccattcctcctcgccccccgcgcccgcaggttttcctctctcccaaggcggccaccccagatcccgtcctgttcgatccacgcctctcccgctcaaatctcggggcgggccaccgtctccgcggccgcatgccgggattggcgcgagagcgcatcagcagtcgccgcagccgagcaacctgatcttcccccatggccggattcggcgggacgtgcagggtggcagcggtgctcgtcttcaccgcctggatcgcgctcacggcgctcacccggctgctccgccccgtccccaacggctgcgtcatgacctacatgtacccgacctacatccccgtctccacccccaagaacgtctcctccgacaggtacgccctcttcctctaccacgagggctggaagcagatcgacttccaccaccacctcagcaacctcaacggtgtcccggttctcttcatcccaggcaatggcggcagctacaagcaggtccgatctctggctgctgaatcctttcgagcataccaaaatggtccacttgagcctaccttttatcgggaagcatctactgcattttcagtaaatgaactggagggtttttcaatcccatcaagatatggccgtatgttggattggtttgctgttgaccttgaaggagaacactctgcaatggatggacgcatacttgaggagcatactgaatatgttgtttacgccattcacaggatccttgatcaatacaaagaatctcatttagcacgatcaaagggtcgtgctcaatcctctgacaacttgccatccagtgtaattttagttggacattccatgggtggttttgtggctcgagcagctcttgtccatccaggcttaaggaaatcggctgtggaaaccatactgacactctccagtccacatcagtaccctcccattgctctgcagccatctctgggtcagttttttttgcatgtcaatgaagaatggagaaatggatacaagacagggttatcacgcaccagcagtgcaaaactctcaaatgttgttgttgtctctgtagctggaggcatccatgattatcaggttaggtcaaagttagctttgctggatggaattgtaccttctactcatggttttatggtagggagctcaagcatgaagaatgtttggttatccatggaacatcagtctatcctctggtgcaatcagttagttgtacaggttgcacacacacttcttagtatggtagatcctttgaatggacagccatttttgagttcacaaaaaagactttttgtatttgcaaaaatgctccaaagtgcagttccgcagtctttgagttgggtggctcctgtttcaggtgttaagcctccaaatctgattgcaagtggtaacaaggaagctagtgacttgcagcaaaaggattcactttcttgccctccatctcttcaatggacaagtgatggccttgaaaaggacctgcatattcagttaaattcagttactgttttagcaatggatggcaagagaagatggttagatattaaaaaactgggatcaaatggcaaagggcactttgtttttgtaagtaatctttctccatgttctggggtgaggattcatttgtggccagaaaaggatcattcatctgaacaaaatggagtacctgccagcaaaaagatagtggaagttacatcaaagatggtccaaatacctgcaggacctgcaccaaaacaggttgaacctgggagtcaaaccgagcaaccacctcctactgcatttcttctgcttagtccagaagaaatgagtggtttccgcttcatgactatctcagtggcacctcgaccgacaatttcaggtagaccacctccagcggcatctatggcagtaggacagttctttaatccagaggaagggacgagtgcactttctgctgcccgaattattggctccagctatattcctgaagaaatatttttgaaggaggaccacccactggctttaaacttgtcgttttctgtgagccttggtcttctaccagttatattatctttgagaactgctggatgtggagtaaaagctactggcgaccaattggaagctgagaaaaataaactttgtaaactgcggtgcttcccacctgttgctttggcttgggaccctgtatcaggtctgcacattattccaaatatttactctgagactctagtggttgattcttcacctgccctttgggattcacatcaagggactgaaagatctactgtgcttgtcctggctgatccacattgctcatatgaagtgagtcttcgtgtttcacttagtgctgcagcaagcagattctttttgctgtactcatcacagattcttggtttcatgattgctgtaatgtttttcggcctgatgcggcaatcatcagcatgggaacatgattcttctgtgccgtctgttttgtcagctatagagtctaatctgaggctgcctagagcattcatgttcctttgcttcataccagttcttctttttcttgcctttcttgttttcaccagagagcaaaatcctccacttggaaccttcctgctagttaccatgatgtgctacatagttgctaatggcttcacaattttattgatactaagttcaaaattgattctttatgtcgctgctattcttcatgtcttcatcaagaggcgctggcaatcatgggaggatggtactcaatcaatgattgttcgccacttcctcactctctcattaccatttcagtcgctaaagattgtgcagataattaaaaacaatccaagtataattgtagcatttgctacaataccacttgtctgcttagttcatccagcaattggtcttggtgtattacttctctcacatgccttccatgcacactccaccctttgcagtttcttagcagcttcatttcgcagtatcactcagaaaaaggatttgtataaatccatgggtgataatattattctgcccgaaaataaacaagatggcctcgagcaacttctgccgatggatgatagcccaacatctgttaaaagttttactgactgccaattggaagtatttgactgtcggcatgggatcatgatcttgcaccttcttgccactctaatgtttgcaccttctcttgttgcttggctacagagaatcggaatgggtcaaaattttccatggtttgtggattcagtactttgtgttggcactattctgcatggacttttcggatcaccaccaaatgtgagctgtatatctttcaagctacctggaaggagagggcgagatgttggactaagctttctctaccttgtagctggatattattcatttgttagctcaatggctctggctccttatagggcgctctatgcattggcaatcatcggtttcatctgctttgcttccagaattattgaaacaagaagtacggtaagaggtgatgttatttctagaaaacatcggaagcattcatagggactaacaaatgagaagtgtattttagatatgaagttggatacattagtttataatagcagatcgtgttttggggtttatggttggaaactgcaaagcattgctcttgacactaaggccagttttgcgagggaaatgagggtatatttttcttttcactgttgtgaaggagatttgatgagtcactcagatgatctggatatgttgtatcataggtggggttgatttgggggaattttaagcccattgttatgaaaagacggaaccagtaactgtacattgttgaatgccgacatgatatagtggttttttcatgaatg

SEQ ID NO: 15336 - DNA, 3618 bp, Oryza sativa
  ref <308>: DATABASE ACCESSION NUMBER: AK065863
  ref <309>: DATABASE ENTRY DATE: 2001-12-06
gtgcggcggcggcggcgaggaggaagaacacacggttggaactcggaaggtctttacaccggggagaaaaaaagaaaggagtgatttttgggagtcgcgctttggcaattggcgcacacaacagagaggggaagttaactgtctgattcaaccggcggtgcaatagagattggaccgatgggttccctcacaagttcttggacgatgaacttgtgtgggagcccaatttgctccaagaaggatgtagtttcatgtgctttcaaggaaatattggactcatctacttgcatgaatcatctggtggtgtttggcattactgcattgctcactgttgcacttgcactccatttgctcatcaaaattccaaagagtagagcatctgcgcgacagcttgccgcgttcaattcaccgctacaactggctgctgtagtgttcaatggctgcttgggtttgcttaatcttggcctaggactgtggatgctgaggattagcttcagtcaggattcctccatttcccagtcacattggtggcttgtgatcttggctcaaggatttaatttgatccttactagcttcacttttagcgtcagaactcggtttcttggagcaacatttgttcgattttggtcagttggtctgaccatatgtgcagcattcatctgttgctgttcagttgtttacatggttgaagagaaggagatcacctttaaagcttccttagatgttcttttgctaccgggagcccttatccttcttctttatgccattcggcacagccatgatgaagagggttatgaaacaaatgcaaatgctttatacaagcccctgaatacagagaaggatcatgacacggctgattcagagatccatgtaactccttttgctaaagctgggtttttcagtgtgatgtcattttggtggcttaaccctttgatgaagatgggttatgagaagccccttgaagataaagatataccgcgtttaggctccacagatcgagcacagaaccagtacttgatgttcttggatgagctgaatagcaagtggattttctgcctgtgtttgattccattctgttaatgtcagatggtgagattattcagtcagcaccttatcaagatctgttggcatgctgcgaagaatttcaggaccttgtaaatgcccataaagatactataggagtgtcagatattaataacatgcccctccacagagcaaaggaaatatcaacaaaggagacagatgatattcatggaagcagatatggggagtctgtgaagccatcacaagcagatcagctgataaagatagaggaaagagaaataggtgatacaggtcttaagccttatacactgtacctgcgccagaacaaaggatttttatacgcatctctcgccattatttcccagataattttcatatgtgggcaaatatcacaaaattcatggatggctgctaacgtcgaaaaccctagtgttagtacattgaggttaatagtcgtgtacattgctatcggagtttgctcaatgattttcttgatatctagatctttatgcatcgtagtccttgggatgcagacttcaagatccttattttcgcaactacttaactcactgttccgtgcacctatgtgcttctatgattctactcctctaggaagggtattgagccgggtctcttcagatttgagtattgctgaccttgatgttccattcttcttcatgtttagcatgaacgccagcttaaatgcatatagcaatctgggggtattggctgttgtcacatggcaagttttgtttgtctcggtgccaatgataattttagcgattaggttgcagaggtactatttagcttcggctaaggaattgatgcggatcaatggcactaccaaatctgctctagccaatcacctaggtgaatcagtttcaggggctataacaataagggcctttgaggaagaagatcgtttctttgctaaaaatttggagcttgtggacaggaatgctggcccatacttctacaattttgctgcaactgaatggctgattcaacgcctggaaatgatgagtgctgcagttctttccttttctgcttttgtcatggcgattcttcctccaggaacttttagccctggttttgtaggaatggcattgtcctatggtctatccctgaacacatcttttgttttgtctattcaaaaccagtgcaaccttgcaaatcaaatcatatctgtggaaagggttaaccagtacatggacatcgaaagtgaagcagcagaggttatcgaagaaaatcggccagcaccagattggccccaagttggcaaggtggagcttagagatttgaagattaagtacaggcaagatgctcctcttgtactgcatggaattacttgcacatttgaaggtggagacaagattggtatagttggtcggacaggaagtggcaagacaactttgattggtgctttgtttcgtcttgttgaaccagctggagggaaaataatcatagattctgcggacatcaccacaataggcttacatgacttgcgttcatgtttgggcattattccgcaagatccaacacttttccagggtactgtaagatacaatctagaccctcttgggcaattctcggatcaacaaatatgggaggttcttgacaaatgccaacttcttgagactgtccaagagaaggaacatggattggattcacttgttgtggaagatgggtcgaactggagcatgggtcaaaggcagctgttctgtttaggacgtgcacttttgagacggtgtcgcatcttagttcttgatgaggcaacagcctccatagacaatgcaactgatgctatccttcagaaaacaatcagaactgaattcaaagattgcactgttattactgttgcgcaccgtataccaacagttatggactgcactatggtccttgcaatgagcgatgggaaaatggtggagtatgacaaacctatgaagctcatggaaactgaaggatctctcttccgagatcttgtcaaggagtactggtcatacgcatcgaatggaaatatttaggtgaaaatatgcactcacatgctgcagcatcttgctaggagttaacagaggcagtcagaaatctgtatccatactcaagaggaattttcatctatttggggtctgaagagaagacagtgcctcagccaggtattgtcggaaaatgtgtttcgtcatctagttgttacctgaaattttgagcaatatatggtgcaacttctgtccatgggtgttctgcaaatgcttaacagagtaaatccacaaacatttccttgctgaagtgatcagatgtacgaaaggttaaatgatgagatgttcatcaattctgtaaatcatgcgtagaatcagtactgtgcaactggagatttgtacactacttagaaaaaaaattcaatatatgtgatctttatttatttatttttttggcataggaaccaaatttaaagtgtgcacacacaaaaaatgcttcaatctgatgtgtgatctgtttttccatagccagtaaatcaaatcttgtatacattattatgtaataacctcttgttcatttttgtgaatttagtacagtatc

SEQ ID NO: 15337 - DNA, 1505 bp, Oryza sativa
  ref <308>: DATABASE ACCESSION NUMBER: AK065864
  ref <309>: DATABASE ENTRY DATE: 2001-12-06
gtctaggagtagtagcaatagagcatcaacataggaggcagcataccaatggagagcttgtgtgggcagcttgagcatgaacatgagcagcagctgcaccaatcctcctcatcttcacttctcccctactgcttcctttctgctccagagcctcttcctgtcccaggcttccctgccggctgcagcaaccttgaagagaaggcagcagcagccatggcggcctatgagtatgagagcagcagctgcagctcccttgaccccacctcaatgccaatggtgtactcaccaatagtgctgcagccacaggagtgccctctttcctttgtctttgacaatgccgctgccgctgccggcgacaacaaatgggtgcctggcattcaaggaagttgcccttgttcattgggctcaactcaagatatggatgcaagttggggcaagagtagaaagcacaagaggagcaatgtgggcttgaagggacttgaggagaaaaaggcaagaagggtggtactacatcaacatgatgatgatgtgaagaagaaggccaaggaggcagcaggtggggagccaccagctgggtacattcatgtgagggcaaggagaggccaagcaacagacagccacagccttgctgagagggtgagaagggagaagatcagtgagaggatgaagatgctgcaaagcctggttcctggttgtgacaaggtcacagggaaagccctcatgctagatgagatcatcagctatgtgcaatctctgcagaaccaagttgagtttctgtccatgaagcttgcctcccttagccctttgatgtatgagtttggaccgggcattgatatgcacccagatgttcttcgacagcttgcaaagatgccacatgagatggtgcagtgcatgggccaaatggggagtacaggcatttcactccaaggactaggaggaggacccacaggctttgctcaggatggcagcagccacattaacatggtggtgatgcaagttggagagcaaggccagcagcagggctctcttcaccaggtcgagatgagcagccactgcttctttcattagtagtagaacccatgcatattctggaatggccacgaagcagcatcacatagaggaggagatgccgaatcaacaagtgaagtgaagtgagcaagctgaagaagaagagtggggcaagccgacagagttgaacctcctgaagatctcgcaaggatcctttggttgctggctcagctgtaccatctcctcctgggctccaaaatccacactatcgatatctctgccttcaccgtcaccaagactgcatgcagacagtaccaagacgaggacatgtactgttgctcctcctgcgtttcgcttcattcattcatctgctgctgtgctgttcctccccctcttctgtgtgttgcatctgtagatactctactcccttttcatgtgtttaatactccagaaatgtgcatgtgtgtgtgtgcaatatgcatgccttgcaaatgtgt

SEQ ID NO: 15338 - DNA, 3147 bp, Oryza sativa
  ref <308>: DATABASE ACCESSION NUMBER: AK065865
  ref <309>: DATABASE ENTRY DATE: 2001-12-06
atggctcgacaaccagggctgctcgccggcgctcgagcccgtgcccacgccgcccaaccccgacccctcatccatctcgccggaggcctgggatcccctcgaggccgccgccggagccgtcgtcgcccggatccagcccaacccgccctccgaggaccgccgcgccgccgtcatagcctacgtccagcacctcctcaggtgcaccgttggctgccaggtctttccatttggatctgttccgttgaaaacttatcttcctgatggagatattgatttgactgcctttggccattcaagtgatgaaattttagcaaaacaagtacaggctgttttagaatcagaagaggcaaggaaagacgctgaatttgaagtcaaggatgtccaatatattcatgcagaggtcaagttggtgaaatgcattgttcaaaacatcattgtagacatctcattcaatcagtttggtggactgtgtaccctttgttttctcgagaaggttgatcaaaaatttgaaaaataccaccttttcaagagaagtataatgctgataaaagcttggtgttattatgaaagccgcattcttggtgctcaccatggattaatttctacctatgcattggagatattggtgttatatattttccatctcttccatggaacattggatggtccactagctgttctctataggtttctggactactatagcaaatttgactgggacaataagggtataagcttgtatggccctatttccttgtcttccctgcctgagctagttactgactctccagacactgttaatgatgattttactatgcgagaggactttctcaaggaatgtgcgcagtggtttactgtacttcctagaaactctgagaaaaatactcaggtctttccccgaaaatttttcaacatagtggatccattgaagcagagtaacaatctagggcgcagtgtcagcaaaggtaacttcctccggatacgcagtgcatttgattttggtgcccggaagcttgggaagattattcaagtgcctgacaattttactatggatgaagtgaatcaattcttcaggaacacattgaagagacactgcagtagggtaaggccagatgtgcaagaaatagctctggacttcaatggtgaaagagccgacaacgatagttcgcctttatacagtaataattcctttggtgatctatctgatgagttcaataacatcagcatttcagattccagcaaccatgggtcactaaggcaaaatggatggaattatgtggctgaaaacaaggaaaggaagtctgtttctggtggcttgctggcaagcaaagcaacaaatcctgcagctactaattcaactggtatgacgaatggcagtgactcttgtgagcccgcatcaccatcaattaccggagcacatagcttgccatctgaggaaggtcatgacgcactggatctctttaatgagtcagaaagtggtacgaaagctggcataaagtatggcacaaacccatcacaccatggaatgtcaacagtgagttatgcaggcagatcccaccagtcctttgaagaggtggataatgatgatagaggtaccatcgatagcaattggtcagatctcactggagactacacaacaaattttaataatcttctctatgctcaagggttccaccaagattatccaatgaaccaatattatccatttggtccagtgtactatccaataccctcccctccacctgcacgatatcagaataggcgatcatcaaatggtcatagcagaaataatgtgtatggatatgctggtacaaatggaataggccctgctccttgtccaccaggttatttaattatgaggccatatagtcaagttgatgattcaaatcgagctcgtggaactggcacatacttccctaacccaaacttgtccaaagacagatcaccttctggacgaggcggaaggggaaaaactcatttcctgccacataaccatcaaagaccacaccactacggtagagctgatatgtcagcagattttactccttcggaggaattgagacatatttatgatcctgatgcaaatgacttgggaatcccctcttcactgcgcatatcaataccttctccatcttcggaagctccaagggaaattgtacatggcaatggttttattcagcctccagctaagaaacttgagtttgggaccttgggagcattgcctttggaagttacatcccaagagcttggtattaacagattgaatactgcttccgacagccaaccttcagcgtctgcaagccctatgtctctggcaaataatcctggaattagttctaatcaaatgaggaatgctcagccatatcatctcaaggacaacggtgatttcccaccgctatctagttgatgccatatagttcattgcatatcagagacaacttggtccaagaaagatactgataaatggtgcgagcgcttggtgcaacaatagcaggggttgttccgcaagacaaacatcatccatcatgtacatcctatcattaacttcacattctcctatcttcaattcacccttgctgttgctttccaaaaaagaaaaaaaaaagcccagaaggctgatgcatcgcagcttgctctgccataacattccctgcaaaggaaatatggaggaaagatagaagcacaatgtagctacttaggttatcttcacctttgcccccttgaagagggaacaagtgtggtgaagtcaagaaatgctagaaagaggtgagctgtgtcttgctctgttgttttgacctcatgagcattccagttactggagggctcattgagtgtgctctgttttggtttggagaggccttctgttgaaaggccccactgtttgaagtaacatttgctgcctcaagcaatgggtagttataggggatagatatgtacgaaactttcactagatttactgtcttcatagaagcagtttagttagtctatactagctcagagtaaaaatgatccttttactttgcctgttgtgcttcacatgtcttttttttttttgtaactaatttgacttgtaacatagttttgctctgctgttgttagctcggctccaggttaagagaaaggggtatgattttgagtaacacaacc

SEQ ID NO: 15339 - DNA, 1198 bp, Oryza sativa
  ref <308>: DATABASE ACCESSION NUMBER: AK065866
  ref <309>: DATABASE ENTRY DATE: 2001-12-06
ggcatcacaatcgataggtagctaactactccatctagctaagacccgtagtgtatagtagtcaagatcaatggcgtcccgacgccttgccccgctgctggtcctactgctctcgtccagcctcgccgccggccagagcaccggcgacaccgtcgtgttctggggccggaacacggaccagctcgaggggtccctccgtgaggcgtgcgacaccggcctctacaccaccgtcatcatctccttcctcagcgccttcggctacatcccgggcacctacaagctggacatctccggccacaccgtctccgccgtcggccccgacatcaagcactgccagtccaggggcatcctcgtcctcctcgccatcggcggccagggcggcgagtactccctgccgacctcccaggcggccgtcgacctcgaggactacctctggaacgccttcctcggcggcggccgccccggcgtcgcccgccccttcggcgacgccgtcgtcgacggcatcgacttcttcatcgaccagggcgccacggagcactacgacgagctggctgcaggcggcgctgtccacggggctcttctcgcggatccacgtcaaggtgttcggcgacgggcggtgcgcgtcgaggagggaggagctggagaagtggatggcggcgtacccgcagagccgcgtcctcgtcggcgtcgtcgcgtcgccggaggctgacagggacggctacgtgtcgcacaaggatctctactacgacgtgctgcagttcatcaacaagctgcccaactatgggggcatcatggtctggaacaggtactgggacaagaagaccggatggacggctggtaatgagcctggtctcctggatcaggttctgtgatggacggctggtaattaaccagaccttgatccattttcactttgatcactgatcacttcactggattcatgcacgagctactactagtacgtgcacaaataaagtaagtaatgtcatgtgacgtgcatgcacaaataaagatggaaatgatatgataaaagattggggtatgtgtgtgtgtgtgtgttggataatgtaatgtaatgcacaaataaagtgaggtgatcaggacgggcaggcttactttcttctgggtgatatgttgtatgtattttgttttattggattggaataaatatatatatatatatatatatttcatcgcc

SEQ ID NO: 15340 - DNA, 2361 bp, Oryza sativa
  ref <308>: DATABASE ACCESSION NUMBER: AK065867
  ref <309>: DATABASE ENTRY DATE: 2001-12-06
gatactactcggcaaggcaaatcctgccagactgggagccatggcgaaatccaatgcatctcgtgcttctgccactcgtagaaagttctacttcttgcagaaatctctgcttgtctcttctttgcttgcggttgttgcagcagatgttgttggagcagggccaaaccagcagtgttttccttcctcctgtggtgatcttggcaacatatcctaccctttccgtcttgcaagcgattcacgcccgtgcgttggtactcttcgcccatggtacaacctctcatgtagcagtggcagggctaccattcagatcaacacacggacgtactatgtcaccagcatcaactatactggtgagatcttctcggttgtggatgccaccttgcaggatgatgatacaaacggcaccagctgccctcttcctcgctctgatcaccttccttacatcgattactggcctccgtatttgggggaaagttcaaccgattcttatggttttgtctatttggccactgcttcagacacttgggcatgctttgtgaattgttcccgagcaagaacagatactatgccctggtacaggccagttacatgtctacttcccaacaattcatttgtttttgtctcgtttgatgactgtgccgttggagagcttcaaccttcctgtcgatatttggccatgattcccgttgacagatggaatctaccggacaactcctcacagctacagaatgcaagttacacagatatcataggattcataaggaaaggatttagtgttcggtttccatatcgtcctgaccagtaccagagtcctcgtatgagcgccagggaatgcctgaaggattcaaacaggtacttcaaggagcgtatatctcatccaagcattctgaatttaacccgtgctattttctggagcgaaacaaactccgaagtagactgcggatatgaagttgccccccaaaaagataggatttttttgggaaccatagtatcggctattgatatcatcaaatttcatttcgttttattcaggttagtgttggggtcactggtggtattcatcttccttgcccacaagtactggaaaacagggatcacgatcgacgcagtagagaagttccttcgaatgcagcagatgattggtccgacgaggtttgcctacacagacattattgcaatcacatcccattttcgagacaagctaggccagggaggctatggctctgtatataaaggtgtactgctcccgggtaatgtccatatcgctgtcaagatgctgactggtagctccagctgcaacggagatgagttcatcagtgaggtctcaaccattggaaggattcaccatgtcaatgtggtgcgtctggtcgggttttgctctgaagaaatgaggagggcacttgtgtacgagtacatgcctcgaggctctcttgacaagtacatcttctcgtcagagaagagtttctcctgggataagctgaatgagatcgctttgggcattgcaagagggatcaactacctgcatcagggctgcgagatgcagattctgcactttgacattaaacctcacaacatccttcttgacgataactttgtcccaaaggttgctgatttcggtcttgcgaagctatacccaagggataagagcttcgtccctgtgagcgctgcacgaggaaccgtgggctacatagctcccgagatgatctctcggagcttcggtgtcatatcaagcaaatccgatgtttatagcttcggaatgctactattggagatggctggaggaagaaggaatgcagatccaaatgcagcaaactcaagtcaagcttattatccatcacgggtgtacagggagctgactcggcgagaaacaagcgagatctctgacattgctgatatgcatgaactagagaagaagctttgcattgttggattgtggtgcattcagatgaggtcatgtgatcgaccgacgatgagcgaggtgatagagatgcttgaaggtggcagtgatgaactgcaggttcctccaaggccattcttctgtgatgatgagcgattccctggagtggagtcttacaatatgccatctgatctaactgcaatctccgaggagcatgaggacgacgacgacgaaagcatatgtctgttcgaaagctaccagtaacttagtagcaagtacatttatgatgattgtttttacttaatttgtatgcccgttttgctgtctaaagttcaaatatgctgagatcgatatagtttttatgtttattgtaagtttgtagcacatataataaagtgagagcttgtaatatttaggagtgtatgcttaatctccacaagacagtattatgaataatcttctct

SEQ ID NO: 15341 - DNA, 1449 bp, Oryza sativa
  ref <308>: DATABASE ACCESSION NUMBER: AK065868
  ref <309>: DATABASE ENTRY DATE: 2001-12-06
ggctctctccccgccacgtctcccctccccggccatgggagcggccatgctcctcgctcccatgcctctcctcctcctcgcctccactcccctcgccgccgtccacctccccacccgctgccgcctccgcctgcagctcctctcccgcgccgcgcccgaagccgcctccgccaccaccaccaccaccaccgcgcccgacaaccacttctctgtcgaggaatacctcatctccaactgcaatctcacccagccacaggcccacaaggcgtccaagagcatcgcccacctcaagtcccgctccaaccccgacgccgtcctcgccttcctcgccgacttcggcctctcccccaaggaggtcgcggccattgttgcctccaacccgcgcatcctgtgcgcccgcatcgaccgctcccttgcacccatctgctcggagctccgcgccgtcggcctctccccctcccagatcgcccgcctcgcccagatcaccggccgctacttcctctgccgcagcttcgtctccaaggtgcggttctggctccccctcttcggctcatcggagaggcttctccaggccagcgactggaactactggctcctcacctccgacctcgagaaggtggtcgagcccaacgtctccttcctcaaggaatgcgggctaagtgctcgtgatatttccaagctgctcgtggccgcgccgcggcttgtcaccatgcacccggattacgtcaaggacgccgtgcggcgtgccatccagctcggcgtggccccgggctcccagatgttccggcacgcgctctccaccgccggctgcatcggccaggacaagatcgacgccaaggtcgccgtcctgaaggagagcctcgggtggtcgcaggaggaggtgaacctggccgtgagcaaggcgccgcggatcctggtcgcgtccgaggagaggctgcgccgcaacgcggagttcttgatcgacgaggtcgggctgcagccgcagtacgtcgcgcggcggtcggtgctgctcatgtacagcctcgagaggaggctggtgccccgccatctcgtggtgaaacttctcaaggagaggggtctgatcgagcaagaccggtgcttcttcaacgcggtggcgccaactgaagagaagttcttggagaagtttgttgtcccctttgaggggtgcgtcccgggtctcgccgacgcctacgagtctgcctgtgccgggaagacgccggtgcaagctgagtagtgaccggacttgggggagaacaatggaggtgtgtatgtgtgtgtgtctcacttccattggataacttcattctactgatcaactatagcagggatggcagattcaattcatggtcattttagtgtaggtttcttgcagttgacaaggaggtggatgtgtataacaaccttgagaactgttcagttgtggttgaacaatgttcagtgggttttcat

SEQ ID NO: 15342 - DNA, 1978 bp, Oryza sativa
  ref <308>: DATABASE ACCESSION NUMBER: AK065869
  ref <309>: DATABASE ENTRY DATE: 2001-12-06
tgactaaaggatggccatggtacattttatcaacctggaagcaaaattccttgtaaccttgaagtttctgactgtctaacaagtcatgatggtacaagtgcttcaagttctagtaatgaaaagatcactattggactgttatttctattgcaaaaactgtgcaagaattggaggttgcgtaggtttcttcatcggcccagacgtatttcaaatggtaccacaccagttttcgatgataattctggaagccatctatgccaagatgtatcaagtaaatcattttcagctgatgatcagtgtctacaagacagtgaagttgataaagattcggtttatgaacgggaatacgtacaaggagtgcttatcatggaacaaccaaaaaacgaagattcaagaatgtcggagagcggtatagcacaagaaaataactgggagaaacaagctaaaggaccaatggagactatttacaagggccataggagctattacctaatgcttaacttgcaacttggcatcaggtatactgtaggtaaaattacccctgtgcctttgcgtgaagttcgttcaaatgattttggacctcgagcacgactaaaaatgtacttcccttgtgagggatcccagtatacccctccgcactactctgtcgatttcttttggaaagactattgtccgatggtcttccggaatcttcgagaaatgtttcatatcgatgctgcagattacatgatgtctatatgtggtggtgatagtctaaaggagctttcttcacctgggaaaagtggcagcattttctatctttctcaagatgaacgttttgttataaaaacattgaggaaaactgagctgaagattggtttgatgtaatacgtgctgcagatactattgaagatgcttccaaagtattacaatcatgtcaaagcttatgataatacgctcattacaaaattctttggcgtgcacaggattactctgaaacctggaagaaaggtccgttttgttgtcatgggaaatatgttttgtactgaactgcgaattcatcgtaagtatgacttaaagggctctacacaaggccgatcaacaaagaagcaaaatataaatgagaacacaacactaaaggaccttgacctatcatatgtttttcacgtggataaaccatggagggaggcacttttcaggcagatagctcttgattgtatgttcctggaatcccaatctataattgactatagcatgctattgggaatccatttccgagctcccaatcacctgaagcgtatcacatcatgtcagaacgctcttgaaagtactggaatttcagctgaaacggaatgtagtgttgcactgcatcatgaggagacaatttcttcaaagggatttctactagttgctgctgatgagccaggtccagcagtacgtggttcgcacataagaggaagcatggttagggcagcagaaggtggttatgaagaagttgatcttgttttgccaggcactggaaggttccgtgttcagctaggggtgaatatgccagctcgagctcggaaagtgcaagaggacgtgaacgtagaagtaaaaaacagggacaccattgaagagtatgatgttgtcctataccttggtatcatcgacatactacaagagtataatgtgtccaaaagagttgagcatgctgtcaaatcactaaaattcgaccctctttcgatatcagctgttgatccaaatttgtattcgagacgatttataagtttcttggagaaggttttccccgagcaagattgaacagtaaatagatattgcaagtttcttggagaaggctttccctgagcgagactgaacaataaatagcagcgatgcggccacacatctagatcttcttgtaaagaattaacatatacccccattggaattactttacagtcggcaagcttcttattaagctccaacgaatttcagttcaactgtgattttttttttc

SEQ ID NO: 15343 - DNA, 867 bp, Oryza sativa
  ref <308>: DATABASE ACCESSION NUMBER: AK065870
  ref <309>: DATABASE ENTRY DATE: 2001-12-06
ggcctccctgctacagtgtcgtccctaacctccagccggctgcctagctgagcccgagccgcgcgccgcgccgccttcctcctctaaatccgctccaatccgaccccgtttcttccggatttttgaggggttttgatcctctcatcctcctctatcttttcccccaagaatcggagcaaatcgttgggtattttatccgaatcaaactcgttttcgagtttatctccaaaaccgagttttgattttcccggatcgatttcttgcgggaggagtccgatctcttcaatccaaggctataaataggaccccctagtcctcctctttcgtttgccccctctcccgtcctctcccgtgacccgtagagccgtcgccaccgtgcaagccgtcgccgccgtcgcttcttcgtcgccggccgtcatccgtcgtcgttcgtcgcttcgcttgtcgtttccgtcgttgcgaaggttcgtgagtgcgtcggaagtgatcaagaagattaattgaagaccgattattgcaagttgaagaaaaaggatccagaaggagaagacgtttggcttataccccagttgagctgcctgtgggagtggagccggagcttcgctagattttattttccgctgcagttttcttcttgaagaggagtttctcagtgaaggtgatgatctggaggaataggcttgttctcggttaaaatgcctgtggagtggagtcgccatagctgttccgtagtttgttatagttttttttccgctgcgtagaatattatttcttgagaggaactatctacctctgtaataattttaatttgcgaatattcgatagttatttatttgtactctattatcaatattgtcattgtgtgcc

SEQ ID NO: 15344 - DNA, 1108 bp, Oryza sativa
  ref <308>: DATABASE ACCESSION NUMBER: AK065871
  ref <309>: DATABASE ENTRY DATE: 2001-12-06
gggctgcagagacacttcttcgcagttcgcgtcgcgcacacactctccctttgcctcgcgcagaggcggccgcgccttctccgccgcgaggcatggccggcgccgccgccgccgtggaggacgccgggatggacgaggtccagaagcggctcatgttcgacgacgaatgcattttggtggatgaacaagacaatgttgttggccatgaatcaaaatataactgccatctgatggaaaaaatcgaatctgaaaatctacttcatagggctttcagtgtattcctgttcaactcaaaatatgaactcctactccagcaacgatctgcaacaaaggttacatttcctctagtttggaccaacacttgctgcagccatcctctgtaccgtgagtctgagcttatacaggaaaactaccttggtgttagaaatgctgctcagaggaagctcttggatgagctgggcatcccagctgaagatgtgccagttgaccaattcacccctcttggtcggatgctttacaaggccccatctgatggaaaatggggtgaacacgagcttgactacctgctgttcatcgtccgcgacgtgaaggtagtcccgaacccggacgaagtggccgatgtgaaatacgtgagccgtgagcagctgaaggagctcatccgcaaagcggacgccggagaggaaggcctgaagctgtctccctggttccggctggttgttgacaacttcctcatgggctggtgggatcacgtcgagaaaggcaccctcaacgaggccgtggacatggagaccatccacaagctgaagtaaggactgcgatgttgtggctggaaagaatgatcctgaagactctgttcttgtgctgctgcatattactcttaccagggaagttgcagaagtcagaagaagcttttgtatgtttctgggtttggagcttggaagtgttgggctctgctgactgagagattcccttatagagtgtctatgttaatttagcaaacttctatattatacatgattagttaattgttcggtgtctgaataaagaacaatagcatgttccatgtttatttgctacatatatgatgatgatgatgccattccctcgt

SEQ ID NO: 15345 - DNA, 1648 bp, Oryza sativa
  ref <308>: DATABASE ACCESSION NUMBER: AK065872
  ref <309>: DATABASE ENTRY DATE: 2001-12-06
gcggctgcactgatcgattccatcactctctctctctcgcctgctcgcggttgcctgtgcgttcgtctcgcgatttctcctcctcctcctgggatcatggcgatgtggagggcggcggcggggcatcttctcggccgcgcgctcggctccagggccgcgcacacatcagcaggcagcaagaagatcgtgggtgtgttctacaagggcggcgagtacgccgacaagaatcccaacttcgtcggctgcgtggagggcgctctcggcatccgcgaatggcttgagtccaaggggcatcactacattgtcaccgacgacaaggaggggctaaacagcgagctggagaagcacattgaggatatgcatgtcttgatcaccacccctttccacccagcctatgttagcgcagaaaggatcaagaaggcaaagaacctcgagctgcttctcacagctgggattgggtcagatcatattgatctgccagcagctgctgcagcaggtttaactgtggcagaggttaccggaagtaacactgtgtcggtggcagaagatgagctcatgcgcattttgattttgctcaggaacttcttgcccgggtatcagcaggttgttcatggtgaatggaatgttgctggcattgcctatagggcttatgatcttgaaggaaaaactgtggggactgttggggctggtcgtattggcaggctcttacttcagcgtcttaagccctttaactgcaacctgctgtaccatgacagacttaaaattgacccagaacttgagaaagaaattggggccaaatatgaagaggatctcgatgctatgcttccaaagtgtgatgtcattgtgatcaatacacctcttacagagaaaacaagaggtatgtttaataaagaaagaattgcaaagatgaagaaaggtgtaatcattgtgaataatgctcgaggagcaatcatggatacccaggcggttgcagacgcttgctctagtggtcaagttgcaggatatggtggtgatgtctggttcccccaaccagcaccaaaggatcacccatggcgatacatgcctaatcatgccatgacccctcatatctctgggactacaattgatgcacagctgagatacgcagcaggagtgaaggacatgctggacaggtacttcaaaggggaagacttcccggtgcagaactacatcgtcaaggaaggtcagctcgcgagccagtaccagtaataacccttccttgtgtgttgggtgtccatcctgtggccaccttcccgcagtgaagggaaacagagattcggataggaaccaaaacaccttgtgttgttgttgttgcctgagtgttccctgagaaactattggacaccggaaataatggatgcctgccatggcaaccatggctccgaagaataaaaagccctcggattaaacagttcagttcagttcgtctatgtatgatcttttatgtgctttctgctctctgtttttgatgtgaattttctagtccagtactccagttgcacataacaattgtacttgtacctgagtacctccatgccaggggccgggggcaccctttgccttactgcctcggcagtcggctggagggctgcagtctgttatctatggaatctttggttagttgttgcct

SEQ ID NO: 15346 - DNA, 1743 bp, Oryza sativa
  ref <308>: DATABASE ACCESSION NUMBER: AK065873
  ref <309>: DATABASE ENTRY DATE: 2001-12-06
gggactcgtggcgatcctgagcttctttgggcgtcgaattcctgtggtgcgcggccggcgtggtgcgttgcttgatgctgacggataggtggggagggaggagggaggcgatggagttcgggaacggcgggtcctcctcgtcggagcgcagggcggcggcggagggggcgacgctggcgagacagggttcggtgtattcgctgacgttcgacgagttccagagcgcgctcgctggtggcggcggcggcggcggtggtggaagcgggttcgggaaggacttcggctccatgaacatggacgagctgctccggagcatctggaccgcggaggagagccaggccatggcctccgcctctggctccgccgcgggggtgggcgtggccgtgggggcgccgccgacgtcgctgcagcgccagggctcgctcaccctgccccgcacgctcagcgccaagacggtggacgaggtatggcgcaaccttgtgcgcgacgagccaccgccggtgggggcggcggatggcggcgatatgccaccccagcggcagtcgaccctcggggagatgaccctggaggagttcttggtcagagccggcgtggtccgagaaaatccacccgctgcgccgccccccgttcccccgccaatgccgccgcggccagtcccggtggtccccaagaccactgccttcttgggaaacttccccggtgccaacgatgccggcgcggcggcgctgggctttgcgccgctcggcatgggggatccagccttgggcaatggcctgatgcccagggcagtgccagtgggcttgcctggcgccgccgtcgctatgcaaacagcggtgaaccagtttgattctggcgataaggggaacagcgacctgtcatcgccgacggagccaatgccttattccttcgaagggttggtgagggggagaaggaacggtggcggagtagagaaagtggtggagaggaggcagaggaggatgatcaagaacagggagtccgcggcgagatcccgcgcgcgcaagcaggcttacacattggaattggaagctgaagttcagaaactcaaggagatgaacaaggaattggagaggaaacaggcagatatcatggaaatgcagaaaaatgaggtagaagaaatgataaaggatccatttggaagaaggaagagactttgcttgcgaagaacactgactggtccctggtgatgacgagtggtcgatggcatgcaaattcccaccttcatcagcgactgtgcataatttaatctgttgtaaaccaatggtggacgaacttgtgcttgattaatcttctagtttcatttttcctgctagctgattctgagaaggcttccaaaactgacatgtagattatgtgtagacgaatgaagctgtcagaacaacttcctgtaatccttgagaaaacttgtatagtgttgtctaggtttgtatcatgctagtctttctatctagtgtcccaccctagagaccagacatcttggatgagttcagaggtcgatttaagcaagtcatggggaccaagaatcatactgcaacctgcctgatgactagctaagctaggtagtatgtagcaatatctgatatctgtacctgcttcctgaagtatgtattgttatctagtgtatctgatatctagcgtgtaaactgtaaaggagtataagcagacctagttctcaagaaaaaaaagtataagcagacctactaattgcttataagcctgttactt

SEQ ID NO: 15347 - DNA, 1866 bp, Oryza sativa
  ref <308>: DATABASE ACCESSION NUMBER: AK065874
  ref <309>: DATABASE ENTRY DATE: 2001-12-06
gagcggcggcagcatcttctcttccccccctcgcagcctcgcgtctcgactcccttttcaaccctcctcccctccagtctccttccctctcttctcgtctcctctcccaccaccaccgcgccacctaccctcgccgcagcggcagccgcggttttaatgaaaagtagcacttgttaaagctactagttttgttagaaaatctaacatggggtcaggaaacctgatgatgaagaaggtggtgaggcccagctcttttgatttcgacatacagcttgataaaagttggacagaggatgttacttgcccaatctgtcttgattaccctcacaatgctgtcctgctaagatgtacatcttatgagaaaggttgcaggccatttgtctgtgatacagatcaaacccgctcaaactgtcttgagaggtttaaaggtgcatatgagctccctgccaatatgaaagtttcaaccattgcggtggctcctcttgatagtatccatattgtggctcctaatgtgaacaaccgcccaagctgcccattgtgtagaggagatgtcattggatggattgttatcggtgaggctcgtctacatcttaaccagaagaaaagatgctgtgaagaggattgttgttcattcgttggcaacttcaatgaacttcagaagcacacacaacaaaagcatccagactcacgcccttcggaaattgatcctgctaggcaagttgattgggagaacttccagcaatcttctgatattgttgatgtgctgagcacgattcatgcacaagttcctaatggaattgttctgggagattatgtcattgagtatggggatgatgaaactggagaagaatatgaagttttcaggcgggtcagaaggcactggtggtcttttatgtttttcaggggattctctagatcttcaagaagacgaagaagagcaagggcaagggaaagaagaggcagtggaaggaggaacagcaatcaggcacatctcgaaagctttaacctcgaggttcccacacaatctgttgacttgagagaaatcagatttgatgaaattgatgatgaatacatagtcacaggggccatacctagtattgcaacacctggaagaatggctagtttccattacagggatacaagatatggacgataaatggtgtacttgtaggaccagctattaaaaaggagcatagtctttatgtgatgcagcgatcatgagaacattgtacctctgctcatttacatttcttttcgacctctatcgttgctaggtgctgccctgccccccagcctaaacttcctgtgcatataaattagcaacagaactctccattgatcgttcgcaacaggtttcatgattctagtttcattttgtatatatccagcacccatctctatagcgatgttggtgaaaacttctgtttttggaaaatgctggaaaaatgctgcttggatgtagcagacttcataggacattcccagaacaagattgagttcattcccagtggtttgcctggagttgcttctgtttcgatgagtagacagttacagttttcagttgtacaactgaaaactgcaactgccactgccactgccactggtcaattgctcaaaacggccttagccacaacagttacaagatttctgctgcttgacccgtgaacagccacagtggctggcagctttgagctcacgacgcatcaggcaagcgtctggaaagagtgctgtgctgattactgaagaaaagttgttctttgcttgtgatgatagcgtttgctgatgtacttgcgtgttgaaggcacccaaaagcaaaccaaaccagcaatctctgatcgatctataatatgcagtgtgttgtggttt

SEQ ID NO: 15348 - DNA, 1822 bp, Oryza sativa
  ref <308>: DATABASE ACCESSION NUMBER: AK065875
  ref <309>: DATABASE ENTRY DATE: 2001-12-06
gactctccttccctctcctctcctctcctctctcgccatctctctctcctccgatctgcgcagccagccggagccaccgccgcctctctgtcgccgcctcgcccgcgggggctccggcgaacgggccgcccgcctcgacctcccctccttcccgtcgccgagctagcctctccacgctgcgcggggccgcctccggcgagcaggctgggcctcgggcctcggggcctcattccaccgccctgcgcctctcggttcggatcggcttgaaggtgaaggtatggacttcggtgattctagacgcaagcctaatgtcgtcgggaagttcaccgtagctgttgcactcacggtcatgtgcatcattgtgttgaaacagtcgcctggttttaccagtacaagtgtgttctctcgccatgaaattggtgtgactcatgtgttggtgactggaggagctggatacattgggtcacatgctactcttcgtctacttagggacaactaccgagttaccattgtggataacctttctagagggaacatgggagctgtcagagtccttcaacgtttgtttccagagcctgggaggcttcagtttatttatgctgatttaggcgatgcgaaagctgttaacaaaatattttcagaaaatgcattcgatgctgttatgcactttgctgccgttgcttacgttggtgagagcacgttggagccactgaggtactaccacaacataacatcaaatacattgacagtgcttgaggcaatggcagcatataatgtaaaaactctgatatactcaagtacttgtgcaacatatggtgaacctgacacaatgcctatcacagaagcaacccctcagaatcctatcaatccatatgggaaggcaaaaaagatggcagaggacatcattttagatttctctaagagatcagaaatggcagtcatgatcttaagatacttcaacgtcattggatcagacccaggggggcggttaggggaagctccacgaccagagctgcgtgagcatggacggatttctggtgcttgctttgatgcagcactgggaatcattccaggtttgaaggttcggggaactgattaccctacagctgatggaacttgcataagggactatattgatgtcacggatctcgttgatgctcatgtgaaagctcttgataaagctcagcctggcaaagttggaatctacaatgttggcacaggacatggtagatcagtgaaggagtttgtagaagcatgtaagagcgcaacaggagctagcatcaaggtttcattccttacccggagaccaggagactatgctgaagtttacagtgacccatccaaaatccatgacgagctgaactggacagcccgttacattgatcttcgcgaaagcctttcaactgcatggaaatggcagaaagcacacccgaatgggtatggatcggcctgattcagggtttaatagattcagacttaaggtacacagattctcaggtccatgtgcagaaatcatatatccttcagaaaattggttcttcagcacaaacatagtgccaggcacagaagtgttctgaatttttttggcagcatttggaagaagatacagaaagaatggcccctctattcctggcttaggatcatacatatagttttttttttccttgacattttttttaatcttttctactcgttaaagcataatataataaccaatagaaaatgtgttgtagacaaggtagataactatcatgtatgaacgttcatggtgttgaatgaaaggatatatgaataagtagatgtttgcttattagtggaagct

SEQ ID NO: 15349 - DNA, 3499 bp, Oryza sativa
  ref <308>: DATABASE ACCESSION NUMBER: AK065876
  ref <309>: DATABASE ENTRY DATE: 2001-12-06
gaatcctccccgatagccgaagccgaagccgaagccgccctgctctgacacctcgattcaccccgcctcgccgccggccaccgccgccgcagatcaggcggctccagcgggcggtagggctcctcctgtaggaggagttggtgggtaccgtcgcgttcttctttcccctagctaggtctcgccagaaggaggaggaggcggtggctgcggcgcggtcgccatggaggcatacaagctctgggtgcgcaagaaccgggacctcgtccgctccctcgagtcgttggccaatgtaaaccgtaacctctgatccccaatcgaatcgactgtttccttttgtttgggggggggggggggggtctggagcttcgggagttcgtgatccgtagttcgttgtgtggagctcgtcggtccggagggagctcttgttgggggtttgtagggggggtgtgggttttggttggaatcgactgaattggggcgccgtggtggctgactgggagttggagctggggccagctgggttttgggcgaattcgtgtggtttgtgctgtctcttgtcgagcacaacatgagagggttaattcaacttcgttattttcctgcaaattttcatcttgattcaatgattctattccagtgtcatggaatttggttagaggggtgcagatttattgtaataacattacttgaatcgtaccaggatatcactcatctgaagtatttttatcaggggctaacgtggatacttcctgagcgctttgccaactctgagatcgcaccagaagcaggttcggtaaatgatcttttagtagaagtaacatttagcatcactacatcactatttgatatgcttgctgctttgtcttgtgcttcacctttgagccacactaacgtgttatatttgcaagcgcaaaacgctatttccatatcatgtgttattcagatgaaaaatagggtacaagtatcttggcatggtaactggtatttttggatgctagaaagtatagtatattggaataaatattatctaagatgtagacgttgtatatctaatgagttttgagatgatggatactcaaatgtcagtttgggcgttatgttttgacatgtgatgcacagtggccattaccacatgatgcatgtgactgaatattgatatgcccatggttccatcgccaagtactgttctctagaatgatatctagttacacataattttccaactttgtattgtgtctgggtgttagcataactgcttcttgtttgtatgtttgtgtaaccactctcctaggtcttggataacacatgccgtgaagctggaagaaatcattagccttttgtggatcaggcaaagattgtgatcaatatcgttgacacaaaaatactccattatatgttgcttctgaccatcttctagtcgttgaacattgttaactatttagtgctaatacgatcactgcttactagatttggccttttgtgtcatatagaggaaacaaacatggttcttactatcatctcgttatttatttatgcaaattattaagtatacgaccttgtattaagtaaaaaagctggacacctgttccttgtatacggccttgtagacaaattcttataacaataacactgaaaaaaccttgagttataccgaaaggatatgtaagtgttttgccgatactattataattttctttgcatcacaaggtgacagtcttcagccacaaaatcttgagtatgttcacattctgaaaagatatgtaactgttttgacgatactattctccggcgaacttgtattgttaaatgcactggcagtaaaactattcattgctaacttaggaatatgagtaccttccagttttgttattattccaaatcaaaccattatagggcctagctctttaattttgctaaggttttcccaaggatactttatgctgtacgaaacaaatcaacacttgttcactttgcaaacacatgatagattgttcttgggcactgttttcttctcttacttaaatgatgtattttgagtgttacaggcttgatcatttcacattaagacatcttttttttcctgaacagtatatgcatttctgggtatcgtgagttctgtcaatcagcacataattgaaacgccaactgatggtcagacattggcctccaaagagcaatctatcccatggtcccttgttgtctcagtacttaaggatattgaggcagttgttgaggtggctgcccagcactttgttggagatgatcgcaaatggagctttcttgctgttacagaagctgtgaaagcaggtgtcaggttagctgctttcggggagagtggctacaagatgctcttacaaggaggagaggtggcaaatgaagaggagattaatattcttgatgaaaattttggagccaaaagtaatggagtaccagtcatttatccgatgaatggccatttccaaaatggtcatggggttgcatctaatggtcttgatggaaaggctggatttgtatcaaagagtctggagggaagagctgtagctgctcttaacaagtttggccagaatgcaaagatgacgtcagatcccatgtggatgaagaaggctctgcctcctcctgatcctcctgcgatggtggttgagaagccaactttggcaagtatttggtctgctaaaggaatttcagggcggttatttttgttaggagaagttgtccacatattcagaccactgctatacgtacttttgatcaaaaaatttggaatcaaatcatggaccccatggttagtgtcattagctgtggagatcacaagtcttggcatccattcacgtgcaactgatcttcatcaaagagggggaaaagttcatcagctctcatctgctgagagggacgagttgaaaaggcgaaagatgatgtgggccctttatgtcatgagagatccattctttaccagatacaccaagcgccatctccagaaggctgagaaagtgttggatccagtgcctcttattggtttccttacaggcaaactcgtagagctagtggagggggctcagacacgatatacatacacatcgggctcataaggataatggacaagcaggcagatgtcatgtctgagagtttccttaacgatttgccatgattaaccttttgtggttcatgtgatctggttgatgggttttgttttgagcttgatcctaatcctatctgtacatgccatttccttagcaagatttggcattcctacctgatgtcttggggctgcaaagctgttgcggccactgtaaactctcctctctcctctggtggcagctcagctgagaatctaactatactatagtatatcggtgtaatattaagaataggcacatcatccctgcaacgataccgtgtatttatttaccaattaccatgcaggacatactggaacccagaacaagtccaagagaaaattgcttgggtttttcatgattctgttgattctgtgttgcaatct

SEQ ID NO: 15350 - DNA, 2254 bp, Oryza sativa
  ref <308>: DATABASE ACCESSION NUMBER: AK065877
  ref <309>: DATABASE ENTRY DATE: 2001-12-06
tggaggaaaagaagagcacaaaccccaattcccaacacctccgcgacgcgagcgagcgaagcacgaggaaaaaaaaaaatccccgaatccgcgacgagcgaggcggcgagctcgctgcttcgatcgatccggagagggaggtagggaggagtgagcttgctcgctgttgccgcggaggcggaggcggaggcggatcggggcgccgcggctgctcggctcggcggcggcatgatggatccggagatgatgcggctggcgcaggagcagatgagcaagatgtcccccgctgacctcgccaggatgcagcagcagcttctgtcaaatcctaacctagtaaagttagcatctgagagcatgaagaatatgagagctgatgacttcagacgagctgcacagcagatgaatcaaacaagaccagatgaaatgcttgatatggccgaaaaacttgccaatgctaatcccgaggaggttgctgctatgaaggttcaagcagagcaacagatgtcatatgtgatatctggtgccaagatgttgaagcagcagggaaatgaacttcataggtgtgagcagtatagtgaagctgctgccaagtacaagcttgccaaggataacttaaagagcataccatcgcaatcagcgcattctctgcagttggtgtgcacccttaatttaatggcttgttacctgaaaacacggaattttgaggaatgcataaatgaaggctcagaggttctaacttatgattcaagcaatgtcaaagcatactaccggagaggccaggcatacaaagagctaggaaacctggaagcggcggtgggtgacttgagtaaagcacatgaactttccccagatgatgaaactattgctgcagttctgagagacgcggaagaaaaacttgcagtggaagggaaaggagcgaagcatccaaaaggtgttgtcattgaagaagttgtagatgatgcttctgagccatcaagcagtcaaagaagttcatcccctggatacactgtttcacaacctcctgaagaagggaactctagaccttcagggtcttcaagcatagatgctaatggcttatcgaagctgggaatgcagggaatgtcacctgaattagtaaaaactgccagcgatatgattggcacaatgaaaccagaagaacttcagaaaatgtttgaagctgcttcttcgttgcacggaacaagctccagtcctccaaatttgggacctaatatgccagaaatgtctcctgagatgtttaagatggcatctgacatgattgggaatatgtctcctgatgaattacaaaatatgctgaattttgcttctaatatgggtggacctagtgcttcccccttgagaccagagaataagcttcaatcttcatcaagagccacaacaagtagtacttcccagagatcagtggataacagccaaccttcatcttctcaaaatgtcatggaaaatcctcatgaaatattaagcaaccaaaggatgggtgaatcatcatcccctggtgcaccttctacagctgatatgcaggaaaccatgagaaatgctatgaaagatcctgcgatgcggaagatgtatgcatccatgatgaagaacatcagtccagagatgatgtcaagcatgagtgagcagtttggaatgaaaatgacgaaggaggatgctgccaaagctcaagaagccttgtcttcattatctcctgaggctttggatagaatgatgaaatggatggaccgagcacagcaaggagtagaagctgcgaagaaaaccaagaactggctgttaggcaggaaaggattggtccttgctatcgtcatgctgatcctggccttcatccttcgccagcttgggttcatcggtgggtgatgtcctgaatgcagagatcggctgtaactagcttgcaatttgcaaataatcgtcgggtagcgatattgcgtgcttccactttctaacacctgctgaaattctccatgggaaggaaggggtatgaattcgatggatctgctgctttcttgtaacactgttcgttcttattctttttgtcgtgtcgagtcataattatttgtagcatcaattcatcggattcttgtatttcgagagcgtgaaggaatcgacttcaaattgaggtagcactgttattcagattcagataacttgccgacatgtaatgactaaatgagataccactgttgttattatgcacctgagatggttgagaattttttgctggaaggtcctgcacatgtgc

SEQ ID NO: 15351 - DNA, 2217 bp, Oryza sativa
  ref <308>: DATABASE ACCESSION NUMBER: AK065878
  ref <309>: DATABASE ENTRY DATE: 2001-12-06
gacccatcgataaaagccgccccaaaacgggcaacacctcgacggcgccatcgccaccatcacccacctcctctcctccccttcccttccccgcgagctccaacgcccacaaaccctcaccctcccgcaaaaaccctaatcccacctcctcctcctccccccatggcggccaaggcggcggcgctctcctcctccccgttcgtctcctcccgccgcctatcctcccccgcggcgtctctccgcgcccgcacgccgaggtgcgtgatggggagcgagcaggtgagggtggtggtggaggaggaagggaagacgaagaagaggatgggggtggcggagccgaggagcgcgccccccgcggtgtggacgccgcgggcgcccgcgcaggaggcgaggctcgccgcgctgcgcaccgatgggcgggattccaggttgaagatcttctccggcacggccaatcgccccctcgcgcaggaaattgcttcttacttgggtgtagacctgggtaaggtcctcatcaagcgttttgccgatggggaaatctacgtgcagctgcaggagagtgtgaggggttgcgatgtgttcttggtgcagcccacctgctcccctgttaatgaaaaccttatggagctttttgtcatgatcgacgcatgtcggcgggcgtcggcgaggtctattactgttgtcattccatactttgggtatgccagagctgacagaaaggctcaaggacgtgaggccattactgccaaactttctgctaatttacttacagaagctgggagtgatcgtgtaattgtatgtgatattcattccactcaagcattgggatacttcgatattcctgtggatcatatacatggacagcctgtgattctggattaccttgccagtaagacaatatctaaggatcttgtggtggtttctcctgatgtgggtggtgttgtcagagcacgtgcatttgctaagaaattatctgatgcccctttagctatcgttgataagagaagacagggtcacaacatgtcagaggtcatgcacttaattggtgatgtgaagggtaaggtcgccatcatggttgatgatatgatagacacagcaggaacaattactagtgcagctgctttgttaaaacaggagggagcagaggctgtctatgcttgtagcacacatgctgtcttcaggtttggcagttggtttattgtaacatccatgatccatgtaatagtattgattcattggcttgttgcgaaggaaccatgttatggcatgattaggcagattggctttatgtttgatcaatataaaaatgacagggtagagcaataattttactagattccacttgagcacaccaatcacttagtgctagtaagtgggagtctggaaaagaggttggctttaatctagttgagtgcggatctggttcttgttgactctatttcattagtagtcatgaatctgtgccacacatatcagcatatgtttttctggctattttgatttaggaagggacctcaagtcctcaattgaagtcttgaattttattagcatcaacatgcatgatgtctttttacatggtaccgcacagtaatttgacttcaaaataatagcaggatgtgttgccacttacttcatttgcaaaaattgttgtccttttgtattcctgcactattttgtaggcataaaagtaagtcgtttaccacacctactttttcccactagcactgtctttgcagccctcctgcgattgaaaggctctctggaggcatctttgaggaagttattgtgacaaactccattctgctgccagagcacaaatgcttcccccagttgacagtgctctcaatggcgaaccttgtggcagaaacaatctggcatgttcatcgcgatggctctgtgagcagcatatttcaatagcggcggatgctatggctaccgcgatgccacatttgtgtggtgtggagaaggcacctgatggttgtgcccatctgcgtaggaatcaattttggtgacaagactaaataaggttgtagtgccgtgtaggcatcacacatgtatcgtgtgatcaattttgttcttgcacccactaaatagtgttttcctgttaactcgacgcaggatatccattgtatcaagtataagagaatcagtctcgtgcagttctttcatcctttagcaactgttgagggacaaggaaaagatttgtgctgttcaccg

SEQ ID NO: 15352 - DNA, 1553 bp, Oryza sativa
  ref <308>: DATABASE ACCESSION NUMBER: AK065879
  ref <309>: DATABASE ENTRY DATE: 2001-12-06
tgagataaaaaaacagcgccattgctgatggaacccttcttactaagaattgggacactgagccactgcttcctttggtacaaaatgttgcaaccattccagaaacaagcagtgcaaacaattcaagtccctccttgtcgacatctaccaataggagacgccaaaaaagtaggtgggagcctgttgtggaggaaaaggttacagataaggtggaaccggtaaaagggttggtgaatggtaccacccacaataatttggaagccaaaaacagaatgagtaataactgggattccagaaaatttttccagtctcatcatgcgactgcaaacaaagtcagtcagcggcctgccaagaagcaaaagatcagcagttactcagatcaaatgcaaaatggaaatgcttcaagtgatagtgataaggagcaggatctaaccaaatattatgccagtgcaaccgcactagcaaattcacctgaggagaagaagcgcagggagcataggtcaaagcgttttgagaagaaccagaattcatcatctaaatcgaggaattctgcagcaagtaaagatgtaatggctaatatacatgcacgaagagctgtttcagctcttcttgccagaagctgtgaagatggcactaccttggctgtggaggatatggattgggatgcattgacagtaaaggggacatgccaagaaattgagaaacgatatctccggcttacatcagcacctgatcctgccacagtaagaccggagcatgtcttggagaaggccctttccatggttgaaacatctcaaaagaattatctttataaatgtgatcaactgaagtctattcgccaagatctcacagttcagagaatccagaatgaacttactgtcaaggtttatgaaactcatgcacgtttagcaatgcaggcaggtgacctacctgaatataaccagtgccagtcacaactgaagaggctatatgcagagggaatcaagggctgttactttgaattctctgcgtacaatttactctgtgtcatgttgcactctaataataaacgagacttgctgtcatcattggcaaggttatcgaaacaagccaaacaagatgaagctgtcaagcatgcccttgcagttcattctgctgtttcatctggaaactatgtcctatttttcaaactatacaagcaggcaccgaacttgaattcttgcctcatggatctatatgtggagcgaatgcatgtctaaatcatatcgcccgactataccagtgggatatgttgcacaaattttgggattctcaagaattgatagtgaagcatcagaagagtgtgaaatgtggttaaaagctcatggtgctattctttcaatagacaacagcagagacttgcaattagacacgaaggcttctactactacactttacatgccagagccagagaatgccgtcgcacatggtgatgcctcacttgcagttaatgactttttggcgcggacatagcgacaaaaattgtaaccatgatagataagtccagtatgtttgtgccgatctgtgagcctgtg

SEQ ID NO: 15353 - DNA, 729 bp, Oryza sativa
  ref <308>: DATABASE ACCESSION NUMBER: AK098941
  ref <309>: DATABASE ENTRY DATE: 2002-08-28
gtctctgtctgttctgccgcacgagacacgagagccacggatagctagacacagacggcgcgcggagacaggggcaatggacgggcatgggaaggagggcagcagcaacggcgccagcggcggcggcggcggcggctggagcgatcagtgcgacgtggtggccagggccttcgtggagtactactaccagacgttcgacaccaaccgcgccgcgctcgccgcgctctacggccagacgtccatgctctccttcgagggacacatggtggccggcgccgaggagatcggccggaagctgttggggctgcccttcgagcaatgccggcacgccgccggcaccgtcgactgccaacccacgccgtccttcccgggaggcatcctcgtcttcgtcagtggcaacctccagctcgccggcgaggagcaccagctcaggttcagccagatgtttcagctggtgcccaacgagcagggaagcttcttcgtgcagaatgacatattccggctcaactacggctagcagcaggttgcgtgtggctgccgaaaggaacagggtgctaggatgctttgggcccatgtggatgcgagattgcgagaagcttctccgggccgtctctaccgtttcgctttcatcctctgtacttttaccttcgttcatgtagcatcgtagaataagttgggcgatgaccgtgttgtgttgtgccttctcctgattgttaagtaattccgtgg

SEQ ID NO: 15354 - DNA, 1483 bp, Oryza sativa
  ref <308>: DATABASE ACCESSION NUMBER: AK065880
  ref <309>: DATABASE ENTRY DATE: 2001-12-06
gatcctttctccgactccgctccaatgccgttgcctctctcctccccctccccctccccctcataagcgcgtgcgagcctcgcctcgccctcgcctccgcgacccaaaccctagcctcccagccccatcggaatccgccagctcgagccggattcgcctccccacccacccacaccggcggggcagcggggatccggcggcggggagcgagctgcgcgtttttttttcctccggggcatggtcgtcgccgccgccgcctgatcggctcaccttgtccgcaccgacgagccgacgatggggatgtcgggggccaccaatggctgcggcgccggcgagtacatcaggatcccggaggacgtggaggccgggttggggaaggaggcggggaagggggagggggagggggagtgccccgccgtgctgcggtggcgcgcgatccggtggtgggcgcaggtcgccgccctcgggatcctcctcgccggtgcggccgccgccgccgtcgtcttcctcggacccctcgtcattaaaaaggtgattgctccggttattgaatgggagtcaagaactttcagcaggccagtcattgctctgatatgtttcggcgcaatcgcttttttcccaagtgtgttgctaccttcttctccttttatgtggatggcggggatgtcctttggatatttctatggctttttgataattacagcagcaatgagcataggcatgtcgttgccattctttatagggtccgcattccattctaaaatacacaggtggttggagaagtggccgaagaaagcagcttttgttagacttgctggtgaaggggattggttccatcaatttagagcagttgccttacttaggatctctccatttccatatctagtttttaactatgcctctgtggctacaaatgtcaagtatgggccatatattgctggttcaatggctggaacggtacatggaaccttccttgcaatatacagtgggaaacttctccaaagcctagccgtagctactacccaaggttcattcttgtcggtagatcagataatttacaacggccttggcttctcagttgctgcagtttctaccgctgcaataactatttatgcgaagaaagcacttcaaaaactccaagcagatgatgagctgtgttgactcttgatgagcacaggagatcctactccggatcagaccttggtgctagtttttccttaaaatgtactatatatatacagaggtgctactaatctggtttctagtgtctgctacctgactacatttgatctgagagagggtactgcaacaactgtaaagagaaaatagagaaccagaaaaacactcccccttttttttttctctttttgtttttgtttttaacttgtagagaaagtgctgccacaactatcaatttcatcaatgtattgaaccgtggtctgtggtgcaatgtaaattcgtaatctgctgctttctcgagtgg

SEQ ID NO: 15355 - DNA, 1787 bp, Oryza sativa
  ref <308>: DATABASE ACCESSION NUMBER: AK065881
  ref <309>: DATABASE ENTRY DATE: 2001-12-06
gtctcgccgcttcctccgctccgccgcagccaacccctctctgcctctttcctctgcgcctgcgccgccgcctcaccggcctcctcggctctccaccccacgcgccgccgccaacttcctccatccattcatccacatccgcggtcaatggcgtcgatgcggcattggcgacaacggtatgttgtgctcgtcaatggtgagttcttggctgctcgctctttgcctggatccccaatccagtttgtgctcggtttcagtccccgaatccctcctctgctcaatgttggggatatgaccaagaccaatacatatttggggggttactacggctaaggtcaatccctgtgttgtcaagctcaacatagtacaagccaagacctggatcaatcaggttcttctttgatgtgaaccgacgagtaaagccggtgaccttattccagccaaacttggctccaggaagcaaaacatctgacggatagtcaaagctctgccacaacacattgggtgagcttcctatcacaaggtttccatcgtttgagagaacgacactggtactgctgttcatggtggtggctgatgtcctattgacagtactggaccagattatggatgcattgcttgaggtgacaaggttgccatcttttgatagtttcagctgcgtttgattgagctggagttcagtgactggactatccctattagcaacccagacagtagtaaaaactgagatgttactgaaccatattccaacataccaattgggagaggtgatgttgccagacttaacgacgacgcttggctggaagaagccgagcgtgaacctgccgtttcttgacacaagcttgtcaccaacggcgagcacttcgcctgccgcgagagtatcattcgtggcggcagagcatggcggagtaacgtgcagggagaagagaagaaagccaagcgatatgtaaagcagggtggtcatggcgaagaaaatgggatggagaaagcagagaggaagtatacatatgtgttgtgtgctgctcagctactcggagaaggaagagcagggcatatatacaataaaacaagcaggttggtcagaacacacgcatgggcatagatgcaggttggattgacaaggaagaccatggcaacgagccaacgacacaggctagttgcaggtcaagttcagactgatgattcagacaggagtaccaacttggcaacttgagctgggctgtggtacaaaaccattggggcaagcagctagctagtctctttcaaatttagttagctagtacatgctccaatgagaagctttttcattggtcaagccagccatggccagtcaatcacctggggctttcaccaatttgctgctgttcgtagatgcatgaaactgcctaccagcccattgattcagagtttcagacggaatcaacacgtgcaagtgtgatgatgcatctttggtgctctctccgaataacgcggttttttgtttggtgaccggagattggagtgtctccttgcattattgcttgacagatttgaatttctgaaggagaaaaatacaatggctcgtggcagcaaatatatatgcatggttgtccatgaaaataacttttagcggtttgtctctgttaggcatttcaacaaacgtcatctgatgtgtttgtttctgcaatattgatcatcatattgtacaaacttcaggcctatttgacatgatatgtgaccattctcgcaatccatgtacagatatactggtttagtaccaagctgaatgacatggataaaattagtct

SEQ ID NO: 15356 - DNA, 1506 bp, Oryza sativa
  ref <308>: DATABASE ACCESSION NUMBER: AK065882
  ref <309>: DATABASE ENTRY DATE: 2001-12-06
gaatcaagaaatccacatttctcctcggaaagtcaaaggcaagaaacaccatggatgccactgccatcggcaacggcgccctgcactccaatggcgccggcgccgacaccaaagggaagccgatcaaatgcaaagcggcggtggcgcacggccccggcgaggcgctggtgatggaggaggtggaggtggcgccgccggcgaggatggaggtgcgcctcaaggtgctcttcacctctatctgccataccgacctcagcgcctggaaaggagagaacgagcttcagcgaaagtttcctcgcatattgggtcatgaggcagcaggggtggtggagagcgtgggagagggtgtggaggatcttgcccctggagatcatgttgtccccatcttcaccggcgagtgtggtgcgtgcacctactgcgagtccagcaagagcaacctatgcaaaacctaccgtgtcaacccattcaagagcaccatggtcaccgatggtggcacgaggttcaccatgatcgaccgctcctccggtgcacacaacccggtctaccattttctcaacacttccacctttgctgagtacactgtgattgactccgcttgcgctgtcaagatcaaccctaaggctcccttggagaagatgagtctcctcagctgtggggtctccacaggagtgggagctgcatggaacactgcaaacgtctccaaggggtccacagtggcaatatttgggcttggtgccattggtcttgcggttgccgaaggtgccagattgagaggagcatctcgaatcatcggagttgacataaaccctgaaaaattctccaaaggcaaagagatgggcatcactgacttcatcaactcgaaggcatctggcaagcctgtccacgaggttatcatggagatgacagatggcggtgtcgactacagcttcgagtgcaccggcatcaccgatgttctacgggaggccttcgtttccacacatgatggatggggcctgaccgttgtgctggggatccatgcaacgcccaggatgctgccgctgcatccaatggagttatttgacggccgtcggatcactggctgcgtttttggtgacttcaagggaaagtcccagctgcctgaaatcgtggagaagtgcatgcagggtgagattaacataaattttgatgggttcataacacaagagttgcccttcgccgacatcaacaaagctttccagctgctggaagaggggaagtcactcagatgtctgctccatgtctgatgaaacttgtggattgtaaatttgaatacacaataaatgaatcataaatgttttcgcggtttcaaggtgtataattttcatatgcatgtatgttttgtacataaaatgggttgaacttcgttaaagaaaagacaaattgttaattagtagaatgcagtattaatatttgtaacaggtgagtgtgggtgtgcagtcgcgagaattgagcacacgattggttacatacatgctcgagttgctagcc

SEQ ID NO: 15357 - DNA, 1898 bp, Oryza sativa
  ref <308>: DATABASE ACCESSION NUMBER: AK065883
  ref <309>: DATABASE ENTRY DATE: 2001-12-06
gatcgccgccgcgccgcgccgcgtgcgaatctccggcgaggatcgagggcgcctctggtcccgtctggtgtttggtcagccatgtcgctccgcgtgctgaacccgaacgcggaggtgctcaacaagtcggcggcgctgcacatgaacatcaacgccgccaagggcctccaggacgtgctcaagaccaaccttggccccaagggcaccatcaagatgcttgtgggtggagctggcgacatcaagctgaccaaggatgggaacactctcttgaaggaaatgcaaatccagaacccaacagctatcatgatcgcaaggaccgcggttgcacaggacgataccagcggtgatggcacaacctccactgtgctttttattggggagcttatgaagcaatctgagcggtgcattgatgaaggcactcatccacgttttttggttgatggttttgatgttgccaagagagcaactcttgaatttctcgagaagttcaagacatcagttgtcatgggcgatgaacctgacagagagatcttgaaaatgatagcaagaactactctaaggacaaagctgtacgaaggattggctgatcagttgactgatattgttgtgaatgcggttctatgcatccgcaaacctgatgaaccaatcgatctttttatggttgagataatgcacatgcgccacaaatttgatgttgacacacgtctggttgagggtctggtcttggaccatggttctcggcaccctgatatgaaacgcagggcagagaactgttatatcttgacctgcaatgtctcactggaatatgagaaaagtgaaataaatgcaggatttttctactcgaatgcagaacaaagagaaaagatggttgctgcagaaaggcgccaagttgatgagcgtgtgaagaggattattgaattgaaaaataaggtttgtgctggaaatgataaaaattttgtggtgatcaatcagaagggtattgaccctccatccctcgatctcctagctagagcagggattattggtctccgaagagcaaagaggagaaacatggagaggcttgtgttagcatgtgggggtgaagctgttgattcagttgatgatttgactgaagattgtcttggctgggctgggcttgtctatgagcatactcttggtgaagaaaagtacacctttattgagaatgtgaaaaatcctcgctcttgcactatactgattaaagggcctaatgatcacaccattgcgcaaattaaggatgctgttcgcgatggtctaagatctgttaagaatacggttgaggatgaagtagttgtgctgggagcaggagcatttgaggttgctgcgaagaagcatcttattgacaacgtgaagaaaactgtcaaaggacgagcacaacttggggtggaggcatttgctgatgctcttcttgtcatacccaaaacactagcagaaaattcaggtctagatacccaagatgttattgtctctctccagaatgaacatgatcgtggattggtggtgggattgaaccatcactctggcgaaccaattgatccccaaatggagggcatcttcgacaattactccgtgaaacgccagatcatcaattccggacccatcatcgcgtcacagttattgcttgtggatgaagtgatcagggctggccgcaacatgaggaaaccaacctaatactttccctacctgccgctgagtcctctgttttgtgggagatattacgcattttgtttggttattttgcctttctatctttagtttgtgcgtagtagtgaggtgggtgaaatgtccggaggttctgctagtttgttcctctttgactgtaacagatttcacttgtaatctttgtcacactgtcatttatgccgtcctgatgatttggg

SEQ ID NO: 15358 - DNA, 1223 bp, Oryza sativa
  ref <308>: DATABASE ACCESSION NUMBER: AK065884
  ref <309>: DATABASE ENTRY DATE: 2001-12-06
ggtttttccttcgccagttcagctcgccatttcgccatggcccccgccgccgcatcatcgtccgcgctgctccccgcggggaccttctccaccgcccgccccgtcgcgggccggcccgccggccagcgccttcccacgagggtagccgccgcgagcaggacgacgacggcgcgttctcctgccgcctgcctctccgtcgggggcaggaggcggggagcggaggccgtccgcgcgtccgcggggggagcgccggccgcgtccctcccggcggcgctgctgttcgactgcgacggcgtgctggtggacacggagaaggacggccaccgcatttccttcaacgagacgtttgccgagagggaattaggtgtgagctgggatgttgagctatatggagaattgctcaagataggtggcggaaaggaaaggatgacagcgtatttcagcaaaatggggtggccagctaaagcaccaaagactgacgacgaaagaaaggagtttattgcttcgctgcacaagaggaaaacagaattattcatggctctgattgagaagaagttgcttcccctccgtccaggtgttcaaaggttaatagatgaagccataggaaaaggagtgaaagttgcagtatgcagtacttcaaatgagaaagctgtttcggcaatagtttcatgtttactgggccctgatcgtgcagaaaaaattaccatatttgctggagatgtggttcctcgtaaaaaacctgatccagcaatctacttacttgcagcaaccacacttggagtcgatccatctagttgtgttgttgttgaagacagtactatagggcttgcagcagccaaagctgctggtatgaagtgtatcgtaacaaaaagcggatacactgcagaagaggactttgcaacagctgatgctgtgttcgattgcattggtgaccctccagaagtacgctttgatttggagttctgcgccaacctcctccagaaacaatttgtaagctgaaggagcagacggtcaatttcacccatatcatataaattctataaattcttgcccaggattatggaaagcggaaatggtctctataaaatcattccaaatacaagagtcaagaggaacagcattgctttatatactattgatatttgttatttatgtatagaggagtacatatatgaacataatagaataagaaatcgaaatatctttaattgaaatttgttact

SEQ ID NO: 15359 - DNA, 3391 bp, Oryza sativa
  ref <308>: DATABASE ACCESSION NUMBER: AK065885
  ref <309>: DATABASE ENTRY DATE: 2001-12-06
gttcttttgcaggcttgcaggttgaggagcactagacgctgtggagtggagggaggcggagatggcggaacagtagccaccatgagctcctaccactcccatgctcatggcggcctcctccccacctcccgccgccgctagcagcagcgggcgactcgccagggtgcgcctccacgacctggcgccctacgatggcgccgcgacccccgcctacggccgcgccgtccatgccctctccgcctccctcacccgccacggcgccgccctcctcgacctccccgacgcccacgccgccatcctccgctgcgccctccaatccgctcgcgccttcttccgcgccaacgaccaacccgccttctacctctaccgcgcagggggcagcgcaagtaggacatccgatgacggcggcggcgacctggtccctgcttgcatggacgacgccttcaggtgtttcggtgaggctgcccgcgctgctctctctgcgattgctcgccatctccgacttcgtaccaatgtattcgaccacttgctcgatgatactccattgcctgttaatgaggtctcatcctcggagttgctggtggcttattccaaccaacacctccacaccgatcatgcttcttctactgcctgtctcggctcttcagtgcctcaagttgacaggggcttccttgtgctcattgcttctgatcatccaggaattgaggtttgtgacccaaatggccaatggtacctagcagatggcatttcagggcctggtgacctgttgcttctgactggaagggcacttagccatgttactgctggtttgcgcccaacttctcgctacaggatcacaaatgagactagagcatcactcacctttaggctaatgccacatgccaatgctatactggattgctctcctattgcagcagctgggcactgcgtaccccagatgtaccaacccatatctgcaagccaatttatggatgacttgtgtgctgaagaacgtgctgtttcgaatcattcggaagcaccttctgaatctcagggcagcttcattagtgaaccatctctcagaagtgtcctatcagatccattgtctggggcttttcttgaggatgctatggttctgttatgtggacactctttcggtggcctcatgctgaagaaagtcattgaaatggcaagatgcaccatttgcaatggagaagttgatccggccaccctgtttcctaatctcgctttaagagcagtagctacagtggtgaagatggaagatgataggagactctttcataatgctgctcttcgcaaacacaggaaagaggtgaccgaacgtatggatgtgctgaagagcactggaggtagcagaggcaatggtgagctggtgttggatgctgaaaaccctacatcacccaggggtgtgcagtatccatttgtagtgggcgagagggtcctgatcatgggaaacagaaggacgcctgataaatttgttgggaaggaggcagtcatcacatcgcagtgcttgaatggctggtatcttgtgaaggcggttgatagcggggaaagcatacggctgcagtatcggtcgctgaagaaagtgtcggagctgcagcttcagtcagagatgaggttgcagccactcaccttcctgcacaacaaataccccagtagtggcagctgagttgattgactatcatcagtcttaaaacaaaaaaaaaagaaaggagaagcatatactgtagcagaatagtcatgaggcatgcatcgccatcaagcgtgttttgttgtagtaatactaataaaaaggtcagttagaaaagtgtggtgatagttaatctggtgatgatatgaaaagggtctatcctattggaaggagaaatgtcatgtgggggttattaaaaggacataaagagtttgctaggaagttccaaattcctagcggtggatgcagcgggtcagccaagccaaaccacaaaccaaactgacttttctactgcactgcaacgcaccagtagatgccagttggtaattcttgatccaagcgtgaaaatgtgtaactggaccggctgggcacttgcagaaaaagtcgataaatgtgttgtgtttgctgtgacatcactacgtcagtgattgtttggatgtatgctcctgggaactcaattggactcacgataccgccatccatgtccatggcgctgagccttctcttcgccgctgcaccacgagctgttgcctcgttccgcgcctcttcggcgtcctccccggcactcgacagcggccgccgcccgcagaacgtccccggcgacttcttcgtcgatcaccgatgcatcgactgccagacctgccgctggatggcgccggaggtgttcaagagggtggacggaaaagccgccgtggccgcgcatcccatctccgacgaccacaggaccaaggccctgcaggctctgctctcctgtcctactgcctccattcacaccgagaaacctgcaaaagacattcttcaagtgcaaaacatgttccccctccccatcgacactcatcttctccctggtgtttatcattgtggttatcattctgaagactcgtttggagcaacttcttatcttataacccatccagatggaaacatactagtcgacagcccaaggtatacaacgaaactggcaaataacatcgaagaacttggtggagcacgctacatgtttttgacccacagggatgatgtagcagatcataggaagtgggctgagcggctaaaatgtgagaggattatccattcgggcgatgtagagcgtgctaccgtagatgttgagcggaaacttactggcaatggtccttggaacattggagctgatttcgaacttatccatacccctggccatacccaaggttcggtctgcttgttctacaaaccagtaaaggcgcttttcactggagatcacgttgcaaaatcagaagaatctgatgatttatatctctttcttatgtacagcaggcaaccagtgagcttgcaactggacagcatgagaaaattgttgaagttagacttcgagtggtttttacctggacatggctatcgaatccattataaagatgtacacgctaaggattcagcaatcgagtccctcatagctataactacacaagctaggggcatcttataattctctctaccttcagacttcagtgtacataaataacgatcaattctggaattaagtgaccaagaggaaatgtacttttttttgaaagaccagcgtaggcggctggcattctatttatcttagaaggagcaatgtacaaattggcgatataggaaatgtaaaaatttacacccatgatggcaaacaggtttgtcaccatgtctatgatcttctctaaatcttggtacctcccatgctcc

SEQ ID NO: 15360 - DNA, 1209 bp, Oryza sativa
  ref <308>: DATABASE ACCESSION NUMBER: AK065886
  ref <309>: DATABASE ENTRY DATE: 2001-12-06
ggcgattcctcgctcgcgcgaggcagagggaacgcctagagctcgcgctgtggagggcgtgcctccaactcgtcgtcccctcgcgccctctccagcgtcgacctcgttgccgtctcccgctccgcgtcactgacctcgatgtcgccggggagctcgtcgctgcgccgcttcgatccgtgccgccgccaccgtcctcgtcggagaagctcgccggctcgatggggaaagcgcggagaaggagaggagctcgaggtcgatgccgcgtccgacctcgccgtcgtcgccttgatccagtgggcctaggccggatctggccgctcagcccagcgtcgtcgccgtcgccgctcgggccgccgctccacccggctttgagaggaagacaaggtcgcgtggctccggtcgacgacgaccgtgccgccgctcgtcgtccgcgaggaagacgaggtcgcgcggcgacctccgcgaggaagaccccaccgagagcccgttgctgcggagcggggtagggggagggaggcgccggcgtctgtggtctccggccccaacgatgagaggcgccgccacgccggcgtccatgccttcttgcccgccgtcctcgccccggggcttcccgtccgccgcgtccccggcatcgttcggcgccactgccaccctcgccggcttcttccgcttcgggattaggggagtcggcgccggcggagggaggaggggacagccggcgccactcggccccgaggacgccgccgccacaggacccgctacctcgccatgcgcgcagccgtcccaccgtcgaggtcactgccgtccggcccgacaaggagaggagggggcgggcggttcgccgtcgtgcgccgccgtggagccgagtgagggagggcctcgtcgtcgtccacgctctccgctccgcgtcgccgacctcggtgtcgccggggagctcgttgccacgccgcttcggtccgcgccgccgccactgtcctcgtcggagaagctcaccggaggttgaggccgcgtcagagctcgccggcgtctgtgccttcttgcccgccgtcctcgcccttgccgcttgccgtcctggtcagtggcatgcgagaagaatggatagagatagagagggagagatgaatgtgaaaagagagatggtgggacctactaacatgggtgggacccacaaacatgtattgtgcactgtgaagtgtggttctttacggc

SEQ ID NO: 15361 - DNA, 1252 bp, Oryza sativa
  ref <308>: DATABASE ACCESSION NUMBER: AK065887
  ref <309>: DATABASE ENTRY DATE: 2001-12-06
ggctcgctttccctcgcggccgatgctccccgtcaccactgacgcgcccctccacctcccgtagttcttccgtcccatcgtcgcgcacaataaagattcgcccgagctcgcgaagcgtcgcccggtgcaacctccgcgacgccaagaatctctccccgtcccgcaccgtcgccatggctgccgcggccgccgcaccggcaagctctgagaaggaagtgctccccccttccctgacctcctcatcggagccccctcccctcttcgatggaaccaccaggttgtacgttgcgtaccactgcccttacgcgcagcgcgcgtggattgccaggaactacaagggtttgcaggataagatcaagattgtcgcgattgatcttgcagacaggcctgcttggtacaaggagaaggtttacccagagaacaaggtaccttcacttgagcacaacaatcaggtgaaaggagaaagcttggatttggtcaagtacattgacaccaatttcgaagggccagcattactccctgatgattctgagaagcagcagttcgctgaggagcttcttgcgtacactgatgcgttcaacaaagcatcgtactcatccatagtcgccaagggagatgtgtgcgatgaggctgttgctgctcttgacaaaatagaagctgctctgtcaaagttcaacgatggcccattcttccttggccagttcagcttggtggacattgcgtatgttccatttattgaaaggtttcagatattcttttctggtataaagaactacgatatcaccaagggccgacccaaccttcagaaattcatcgaggaagtgaacaagattcatgcctatacagaaaccaaacaggacccacagtttttgcttgaacacacaaagaagcgtcttgggattgcctgaagatgtgaccaaggatgaacccacaacaacctgcgatggagacagggagctggtgcagtatatagtagataaagactagtgtgcttcattttagcatatggtttatcttgaataagataatgcatgtcatgcagaccatgcttatggaacaaactattatgtatttttggtttggctgtgtacagctgttaatgtgaatttcccgtcatataattaattacaagcttcgcggggcgttgtctaataaatcaatgcttcttgtatcattattactagttgtcaggatgattttcatagtgaagtacttctgcaaatatgctaagcagaagtcaaccggacgttcc

SEQ ID NO: 15362 - DNA, 2181 bp, Oryza sativa
  ref <308>: DATABASE ACCESSION NUMBER: AK065888
  ref <309>: DATABASE ENTRY DATE: 2001-12-06
gacattgctgaaccccaccacgaacagctcaagtacacagtcacgagaactcgtggaaaaaccgggctaaatccaacgcctctcctgagtagaaaaccgctaccgctcggcatcttccttcttgtttgattcgtgagcagttgggttcagccttccgggctcagttcagtctgatgtgaatggaagtttcatcactattccaaggttgctattttgattaactatagcttgtggcagtatttggccatcttgcctgataaataaccagtcatggcgacaacggcttcaaagataattcctcaaaccctcccagaaatcccaaccaccccagaaccacagcagtatactaagactgctccagacatccccaaatcaaacaattctcgttcttcagtacctaaattgctacaagaatcagaccgcggcaagttgaatcataaattggagccaaaggaacaaaagccaaaccaccacctgaaagagtctgttgatgtttcatcggccaagtgtccgacagaagtgagcgaagaaatggtttcagaaggtattgcaagtcaagaaaagaaggttgtggagtatgagagtgtgaatgggagctccacctcatttcacacatgcgaagggagtggtccaggaaaagcaagtggaagtgctaggatgacggatcgatccgagaccggtgaaaggggtagtagtagcagatgcaggccaagcacaagcagtgatatcagtgatgagagttcgtgtagcagcatgagcagcaccacgaagcctcataagtcaaatgattcacggtgggaggcgatccagacgatcagggtgagagatgggatcattgggttgagccatttcaggctgttgaagaagctaggctgtggtgatattggcagtgtatatctctctgaattgagcggggcgaaaagctatttcgcgatgaagattatggataaggcttcattagcaagccgcaagaagttgcttcgagctcaaactgagaaagaaattctgcaatgcctggatcacccctttcttcctacattgtacactcacttcgagactgacaagttctcatgcctggtgatggagttctgcccaggaggagacctgcatacccttaggcagaggcagccgggcaaatattttccagagcaagctgtcaaattctatgtagcagaaatcctcttggcattagagtacctgcacatgctcggcatcatataccgtgatctcaagccagaaaacgtcctcgttcgggaggatgggcacatcatgctatctgactttgacctctcactccgttgcgcggtgagtccaacactaataaaatcatccaacccggacgctgaagcactcaggaagaacagccaaggttactgtgtccagccagcatgcgtcgagccatcctgcgtgattcagccatcatgtgcagcccctacaacctgctttggccctcgattcttctccaaatccaagaaagatcgcaaaccgaagcctgaaattgcgacccagatcagcccttggccggagctcatagcggagcccagcgatgctcgttcaatgtcatttgttggaacacatgagtacttggccccagagatcatcaaaggcgagggccatggtagcgctgtcgattggtggaccttcgggatattcttgtatgaacttctgtttggaaagacaccattcaagggctctggcaacagggcaacactgttcaatgtcattggtcagccattgcgcttcccggagtacccaattgtcagcttctcagcaagagatttgataagaggtctacttgtgaaggagccccagcatcggttagcttacaaacgcggcgccacagagataaagcagcatccgttcttcgaaggcgtaaactgggcgttgatccgatgtgcaagcccaccggaggtaccaaagcctgtcgagattgagaggccaccaaagttgcccccatccacatctggaactactgatgtgtccagtggtgcgcctcagaagggttctgatggctacttagagtttgattttttctgatgaacatatggatttcgatatatatcgattgtgcgatgagatgtagttttctttaggtgtagtgtttctggcagatgataagtgttgtagactgtccactgcaacctgtttctgttatttcctgcataatctatattcttttgc

SEQ ID NO: 15363 - DNA, 2931 bp, Oryza sativa
  ref <308>: DATABASE ACCESSION NUMBER: AK065889
  ref <309>: DATABASE ENTRY DATE: 2001-12-06
gttccacagtaaaaagccttgtgctcttttccacttcgtcttcctcctgcgaacagtccaacccctccgcctccgcctctgcagtccgccgccggcggccggcggatggccgcctcccgccgcctcgcgcgaaagctcccgtctctcatctccaagcaccagcgcctcatctcgccggagatcgatgtcgagcaagccgccgagagccccgcgtcgtcgtcgtccatcccgctcgacccctccctgcccattctcccgctcgccgtctcccacctctcgccgccgagccctctcccggcgctcccctcggtgcacgcgtccaccccggccgcgctcctccgcatcctccgccgcgcgcggcaccacccgcgcctggcggcgctcgacctccacctcctcctcgcggccgcgtccgactccccggccttccgccccgaccaccgcctcacgtcactgctcgcctcccgcctcgcggaatcccgccgcctcccctcgctcggccgcctcctcgagctcgtcctcttccgcccctgcccctgcaccgacgactccatcttcgcctgccccgagctcctccccacattccgcaaggccatcctcgccttcgccgcctccggcgacatccccgccgcgtctgacgccctcgcgtccctccgccgcgccgctgattcacctctccccgccgaattctacaacatcatcctccacgcactcgcccgcctccgccgccacgaagacaccgtccgcttctacggcgagatgacctccacccaccgcgtccatccggatgtctacaccttcaacattctcatcaacagctcctgccgcgctgaaggcgttgatgctgcgatgcgctggtttcaggagatgcgacgttggagctgttcaccgactggtgtgagtttcaatactctgatgcgtgggttcttcagagaaggaaggtgcaaggagggcattaaggttgcacgcgagatgcttcagcttggatttgggctatcggttgcatccatggagatcatgatcaatgggttgtgccgtggtggggagcctctgaaggcggccgaggttttcatcgagtttttggtcgatggagtggtgccggaagggtttgattgcttggatctggttgagtctctgtgccgtgttcggaatgtggagaaagcagtggaagtggtggagttgatactggaaaggaattgggtatcctgcttaggtgtccctgctggtgtaacggttttggagtgcctgatgaaggaggggaagctggacaaagcatgccagatgatggggaggatggttgctgcggagatagttccggataccatttcttgtaactatatttttgaggcgctctgtgaagctgggaggacagtggacgcaaacaggctgaggctgcaggctaaagagaaaggttttcaggctgatggctttacatacagcatcattgtgcagggctttgggaggcagggaataaggaaagagggggaggctgtattggatgaaatgctggatgcaggatatgtaccaaacattgcgacttacaataggctgcttgatggcttacacatggggagatctatgcaattacaacaaaaatgttcaaggcataggaatgcagcaaactgaaagaatatcatagagatgaagaagctagcttggatttcagagagatgctagatgataccttctcaattgctctgatacaggctctttcatgtgtgatgttaatcatatctggctatcggcaaacaaattgagtatttttatctatcttcatgcacattttatgtttattctgttaatcactttgcttagattcctagtaaggccttctatggaacaaaggaaaaaaaaggttgtcagggttgtttaatttatattatcttaggttgtaatgttttatctgtataccgtccagtggtcagttttaggtttttacacagatgcagcctagataaaccagaatttgctaaagaaagttaaatctgattttttaatagtgacgttgagcattggttttgtaattacttcatttacctcccggcgtaattacttcatttacctgttttgagtaccacttggattttttttcagggatcataaaccacatttttatagcatttttatgcatgtctctatcagtaaatttggtatggatttgaaatgtatcatcccctcagttatcttggctccaagaactgaataggaataactttgtaggaaccttgcctaagcaacgaagggtcaaatatttcatgaactcgtccttttcttttcaggagcttgagatcagagatcaatcagcaccggtctgccacagcaaccatccaagcctgagctgcgcgtggccactgccaaacgagttgcaactgcactaggccgaggaggctgccgttgagttgctgctcaggatttccagtaagatgtttccttgcgaacacgctggcggtggtggcaatgtggattcagtcatcaatgatgggaaattgggaacgacatcagaggcaacaagtactgaactctgcaagagcctcagaattttctgaagggaaaggatgtgaggatggtatcttgtgcctgtgaatgtgacaagcaatgaagcaaatccctggaagttttgacatcggcttcacccaaaaacccgttgtcacatcaggtaccaaaaagttttggcaaatatattacaagatgatcttgtcaatctttcatatgttggatagaaatgctttaattttggtcgcttcagagatcatgcatctacttgtgacgttggctggcatgcatggctatttggtcatattggttatgtgtactttcggtggttgagcatttcattcaattatcatttttagattattgttgttctaacatatgcagaaattctgaagtagagcaaagtattcttgttttcatctattaggaggtataccc

SEQ ID NO: 15364 - DNA, 1222 bp, Oryza sativa
  ref <308>: DATABASE ACCESSION NUMBER: AK065890
  ref <309>: DATABASE ENTRY DATE: 2001-12-06
ttgattgttattccaatctcacttggtcgtttagtttttgaggctattccccgcctgccaatcacacatggcatcaagtgcaatgatttattctctttcagcattggatgttatattatctggagtgcagcagctggaaccagatatgcaattgattacattcgatcacgacgactggccttcctagtgcaacaaatctgcaagtggtgctctattgttgtgaagagttctgctctcctgtcaatatggatctttgttattcctgtgttgattggactcctgtttgagttactggtcattgtacccatgagggtgcctattgacgagagtccggttttcctgttgtatcaggattgggctcttggattaatattcttaaaaatatggactaggctggttatgttggatcaaatggcacctttggttgatgaaagctggaggacgaagtttgagagggttagagaggatggcttctcccgtttgagaggtctatgggtcctgcatgaaatcataatgcctattgtcaccaagctccttacagctctctgcgttccatatgttcttgcaaggggtgtcttcccagtgcttggttacccactcattgtgaactcagcggtctaccgtttcgcgtggcttggctgcctgatattcagcgcgctgttcttctgtggcaagagattccatgtttggttcaccaatctccacaattccattagggatgaccgttatctgattgggcggaggctgcacaactttggtgaggactcactccattcaagtgaacctggaacaactacagcgtctgacgatgatgaacacgagcaagcactcattcctcgcgatcaggaaggagagttggggctgaggttcaggcgccatatcatgcgtggaaaccaaccgagaatggctgcataagcagggacgagtttttggacaaagcaaggggcatatgcacgatctgacttctgccctggagcttctgcttgtgattagtaatccgcattgtagagtgaaatgagtccgtcagttagtgataggaaaagtaaggattgttgtacaacaaagtccaagggaagaacagctcaaaaaaaaaagaatacacaccagaaaactcatggtaagctcacttccctgtggctatgtgttgctgactgtaaatatagacgaactaccccacacaatttattgtggttctgatgtgtaatggacaatgaattactcc

SEQ ID NO: 15365 - DNA, 1975 bp, Oryza sativa
  ref <308>: DATABASE ACCESSION NUMBER: AK065891
  ref <309>: DATABASE ENTRY DATE: 2001-12-06
gactcacacgcacagtctctcccaccaacaaacacgtacgactttgaacgcaaagtcttggcgccactcgatcgatcactctctgctcatcaggtgtttgtggaaagtgcagagatgggggagaacggtgtggtggcgagcaagctgtgctacccggcggcggccatggaggtggtcgccgccgagctcggccacacggccggctccaagctgtacgacgacgacggccgcctcaagcgcaccgggacgatgtggacggcgagcgcgcacatcatcacggcggtgatcggctccggcgtgctgtcgctggggtgggcgatcgcgcagctgggttgggtggccggccccgccgtcatgctgctcttctcgttcgtcacctactacacctccgcgctgctcgccgactgctaccgctccggcgacgagagcaccggcaagcgcaactacacctacatggacgccgtgaacgccaacctgagtggcatcaaggtccaggtctgcgggttcctgcagtacgccaacatcgtcggcgtcgccatcggctacaccattgccgcctccattagcatgctggcgatcaagcgggcgaactgcttccacgtcgaggggcacggcgacccgtgcaacatctcgagcacgccgtacatgatcatcttcggcgtggcggagatcttcttctcgcagatcccggacttcgaccagatctcgtggctgtccatcctcgccgccgtcatgtcgttcacctactccaccatcgggctcggcctcggcgtcgtgcaggtggtggccaacggcggcgtcaaggggagcctcaccgggatcagcatcggcgtggtgacgcccatggacaaggtgtggcggagcctgcaggcgttcggcgacatcgccttcgcctactcctactccctcatcctcatcgagatccaggacaccatccgggcgccgccgccgtcggagtcgggggtgatgcggcgcgccaccgtggtgagcgtcgccgtcaccacgctcttctacatgctctgcggctgcacggggtacgcggcgttcggcgacgccgcgccgggcaacctcctcaccgggttcggcttctacgagcccttctggctcctcgacgttgccaacgccgccatcgtcgtccacctcgtcggcgcctaccaggtctactgccagccgctgttcgccttcgtcgagaagtgggcgcagcagcggtggccgaaatcatggtacatcaccaaggatatcgacgtgccgctctccctctccggcggcggcggcggcggcggaaggtgctacaagctgaacctgttcaggctgacatggaggtcggcgttcgtggtggcgacgacggtggtgtcgatgctgctgccgttcttcaacgacgtggtggggttcctcggcgcggtggggttctggccgctcaccgtctacttcccggtggagatgtacatcgtgcagaagaggataccgaggtggagcacgcggtgggtgtgcctgcagctgctcagcctcgcctgcctcgccatcaccgtcgcctccgccgccggctccatcgccggaatcctctccgacctcaaggtctacaagccgttcgccaccacctactaattcatcgagcacctcgcgtgcatgcacataccgtacgttattacgcgtggtcgagatgaagtacagatgattgtatcctaattaatcaattaatcaaccaaaattaattaactaattactatttagttattattgtcacacgtgtggtgaaaaaaaaagtgaaaagaggaatttgagacaggttgcatagagtgttgtttatgctattgttgcttgtatactgcctgtattaattccaaccgatgctactaattttgattgtttctggtccgtgttaatgttaaccaaaaggaggtagaatggtgtatttccaagtgaagagatgtgtttgtaattacataattaaatgagaaatgcactttcttatggc

SEQ ID NO: 15366 - DNA, 1557 bp, Oryza sativa
  ref <308>: DATABASE ACCESSION NUMBER: AK065892
  ref <309>: DATABASE ENTRY DATE: 2001-12-06
gaaatccttcgccccctcctataaatccacctcgcgcaaatccaaatccaaatccaagctcggagaagagacctacctacctacctacctactctaggcgggagagatggtggggaagagcggggtggcgtaggagggcggagcggcggcggcggcggcggtgaggaggtgggtggaggccggcggcgggaggctggtgatggacggcgggctggcgacggagctggaggccaacggcgccgacctgaacgacccgctctggagcgccaagtgcctcctctcctccccgcacctcgtccgcaaggtccatttagactacctagaagcaggtgcaaatatcataatcacagcgtcataccaggctacaattcaaggctttgaatccaagggattttcaaaagaacaaagtgaagacttgctcgcaaagagtgttgagattgcacgtgaagcgcgtgacatgtttctgaaggaacattcagatcgtcccatacaacatcctatcctggttgcagcttccattggaagttatggggcctatcttgctgacggctctgagtacagtggggattatggcgaagctggcacgttagaattcctgaaagattttcataagcgaaggctggaggttcttgcggaagcaggtcctgatttgatcgcctttgaaacaattcccaacaaattggaagctcaggcttacgttgaacttcttgacgaatgtaacatcagtatccctgcatggttctcatttaattcaaaagatggagttcacattgtgagtggagactcgttaattgaatgtgctactattgctaatgggtgttcgaaggttggtgcagttggaataaattgcacacctccaagatttatccatggcctgatactctccattcgaaaggtcacagataagccaattctgatatatcccaacagcggagaaagatatgatgctgagaaaaaggagtgggtggaatcaactggcgtgtcagacggtgattttgtttcctacgtaaacgaatggtgcaaagatggggctgtcctcattggcggctgctgcaggacaactccaaacaccatcaaggccataagtagatcacttaaccaacgccactcttcgctgcatttacctgtggcatagagttgcacgctccttcaggtgtgctactcatgctggtacctgaacctgatgaacatatcctggaggtccttactagcagcatgatgttctctgctgcaaatgagatggctctgcacttacacttgcgaataactgtgcgtttcgtctgagttcttaaagttgcccaatctggaggtacaacctaccaagaaggattagcaagcagaaaacagtgatagtgaactgttctactaagtaagtaacaagtgagtgaaaacaatctgcggcaaagttgatgaagcttgtaagctatcaagagttgttgtgcagacctgagcctgttataagagcctatgttgtgtactactactactgctgtactactactaccctgtgaactcttgttttgctatacaagtctataacaataagttttgtttgtt

SEQ ID NO: 15367 - DNA, 1403 bp, Oryza sativa
  ref <308>: DATABASE ACCESSION NUMBER: AK065893
  ref <309>: DATABASE ENTRY DATE: 2001-12-06
gactaatgtcccccatattgcagcctcctcccgcttcttctccagctgcagtcgttgcacctgcaggattagaagaagtgggaagacgaggataggagcttctgctgctggtcgtaggtgcagtagtgatgattctgcttgttcagaaccctctgagcagcaaaatgcagatttcttttcaggtcccatatcttctctttgttatacaaggagggactttgcttctgttgctctgctccctttcatacttcctcatgttcatatagcgagtgcggctgagccaattgatggttcaattattcaaaacggtgtgaggaatgttttatccaaggtcaaggctgctggcatgcttcgtttggctttccatgatgcagggacttttgatattgctgataaatcaggtggcatgaatggatctataatttatgaagttgatagacctgaaaatactgggctaaataaatccataaaggtattaggaaaagcgaaagaagtaattgaccttgtgcagcaagtatcatgggcggatttgattgccgtggctggtgctgagtcagttgcgctatgtggagggccagaaattccagtaagactaggtcgattagattccagtactgctgatcctgctggtaaacttcctgaagaaacattggatgccactgcgctgaaaacattattcagcaaaaagggcttttcgacacaggagatggttgtgttatctggagcacacacaattggaggtaaaggattcgggaatccaaatattttcgacaactcctattttaaagtactccttgagaagccacagccatcttcatctggcatgccggcaatggtaggactgcgaacggattgggcactcactgaagatgatgaatgcttaagatggatcaatttatatgcacaggaccaagctaaattttttaccgacttcaaggatgcatacatcaagcttgtaaatactggagcctcatggagatcagcttaattttactcgcacacagctctctctcgtgtaggctattaggcacgattcaaacgtaggaacctcagagaatttttgtggaaaacaaagcaatggaggtctggatttcttaatatttactccaaagacaagctttcaccgtaaatttcttactgttacgaaatcatagtcattaaataggagtttcgaacatgaatccaacaaatatatttttgtatagcaaaacctatatattattttattaccaagggtcaaagcatagaactagacaatcaaaatcctccttatatttttgaatgtagggggctaataaatcatgcagttctgtaggatatattttcaacaaacatcaataaggaatgtaagaattggaactttcatgttaaaggcagcgttcttttctgaaacttcaaacgtc

SEQ ID NO: 15368 - DNA, 1865 bp, Oryza sativa
  ref <308>: DATABASE ACCESSION NUMBER: AK065894
  ref <309>: DATABASE ENTRY DATE: 2001-12-06
ttggggacaaacaacctgacgacacagagaggttgcgagctctaggaagatatatcgatacgccatggagacaggaggcatagcggagcgtttcagagacaagactatactcatcaccggcgctactggcttcctgggaaaattgctggtggagaagatactgcgagttcagccggaggtgaggaagctatacctgctagttcgtgctccggacgccatagccgccgaggagcgtgttctcactgaggttgtaggaaaaggtctatttgatgttctacgagaacaatacggtgctggattcaactccttcatcaaggaaaagatatatgctctacctggagatgtgatgcatgaaaactttgggcttgagagttatgaggtcctgcagttatcccagaaggtagatatcatcgtcaatggagctgcaacgacaaactttatggagaggtatgacgtagctttggcaacaaacgctgcaggagtcatgcatttatgtcagtttgcaaagcagtgtgataatctcaagatggtgcttcatgtttccactgcttatgtagctggtgagcaagcaggccagttactcgagaaaccattccagatcggtagagcactacgactggattaccaattggacattgaagctgagctgcaattagtggacagtatcaagtcagaactcagaataaaatgttccagtgatgacaagttagagaaaacaaccatgaggaaacttgggcttaaaagggccacgcactttggttggccaaatacatatgtgctgacgaaagctatgggggagatgttacttcaacaattgggacaagaccttccggttgtcatcgtccggccaagcatgataacaagcacttttcaagaaccaatgcctggatggatagaagaaactaggacaattgatgtcatatttgttgcctacaatgaccaaacccttccatgttttatatttgatggtagcgttatatttgacttgatacctggggatatggtgatcaacgcaatgatggctgccataaatagtcaatggaataaacgagctcaagtgatataccatgtgacttcggctcaccaaaatcccctaccagtatctcttattgaagaatcaatgttcagatactttgacataaatccacgtacaagtaaagatgggaaggcaataaaaaataaaagaccactagcattcaagagattagcatacttccaggcatacatgattctacggtacaagctgccattggagatgatgcgtgcagcaaatgtactgttgggagggatatacaccaagaactactatgagtttaaccgagactacaacattttaatgactgtggcaaagctgtttgccccgtatgtcttcttcaaaggatggtttgatgacaccaacctgaggaaactgtggaaggcgacggctatggaccaaaatgatgatgcatccatatttaattttgatcctaagtgcattaactggagctcatacctcgtgaacacccacattccagctgctataaagtatgccaatgaccagaaggcgaaagcacgtagtgcataaaaatacatttagatgatggtgtacatgcaaggtgttagtttgcatggtgaatatattgctattattatatgaaaaatattataatgctaagattgtgatagctcaattatgcggaataagtcatccgtgtcagagttgtgtggagtggtgtgtgttgtagggctctagccccttctctctcttcttaatataatgaggcgcagttctcctgtatttttcgagaaaataaaagtcatctgtgtcgggcgggaaccctcatcaatggcagtgagaccgcttactatgcactgttgccattgct

SEQ ID NO: 15369 - DNA, 2997 bp, Oryza sativa
  ref <308>: DATABASE ACCESSION NUMBER: AK065895
  ref <309>: DATABASE ENTRY DATE: 2001-12-06
gagtactgctatagtgtgagctacgattggggagcggcaaccacaccaaccccatctccatctccctcccagaccgacctcccaccgccgcttttgcccttccctctccaatcgtccatcgctcactctcctcaggtctcatctctctctctctctctctccacctggtacttttgctggaatcgatggcttacatatgtttttagaggattttagggatagatataagcatgcttgttgcaggccaaatctttcttcatttttggaattaatactgcacctgaactttttttggataaaaaagaaagtgtatcagctttgaatgaagcctactagttctttatgagtagtgtgtggtcattttcccctggttaaattgtgggatggatgtttgcttcaaagaaataaaagaaattgtgggatggacctgatggttcaaggctaattttgttttgacacttcatttcttaggtttttggtgtgtttgtgttcaagattgaataggacaagacataggggttagctctcaatttaaatgcccaagttaaaaagattgtaataattgtcaaaaaaatttgcatggaatgcttccttctctagaaagtaggaagtctgacggtctgaccccccaaaaaaaggtcagtttgtcctcttctgtttttatgataattactttcctaatttcccagctgacagaagggtgttgcttgcaagaaatagttgtttacagaattatgtagtcaatagagttcatatataacttccagtaccaaaattgcgtgattgtgctaatcaaaatgcagaattggatatgagtaatcaatcagaaaaagtgcgagtgatatgctagtggcctaatgtcactgaattttcagaagaccaagacagcacaaatgggtgttgtcgggtatgtgatgcaatttgttagataatttcttatttatcttctaacaatttcttatctcatcattgcccacatagatggcttacgaaaaattccttaggtgcaagattatactgaattaattgcaagtagcttagagtcgtcggttttcttccaacaaaattgctgaagaagccagaggctcaaatggaggcatctgatgaggacaggccactgattcatcacctgcctccacaggaacaatgttcaaaatacacatgcgatggaacggttaatattgacagtaagcccgcgctgaagcagagtacggggaattggagagcatgtttcttcattttaggtgttgaattcactgaatgcatctgcttctacggggtttcaaagaacttagtcacatacctcacaagtgtgctccatgaaagcaacgtcaatgctgcacaaagtgtgtcgatctggatcggcagttgcttcttcacaccactcattggagccttcttggctgacacatattggggaagatactggacagtagtaatgtccatccttgttatcatccttggaatgatcgttctgacggtttcggcatcaccattgttcctgaatgcttctttctacaatgggggtatttctcgtctaactgtctacctagggctctacctttttgcccttggaactggaggtataaagccaaacattccggccttcggagctgatcaattcgacggcgccgacccggtggagcgggtgacaaagggctcattcttcaactggtactacttctcaatcaacgtgggctcgctgctgtcgtccaccgtggttgtctgggttcaggacaacatagggtggagtgtcggttttgctggcccaatgctactcttggggttcggcctcgccatgttcatcgccggtaggagggcgtacaggtacaagaaactgggagggagccctctgacaagggtctttcaggtgctggttgcagctgtaagaaatcataggctgaacttgcctgatgatagctcactcctgcatgagcttccaggagtgactgaaggtgactacagaactcaacatacctatcaattcaggtttttggacaaggctgccatcttgtcggacaagaactgcgcgccggcggcgccgtcgagcccatggaggctgtgcaccgtgtcgcaggtggaggagctcaagatgctgctgcggacgttcccggtctgggcgtcgctggtcggcttcttcatggtgaccgcgcagatgacgtcgaccctgatcgagcagggcgtcgccatggacggccgcgtcggccgcttcaccgtgccgccggcctcgctcgccaccttcgacgtcgtcgccgtcctcgccctgatcccggtctacgacgccgcgctggtgccgctggcgcggcgcgtcaccggcagggacaggggcgtctcgcacatgcagcgcatcggcgtcggcctcgcgctgtccgcggtggccatggcgtactcggcgctggtcgaggcgcggcgtctggcgatggcggcggcggcggcggggacgcggatgagcatcgcgtggcaggtgccgtccttcttcgtgctgggcgccggggaggtgttcgccgtcatcggcatgctggagttctgctacgagcagtcgccggcgtcgatgaagagcctcggcacggcgctcgtgcagctcgccgtcgccgtcgccaactacctcaactccggcatgctcagggtggtggcggcggccacggcgcgcggcggcggcgccgggtggatcccggacaagctcgacgagggccatctggactacttcttctggatgatggctgcactcagcgtgctcaacctgctgcagttcctgcactgctcaatcagattcagaggcaacaacacactgtcatcatcgtgacgtactccattcttccgtctcaagggctcatgccctgcgtatatactcctgcaaatgtgttctcatttcttgttctgtctccaggattgagaaaacggagtaacaggaagccccggattttattttaacagaaatgtaagtgcaaaacaaataattttataatataagagtaacacaagaatgatcgattaact

SEQ ID NO: 15370 - DNA, 967 bp, Oryza sativa
  ref <308>: DATABASE ACCESSION NUMBER: AK065896
  ref <309>: DATABASE ENTRY DATE: 2001-12-06
tatagtttccaaatttttaggaccacaaagcccagctcagctcagcgtgcgctgcgactgcgatgcgagctcagctcggggtcgagagaatcgcgggagcaaaagcagcagcctcggatcggatccatggtgggtggatggatcccttgctccactagggtttcgtccgagcacacgcgctagggtttgctttgcttcggcaacctgccaggcgctcgcggatgggtcgccgccggcggcatggtcgctgagctgcggtcgccgtcggcggcgccggcgatccttcttattctgcacgcgcgtgaggagcagcccgaggagtaagttggcccgtcgtcgccgcgtgctgggatctggtgcaggtgcagcgaccatgctcctcgatcaggagcaaaaggattcatgagatgaaaacaggagcatatacctttcctttgcctgactgatggatcttcccggcgcttgacaaccagagcacctcgccgctgccggccgccgcaccaccccgcaagcccctcgccgccggcgtcccgtcacagcacacgtgtggcggcgctgcgccgacaacaggaggaagaaatgccttttttgccggaggacagcgcaaagagatgagaacgagttggtgaaacctgtgaagtgcagtggggatttgggaattgggagggattataaaacctagatccgggtgtgtttttttgcactttggtcacaaatgcacaaagtattatttgtaatggaaatttagttttgtgaaataagcaattttgtactgtgcgttgctgcaaagaattatgtatgtgttcatatgcttattcggtggcaaccgttgtatagcagtttgttggaaagttggatccattttggaggtgacgtttgcttcctgtttaggcacgtagcatttaattgctaccagttttgacatgtgaacaggttcctctatattttcgttacgaattttagtact

SEQ ID NO: 15371 - DNA, 2762 bp, Oryza sativa
  ref <308>: DATABASE ACCESSION NUMBER: AK065897
  ref <309>: DATABASE ENTRY DATE: 2001-12-06
gactgcccaaccgcgtcttgaaaattgttgctgccctcctccgttcgtcaacccgggagcgaggagcgggagaggagcggggtgtacaaaagcgagccccggtggtggtgagagcgagaggagaggaggccaatcgtcgaggaggaggaggaggaggaggagatggatactcctgaccgtgctgcggcggcggcgcgggcggaggactccccacttttcagcttcatcgatagcctgtctccgatcgagcctctcaagtccgcgtattcagcaagcagcattcaggcataccagtccctcaacatcacctccatttcttccatcttcacttctccgcacgacaatgcgcaaaaggaatcgaagctatcaaagagctctttcgctgaattctctgaaagtgaggtttgtgccgatgaaagcgataaaaacaagccatctaaatcttctaatgctgtcaggttgtttgcctgcactagcactcttacacaagcaacccacaaaattacctcttcagtaagtgaaggtacagtaggacctcctgaagggtcaaacgatttgcctcaacctggtcaattcgattctggcagtccagatcacaacacaacaccttgccgtggtgttagatcagatcttaaacagggcaaatgtcgaaaattacaagcattccaaacagctaagaccaatacttcggagaaaaggaaatgcttgttttctactgaagtccagctcatggatgggtgccagccagaaaaacttaatgatgaaatcctgggatgtgactgggatgacttgatctctgcaacttcgggtgaacttatagcctatgacgaggatcacaaaggagtgcagctagcagtaagtaatgcagaatcttgtggatttctgctatcaaagcttacaggagatggtgacatctcagacagaacacatcctagttcatctacgcagacgtactaccgtgagttgctaatggacgaagatcagacagaaaatgctcagctagttccagatggtgaaaaaaacatctcaactgaagaaattcaggataacctttacgaagcaaatggaagtattccaacaggctacaaggttgagactcgacagcaacgtggcatgcgaagacgctgtcttgtttttgaggcagctgggtactcaaataggattgtgcagaaagaatcagtcatggatctgtcagtctcaacctgcaaagggaaaagccctgtacagaatcactcaaatccagggaaaactccatctccacgtgtgttgcgtggtataggtctacatttgaatgctcttgctttaacatcgaaggataaaatgatctgtcaggatcccatgtcatctttggttccatcatctgcaactcagcaggaagcgcatgggaagatgttgtctgctggagagaatttcattcacccgggtggtgaacttctagaacttcagatggatgatgattgttcagctggagtttttcttggaaatgatcacgattcaagtcaaagcaacagccctcaaaagaagaggcgcaaatcagataatggagatgatggtgaggcatgcaagcgctgcagctgtaagaagtcaaagtgcttgaaactttactgcgagtgttttgctgctggtgtgtactgttctgaaccttgctcatgtcaagggtgtcttaacaagcccatacatgaggagattgttctttccactcgcaagcagatagaattcaggaacccactggcatttgctccaaaagtgatccgcatgtctgatgctggtcaggatattactggggaagatcctaacaacactccagcttcagctcgacataagagaggatgcaattgcaagaagtcaagctgtcttaagaaatactgtgaatgctatcagggaggcgttggatgctccagcaactgcagatgtgagggttgcaaaaacacatttggcaaaagagatgctgctgtatcaactgaggctgaagaaatgaagcaaggaggtgaagaagcagaaaattgtggaaaggaaaaggaaaacgatctacaaaaggcaaatgcacagagtgaagatcacccattccttgaacttgtcccgataactccacctttcgatgtttcaagttcgttgctcaaaccaccaaacttctcgagtgcaaagccaccaaggcctactaaagctcgctcgaactcatctcgttcatcttcgaaagctcctggagctgttcactcacagaagttctccaagattgctaatagtggcttgaatgaagaaatgccagatatattaagagatgatgcttctcctggtaactgtgtcaagacatcttcaccaaatggaaagagagtctcgccacctcataatgcactcagtgtttcaccaagccgaaaaggtggccggaagctgatactgaaatccatcccctcatttccatcactcattggagacgcaagcagcggttcatcaatgaacagttccgagagcgcattcaacactgcatcgcctcttgctttaggtccatcctaaaagctggctgctgattatgagcgtccggggtacaacttgtagtccgagaaaagtgcctcacatctgaagcacggcatcaggtactggatgagggtagtttaagttagaatattaagatcttgtagcatgtatttgtaacatatgttagtggcaaataatctgtatgtaagatagtatgttgtgatgatgataatgttgtcttgattgaattctatcaacactgtataaaatcacctctgtggaggtttttc

SEQ ID NO: 15372 - DNA, 2673 bp, Oryza sativa
  ref <308>: DATABASE ACCESSION NUMBER: AK065898
  ref <309>: DATABASE ENTRY DATE: 2001-12-06
ggctaaagacttgaccacaagccatggaacaccaaatgttccaccaatcattttttttaaatagtgcattgcatggtccaaaagcctcaaatacacaacactctgttgagccttgtgcaatgcaagttatcttggcccggggcagaagcaagttcagcaacatgaggcatcttcctttctgcaggttcatcactttgtctgtcatcttcttgcttagcatccctttgcttgttgcatccgttcctcaggacattctttctcctggatcttccatccccgtggaggacaactctaacatgttggtctcccccaacggattgttttcgtgcggcttttacgaggtcggtgccaatgctttcatctttgctgtctgggtaaaccaatcgattggtaaaacagttgtctggacagccgatcgagatgtgccagtgaatggcagaggatcaaggattgagctgagggatggcaacatggtgctgctggacttcaacagcaggttagtttggagtacgggcacaacctctggccaagtgcgtagcgcaaaacttcttgacacgggcaacctcgtcctgttgggtcatgacggcagccgcatatggcagagctttgattcacctactgacactcttctgccgacccagccaatcgctgctaatttgaagctggtatcaggaaagtacatgctttctgttgataataatggtagtcttgctctcacatatgatacaccggaaggccatagcaagtactggccaagaaatataaatgcgacaccatttagtggagaccaacctcaaggtcttgatatgcttggttgcatctctgcaggcaaccatatcaggtattgtgcatctgatctaggttatggagttttacggaggctgactcttgaccacgatggcaatcttcggctctatagcttgcttgaggctgatggccattggaagatttcatggattgctcttgcagattcttgtcaagtgcatggagtgtgtggaaacaatggtatatgtaggaatctaatgaatcccatttgtgcttgtcctccagggtttgtgtttgcagatgtatctgatttgagtaaaggttgcaagcccactttcaatatcagttgcgacaaggtggcacaggcgtattttgtggaaattgagaagatgagtgtttggggttataactccaattacacagcatcaacagcattcgatgtttgcaggaaaagttgtttggatgatctgcattgcgaagctttttcttaccagtacggtttgggaggatgtacactgaagagttcactctacactgggggatttactccctccgagatctcaataacatgcatgaaacttactgctgatgcggctgtgcagaacagtatcgattataaaccacacggtccgtatctttcttgtcagggcaggggtttttctacatctgctgataccaaggccttccaatggaactacttgtacatgcctattggatctatttttgcagttgaagccattctattcccgctcgcctggtgttttctgcgcaagaggaaacaggactctatctcgagaaatgacgggtttgctctgattcgcgaccatttcaggaagttcaccttgaaggagctggtagctgccaccgcaaagttcaagcatgagattggaagaggcggttccggggtcgtttacgagggtatcttggatgatgggaagaagatagcagtgaagaagctacaagacatggtgcagggggagctggatttccagtccgagctgagcgtcatcggtaggatctaccacatgaatctcgtcaggatgtggggattctgctcggagtgcgggcacaagctcctcgtcttcgagtacgtcgagaacgggtcactggccaagctgctgttcgacacggcgagcaccaccggagcaaggctccggtgggagcagaggctccgtgttgcgctcggcgtggcgagagggctggcctaccttcaccatgagtgcctggagtgggtgatccactgcgacgtgaagccggagaacatcctcctcgacgaggagctggagcccaggctggcggactttgggctcgccaagctcctcaacagagggaaggatgtgcagatgctgtcgcgcgtacaggggaccaggggctacattgcgccggagtgggcgtccaatctccccatcacgggcaaggtcgatgtgtacagcttcggcgtggtgctcctggagattgtgagggggctccgggtgtcggattggaccgtcgtcgacggagaagaagaggaggtggagatggttttcaggacaactgtcgcggtgctgaaagagaggttgagaggcgaagatcgttcatggctcccggggtttgtcgacccgaggctggacggcaacttctgccggttgcaagcggcggcaatggtggagctcgccgtcgcctgcgtcgaggaggagaggagcagaagacccaacatgaagcttgtagtggaaaagctccttaatttcttgtgataatttcttatgatcctggcaatccatagtggtgagtgtctgagcggtgaacggtgacacttctgttaaatccaaaaaaaagtggtgacacatctgccatgaaaatatgcctgtgtagatgttttcatcaagctatcttgtgttcaatagctctgatctcattatataattcatg

SEQ ID NO: 15373 - DNA, 2401 bp, Oryza sativa
  ref <308>: DATABASE ACCESSION NUMBER: AK065899
  ref <309>: DATABASE ENTRY DATE: 2001-12-06
ggccgtgcaccatgctcccctccggcctcgcagtcgctccgcctcccataagcctccacgccgccgcctcccgcacgggccgacagcggtatgcacccgtcgaccggcgtgcttcgatgggccggagcaatccgccgcggcccacccgcgccgcgtggtggcggacccgacgccgcgaaggcgtccctcccctcccctccccgccgactggtacgacaccgccgcagtcatcgtcgccggcggccggagcagctaggttcggtggtagagagaggaggaagggagagaagaggggaaagagcctgaggaggaggaggcctcggtaggcatccctaacgccgaagggggaggaggcgacgaggccttccgccaagtgaagtcatccgaggagccatccgccgcccggaaaagtccggtggcgaagaagccgagccggccgcatggggggagtggggggccccaaccggcgtgttccccgccgacatctccccgcccgcggccgcgaatcatgttgctctctccctgtcacttcacaacacgcggaggcagcagcggccggtggtgcggggctgcgggcttcgtctcggcgggacggacggcagcggctgggtagcgtcgcgagcttggaccccccggcggcggcggcgtggggagggcggtgagatcgagtcctgcgacgtcggggtcgggctgtggctgggaaagtgcgacgagaacgagcacgcccggtggcggttactggaggagcacgtcgaggtcgggcccttggcggcggcaaggtcaagccttggcttcctgtaatcaaaggtgcctcattgtacttgataatgtgtggactgtatcaacatggaatgttgttagacatgctttacaagaggattgctgtagtagaatagtagtaacaacagaaattaacgatgtggctcaggcatggagtttttacaagtctcaacataatgcatctcacgtgatcaagaagcatattttgaagatggaaccgcttaatgacgatttctcaagagatttacttgttagtagagtttttggtgataaagacaaatgtcctgaagaactcaatgaagtttcatatgagatagcacgaaaatgtggcggtttgccactagcaactatcgctgcagccagtcttttattgagtcggccagacaaaccagatgaatggatctatgtacagaagtcgttgattccagatttgaggatacaacctacttccgaaggaatggcacaactactgaacaatagcttcaacaatcttcctcatcatttgaaagcatgcatgctgtatctgagtatatataaagaggatcacataatcaatccggacgatctggttaagcaatgggtagctgaagattttgtaagtgcgacggaagggaaaagtttggatgaagctgcaaggaatcatttttatgagcttgtccataggggaatacttgaaactgaacatatcagctgtagtgatgaggttgtatcttgcacagtgcatgacatggttcttaactttatcaaacgcaaggcaatggaagagaattttgtcactgcaattgatcattctcagtctggtataagactagcagacaaagttcgacgactctctctccatttcggatattcaaaagatgcaaaggcaccagcatgtattagattgtcacaactacgatcacttgtgttttctggattttggaagtgcgggccttccatttcggagtttcatcttcttcgagttctattccttcatggtaaacatggcgaatttcttgacctcactagaattcgtgaactgtttctactgacttatttgcagattgaaggtaatgtttgcatagacttaccatcagagctccaaggactgaagtatatcaggactctgcatattggtgcaatggtgacctttttgagatcagaagttgttcatcttccgccgttgctgcacttcagacttccacccaatctagggtactttgttgacgcagggagtgtacagagtattgaagaactgaccaatttgcaggatcttcaactcgcatgtcctcagatagccacttctgaccatattaagcacaacatgaaactgttgggttcaattattgggatacttaagagcctcaaatctctaacagttgttcctgtctgcttctctgaagattctaatgataacgaaaattcaagcattgccattttcttggatttcttagataaagttccccccccttgtagccttctgcagaggcttgagttgtttccacgtgtttgcgtcttccatagacttcccagttggatcataactattgagaaactctgtattttgaaagtagcagtcatggaactcctgaggaaagacattgagactctctcaatgctgaatgccctcactgttttctcg

SEQ ID NO: 15374 - DNA, 1171 bp, Oryza sativa
  ref <308>: DATABASE ACCESSION NUMBER: AK065900
  ref <309>: DATABASE ENTRY DATE: 2001-12-06
gatcggaggccgtcgtctccgtctccccgtttgctactccggcgccggcgaggccacctcggtcgtttccctccctcctccacccactcgccttcccggccgccgcggagctctgcccccccccactctccctacgtctagctgcgctacttgttgtctcccccacctctcttcctctgccgccgcacagcttgccttcctcgtcgtctcgtctccttcagcgccggcgagaagccccccggccgccgagcttgccccgtctccggcggctaggcgctgccgcctcctgaccacgcgggttttctgcccctgccgctgaccccacccaccgccggcttgctagggcttattggataagatgtcgtccaagaagaactactacaaggagaagatgatgcggcggaaagaggagaaaaaagaagaaccagagacaccaaggtatcgagatcgtgctaaggagcgtcgtgaagatcaaaaccctgattatgaacctacagagcttggttcatttcatgctgtggcacctcctggagcagatttaaggctagcagatgcacacaagatatctattgagaaaagcaaatatctcggaggtgatctggaacatacacatttggtcaaaggcttggactatgctctacttcacaaagtacgaagtgaaatagaaaagaagcctgaagcagaagatggaaaggatacacagtcaaggtctacaaaagaagatcaagcagtctcattccgcactgcagctgcaaagtctgtctatcaatggatcataaagccacaaagcatcataaagtcgaatgaaatgtttcttcctggtcggatggcatttatttacaacatggaggatggacttaccaatgatattccgacaacacttcacaggagcaaagctgattgctctgttccagaggagatggtaactgtcagtgtggatggttctgtacttgataggattgctaaaatcatgtcataccttcgacttggatcatctgggaaagtcttgaagaaaaagaaaaaggagagggacacaaaagggaagaacagtttagcaagtggtgactacgatgaggtagctagacctggccaaactaatgggtctgctctgaaacatcaatttgaaaaggatatgccaccgccgccaccccctcgaaataataatttaagc

SEQ ID NO: 15375 - DNA, 2309 bp, Oryza sativa
  ref <308>: DATABASE ACCESSION NUMBER: AK065901
  ref <309>: DATABASE ENTRY DATE: 2001-12-06
ggtcttccgcgccgccctctccctcctccaccgcctccgcctccgccttctctcgtgccgccgatctccatcgccggcgtgcggtgcaccgagatccacccgagatgtggcgcggctgcgtctcgcgtggcctcaggagcctctccaagggcaagggctcctcctcctccgcccccgtctccgccgccgctaggctcttctccaccgcctcgtcgtcgtacacggtggtggatcactcgtatgacgcggtcgtggtgggagccggcggcgcggggctccgtgcggcgatcgggctctccgagcacgggttcaacacggcttgcatcaccaagctcttccccacgcggtcgcacaccgtcgcggcgcagggtggcataaatgctgctcttggaaacatgacggaagatgactggagatggcatatgtatgacactgtcaagggtagtgattggcttggtgaccaggattctattcagtatatgtgcagagaagcgccaaaagcagttatagaacttgaaaactatgggttgccattttcaagaactgaagatggaaagatataccaacgggcctttggaggccagagcttagattttgggaaaggtgggcaggcctatcgatgtgcatgtgctgctgacagaacagggcatgctatgttacacactctgtatggtcaagcaatgaagcataatactcagttctttgtagaatattttgcgctagaccttatcatggacagtgaaggcacctgtcagggggttattgctttgaacatggaggatggcactcttcaccgtttccgtgctacaaatacaattctggccacaggaggttatggcagagcctacttctcagcaacctcagctcacacatgcactggagatggcaacgctatggttgcacgtgctggtttaccacttcaggaccttgagtttgtgcagttccatcctacaggcatttatggtgctggatgccttatcactgaaggttcccgtggtgaaggtggtatccttaggaacagtgaaggcgagcgtttcatggaacgatatgctcctactgcaaaagatcttgcttctcgagatgttgtttcaagatctatgacaatggaaatcagagaaggccgtggtgttgggccattgaaggaccacatctatctgcatcttaaccatctgcctccagaagttcttaaggagaggcttcctggtatttctgaaactgctgctatttttgctggtgttgatgtcaccaaggagcccattcctgtcttgcctactgtgcactataatatgggtgggatcccaacaaattaccatggagaggtagtgactatgaagggtgacaatcctgattctgttgttcctggtttgatggctgcgggagaagcagcatgtgcatctgttcatggtgcaaatcgtctgggtgcaaattcacttcttgacatagttgtttttggcagagcttgtgcaaacagggtagctgaaaccgctaagccaggtgagaagcagaaacctcttcaaaaaagtgctggagaaaagaccatagcctggttagacaagctgagaaatgcaaatggatcattgccaacttccaagatccgtctaaacatgcaacgtgttatgcaaaataatgctgctgtcttccgtacgcaagaaacactcgaggaaggttgcaaattgattaccaaggcatgggaaagttatcatgatgtgaagatcagtgaccggagtctcatatggaattcagatttgatagagaccattgagttggaaaatctcttgataaatgcatgcataaccatgcactcagcagaggctcggaaggaaagcagaggagctcatgctcgtgaagatttcacgaaaagagatgatgagcaatggatgaagcactcgctggggtactgggagaatgagaaggttcgcttggcatacaggccagtccacatgaacacattggacagtgaagttgagtcgttcccacccaaggcgcgtgtttattagttcgggattcacgcagcgccgtaattctgtgtggtgttaataattcaggggctgggcattcctagctgaaagtgcgacctgaattccatcctcctttttccctcggtattttgtgtaatttgctagaaaaataaaggacaaactcatgctaatgctagtgcctaactggtcccttctgggcaacttgtataaatgaaattttgtactgcttgccaatgaacttcgcctcatgcaagtacaatgtggtcatggactcacggtcccctgtgctgtgcttatcaatggcatggaagcaaagcgttttttctttct

SEQ ID NO: 15376 - DNA, 896 bp, Oryza sativa
  ref <308>: DATABASE ACCESSION NUMBER: AK065902
  ref <309>: DATABASE ENTRY DATE: 2001-12-06
gaagcgaagactcgatccagggtctctcaggcctacaagcccacgattaagcccccatcccgtaatcccccacgctccatcgatcgtcgccgcagccgattccttccaaatctcttcacccgattgaggatacatctaatctgagctctctagtctgcagatatggcaagcaaaaggattcagaaggaactcatggatttgcggaaggatccaccaacatcatgcagtgctgggcctgcaggagaggatttattccattggcaggccacaatcatgggccctagcgacagcccctacgctggtggggtgttctttgttaacatccatttcccccctgactacccttttaagcctccaaaagtgaacttccaaacaaaggtgtatcacccaaacatcaactccaatggaagcatttgccttgacatcctcaaggagcagtggagcccagcattgaccatatcaaaggtcctcctatccatcagctctcttctcactgaccccaacccagatgatccccttgtcccagagatcgcccacgtctacaagagccagaggccacgttatgaggagacggcgagggcctggacccagaaatacgcaatgggttagcagctatcattcttgacaacgttgcaccttgcaagaaatcgagtctagttggttgactgtcatgttaagatccaagatggttatgtctctctgaactaattgcccgtttctgtacagtactgtcaaaattgcatcatctgtaaatcccatgttgattcacactttggtttataccctgaagagcgtgcgtgatcatgtcatttgtgattattgtaaccttgtcaagaagccagtcagacttgtatgcatcaacacatatttttcataattttgtggtggtttggtcc

SEQ ID NO: 15377 - DNA, 2736 bp, Oryza sativa
  ref <308>: DATABASE ACCESSION NUMBER: AK065903
  ref <309>: DATABASE ENTRY DATE: 2001-12-06
ggccgctacttccctcccggtataaaccctatccctctccgcctccggcccatcgctttgtcgcgacgcgcgcgcatcgatcccaccgccggcgagggcgagcagtagcggcggcggcggcggcggcgggggcggaggctgatggcgacggcggttgggtcgcagccgcgcgcggccatgtgcggtgccagcacatcgaagatttacactctggagaaagtatatggattcagattagtatgcagaagtgtggttgatctgaggagtcaaaaatttcatacacgtgtttataagagaaagagccatttcaggagttcagcatcagaatgtgagaagatcattcacagtgctagatggctagaatttaggagacagagggtagcatttcagagaactagaaggacaatccatcttattcctttggcttctcaagatgatagcagtggtttatctgttaacggatccccacaagttgattcggcaagcgagatggatgatataagggtgaaattggttaaagcactacaaagcgaggatataagcactggccttgtccaatcaatacatgatgctgcaagatctattgaattggctttcttagatcacagcaaatcatcaaaaaactcttggtttccaaaggaatggcttggtgtggataacaatgaatggataaaaccactctcttaccaggctgctgtcggttcattgttgcaagcagttattgatgtttcatctaggggaaatggcagagatagagatatcaatgtatttgttcagaggagtttatcccgcctacttagttctctagagggtgctatccaaaatgagctgtcgaaaagggaacctacattgtaccagtggtactcatctgatcaaaatcctttggttgtgagaacatttgttaactcttttgaaaacgatccacggtttaactctgcaacagcaatatgccatgaacgccagcaaatgaatactagtgaaagtgacctttctctacttatgctaggtttgacatgtcttgctgctatcacaaagcttggatcaacaaaagtttcttgtcagcagttcttttccatggtccctgatatcattggtcgattcatggatatgcttcttgaatttgtccctctaagtaaagcatataccttgacaaaagatattggtcttcagagagaattcctttgcaattttggtcctcgtgctgctgaccctaagttttccagtgatcgtgaagttgagatatcgttttggattgatctggttcagaaacagttgctacgggctcttgatcgtgaaaagatatggtcaagattgacaacaagtgaaagtattgaggttttggaaaaggatttagcaatttttgggtttttcattgctttaggcagaagtacgcaaacatatttgtcttccaatcatcttaccaatctggatgattcaatcaatgatattgtaaggtatcttattggtgggagtgtgttatattatccacagttgtcttcgattagttcttatcagctgtatgtggaggtagtttgcgaagagctcgagtggcttccattttacagtggtgatgtgccagctgcaacaattgaaggtagagaggatgtgcataaaggagaaataatatcaagagtgctaaatgtgtgctcttattggatgactagttttataaagtacagctcatggcttgagaacccttcaaatgtaaaggcagccagatttctgtccaaggggcattccatgttgagtgattgcatgaaggaactggacttaacaaagtatgatatgccaaaataccaaacctttccagaagccaaagaacacttggttgctaggacagagctagcctcttttgacaagtcacttgaaagtgttgaggaagctttggttaagttagaagatttgctccaagaattgcatctctccagttccaactctggtaaggaggatctaagggctgcatgttctgatcttgaaatgattagaaggctgaagaaagaggctgagtttcttgaggcttcctttcgagcaaaaacagaatttcttgaggctgatgctagtagcagaccattatctcctgctgtcgaggaaggccgtggaaagacagctagcaatgctaatgagagctcaacaccacaaaaaccagcaaacagagtggagaacaaacgtcgtccaatttgggacctctttggtaggccttctggaaggagagttcagcttgtccaacaaacttcagatcaaaatgtttctgtcgctaatgtggataacaaagacacacaatcaaatgatatcctccggtttgaacagttaagacgtgagctgattgagttagagaaaagagttcaaaagagcgcagataatgctcaaaaggaggagacatatgtcgcaaatgaaacattggattcttccgtgtcatcatctcctgtatcaatgccttctggtccagctagcaagaaagaaaatgttattaccaaatcagtagagaaggttaaggaaaccacgacgactgttgtgcaagggacacagctcttagcaattgacacaggagctgctatgggtttgttaagaagagctcttattggggatgaactaactcataaggaaaagcaggctcttcaaagaaccctgacagatttagcctctgttgttcgtataggaatactcatgcttctgccagtaactgctgttgggcatgctgctattttggctttcatccagagatatgtgccttccatg

SEQ ID NO: 15378 - DNA, 3023 bp, Oryza sativa
  ref <308>: DATABASE ACCESSION NUMBER: AK065904
  ref <309>: DATABASE ENTRY DATE: 2001-12-06
cccccgcaccacacgcgccccgtaccccgcacatccacctcctctctctcctccctccgcgccgcgcgcccccaaaccctagaactccacgcacgcgacgcgagctccaatcccacccggtgttccccccctccccctgattcgcctgcaaccaccactcccctctccaatctaatcctcttccggctgtgccgtcctcctgctccgcttcccttttttccgcgagattttgttctgtttgggggagaaactttttttgggtgctttttttttctttggttgtgttgtttcaggagcgcgcgtggcctcggaggattcgcggcggctgggttttggcgcttccgtgaagggtcgtgcccctcccgtctccgacgtccgatctctgtgcgccggggttgtcagctacaatgtcatcataccctgtgctaaacaacagacctattgatcaatggagagttactgatctgaaggatgaacttcgtaagaggaggctccctgttaaaggcttgaaagatggacttgtaaggcgactcttcgagtcaattcagagtgaaaaaggagaagaagaagaagaacaagataatgaaactgtcgaagtgaatccagcagctaaccaggcatctgaaatacagagtgtttctcaggaaactacagtttctattacagaagttcacaaggaaactgtggttcaagtaactcaggaagctacacctcctatcactgaagtaagtcagtcgctcacagtttcagctgccgaagagccccccaaggttaacgcggtggcaacccatgaagctcccttaagcaaggccccaacagacaaaggagaagagccaccaattgcaggagatgtttccacagtggaaaacgaacatcttcatgctgaaaataatactgaaccttttgttgagaagacacaagatgttggcaccaacgaagcaattggtgcccttgatatgaccagtgctgatgtagagtcagacatgacctcttctgatatcaagatagatgctactgaagccagcaaagttcaacaacatgacacagtagcaacaactgtggatgccatcccaacagatgctgatcctatggatactgatgttgcaactgagaaggcggttcttaatgatttgggtgacactacttcagtgtatgatgaagagcgcaaagattctgagctcacgaatgaggacgagaagcccatcgcaccaaaaccaaatgatcaggtacctgaggttagcccagatttagggtctccaattaagtgtgagtcaatttctagcgatgatatatcaactaacaaaaagaataatataaaggataatttgaatgctaataattttgatttagaactagaggctaagccagagatggtaaaaccatcttctggcattacttccataggtggagatttgcagccattggatgatgacaaagatctgggtaaaaaccagtcatctttggaatacatagattccacagctaatgtggatgaaggcggctctccagagaaactaaatttagacaggagttcaggtgatgagtcaatggaggaggatgtcatggagattaagcaagttgagtccaacattaaatctgaaggaacagctgagcttagctcagatcatgtgaaagaggtgtccctccctgatactgttgtggacaattcctctgttgacacgaaagaagttatagctgatgaaaagacagcagcttcaactgaaaagaggaaactcgaagctgaagaaactgttgctgccactgagccaatcaaacgccagcgtcgatgggctgcagatggtgccaaagttccagagagacaaccaataagtcatagtggctctgatgctcctaaggaaaattttcagcctgctttaaaacgatcttttggcaggtctgattcaacagctagtggagattccccaaaggagcgggttgtgccaccatctcagaaacctgcaacagcttccttgagaattgatcgatttgtaaggccatttacgctgaaggctgtgcaagaacttcttggtaaaactggatctctttgtagtttctggatggatcacatcaagacccactgctatgttacgttttcatcagtagaggaagctgtggctactcgggatgctgtctacgatttgcagtggccaccaaacaacggcaatcgtttggttgctgaatttgttgatccccaggaagtgaagctcaaacttgaacctcctccgccagcggcggctcctattagccctgctactacaccaaaggagccaccctttcaacaggctcaggctaatcaaaacatgcctcgtcaagccgctgcaccaagggagcacttgccacctccaccgcctcttactacgcttcctacatctgactcaggatcagcaaaggagaggcttccacccaccccaaagaaacagccggaacctcctgttgtgacactcgatgatctcttcaggaagacacattcttctcctaggatttattaccttcctttatcagaagaggaagtggcagccaagcttgcttcacagggcaaaggcaagagagaatgaggagctgtagcctctttttttcttgtcgctagtatgggggcatgtggaggtatgtagtggttacatacttgcatgtgtacgctgcaggttgtagggctgagagcctgagatctttcttcctaactttccaggaaaaatggtgtattacagctcagcagctggctcttgcagttcatttgaaataacaggaggcggcgactgctgttaggtattttgctgcaagagagagtagctgtaggctagtgtagaagcagcaaatgtattttctacagaaggaatgttttttgttctatcactgtctagtgtgttgcgtctaactcttgttacttggaacgtctgacgtctgagattatggttggtttaaacaatcgggtatggttgcgacttgtgactcctgttataatttaattgcgaggatatttattgtcacattggccattttgcttggtaaattctcacctgtatggg

SEQ ID NO: 15379 - DNA, 1514 bp, Oryza sativa
  ref <308>: DATABASE ACCESSION NUMBER: AK065905
  ref <309>: DATABASE ENTRY DATE: 2001-12-06
ggagtgatcgagcggcgtcgcgggcagggggcaggcaggccactactagtactagtagtagtaaaagatctagcgccgcatacaccaccacacgagacgaagcagcagcggagaggggcctctcgtcggcgacgcacgccggccggaggaggacgacggcgacggcgacggcgaggcttccgctccaaccaaccaaccaaatcacaaccgcatccaccggagggattccctccagatcgccattcgattcgctgctgctgctccgcctcgtcgtcgccgtcgtcgagttcgtctcgcaatcgcctcctcctctccccctgggccgtgcttaggagtatcttcctcgcgactgtgggttagtcctcctagtgggtttatgcatgacagcccctgcagtccttccaaatgagttagaagggatctcccgttctcaaagagtagagctgttccgagacgctagttgcaatatcgaaaaggaggtactgtccagtttagcaaatggccaagattctcatgcttctggaacaaaccctggcttcagagttggagagatcaggctctccaacagggatatttatttcggcacattattggggaacacaccagagggttcagggaggtatgtctggtcagatggttgcacttacgatggtgagtggaggagagggatgaggcatgggcaaggaaagacaatgtggccatctggagccacctacgagggtgagtactctggtggctacatttatggtgaaggcacatataccgggtctgacaacatcgtctacaagggaaggtggaaattgaatcgtaagcatggacttggatgccagacgtaccctaatggagacatgtttgacggttcttggattcagggagaaatagaaggccatggcaagtatacgtgggcaaatggaaacacttacgttggcaatatgaagaatggcaagatgtctgggaagggaactcttacttggaaaaatggggattcatatgaaggaaactggttagatggcatgatgcacgggtatggaatctatacatggaatgagtgtgggtattatgttggtacttggaccaagggactgaaggatgggaaaggcacattctatccaaaaggttgcagagttcctgttaatgatgagctctacatcaataatctaagaaaccgaggtgtgctgcctgacattagaaggcagaatcacggctcacgcatccttcactcttcttcggttgacatggggaacatgaaggttggcttaactcgggaatcttcaggtccttcatctagaaggaactcaagtgagcaacctcattcgaaaaatgtatccttggaaagacggtggagccttgaggtggccattgaaaaattcattggccatgacgcaactggaagctctggcctagaaagatctgaaagcattaatgattctgatctgcctatgctggaacgggaatatatgcaaggtgttctaatcagcgaggtagtacttgacaggagtttttcggattcgtcc

SEQ ID NO: 15380 - DNA, 777 bp, Oryza sativa
  ref <308>: DATABASE ACCESSION NUMBER: AK065906
  ref <309>: DATABASE ENTRY DATE: 2001-12-06
ggggtgcccacctaacctcctccgccgcgggcatcccctcctcgccgcctccgccaacagccgcgaggcgagacgacgatgacgccgcctatggatcccccgccggctcgccccgggcgctcggatctgccgccggctggtctccgggtgagaaggcgcggctcggctcctacctctcccagcgacgcgcgatgacgacgacggcaccgacgcgccgacgacgacaacaccgcctgtgtgtgtgggggtggggggacggaggaggagaggcggcggctcgactctcccctctcccggcgacacgcaacgacgacgacgacgccgccaccgacgcttctgggggaggggggacggaggaggagaagcggcagctcggctcccccttctcctggcgacgcgcaatgacgatgacaacgctgcctgtggggaagccagtggacggaggaggagaggcggcgacgactgtctcgaacggtgccgacgcgacgacgacgatgccgccggttgtgggggagaccggcggatggaggaggagagccatcggtggcacccctttttttatacgctgtaatgtttttcgcaggcgggtgaatctaccgcctgcgaagatggaggtgtcgctagcgaaaataatttttgcaagcctttgcgtataggcggtcctttcccccacctggaaaaactatttttggcgcctgcaaaaacctttttttctagtagtgctattcaattcaaacgaaaatgcatggacgagtacaagctgtattgggtgatttc

SEQ ID NO: 15381 - DNA, 1668 bp, Oryza sativa
  ref <308>: DATABASE ACCESSION NUMBER: AK065907
  ref <309>: DATABASE ENTRY DATE: 2001-12-06
gaggcccgtagcatcacaaattcacaattcacacacaaagcacacagcgccgcacgccaatgcctcctaccatgcttgcatcggtgccgacgaggccgcgctcccatcccttccgccggcggcgaggcgcggcggcggcggctcctcctctgctccctgatcagatcgcggcggcggcggcggcggcagccaagcgacccgcggagtcgtccacctcggcctcctcctgcttccacagcgaggtcatctccgccacctccaccacctgccccgagcagctcgccaacgacgccgagacgaccgcctactcctcagcccgcgaggacctcacgctgtcggagaccgaggaggaggaggaggaggaggaggtgcgcagtggtccctgcatctgcaccgattgctcgtttagcccccttcatgagtcgtcctcgtcgtccgacgacgacaacgccgtgccctcccccaccttctccctgttcctcgccttggcggagcagttcgtccccttcacgcatcccaaaacgcccaccgccacggatgtcgctctacaagcgggagaggggaagagatttgaggacttggacaatgaggtgagctacgagcggttccggcggcgcgagcggcgaggggtggtagcccgcgactacattgaggtgtactcctccatgctcggcagctacggccgcgccgtcgtggagcagcgcgttgtcatggtgaactggatcatggagcattcacaagcgatgaagctgcagccagagaccgtgttcatggggatagggctgatggaccgcttcttgacacgtggatatgtaaagggctctaggaacctgcagttgctgggaatcgcctgcaccaccttggcaacccgcattgaagagaatcaaccctataattgcatccttcaaaaagctttcaaagtagggatcaatacttacagccgaagtgaggtcgtcgccatggagtggctggttcaggaggtccttgacttccagtgctttgtcacaacaacccatcatttcctctggttctatctgaaggctgcgaatgcagatgacagagtcgaggacctggcgaagtacttggccttgctctcacttctggaccacaaacatctctccttctggccctccactgtggcagccgcagtggtagcccttgcttgccttgccacaaacaatgagtcatcatgccatttggttatggagactcacatgagaacgaagaatgatgatctgcctgaatgcctaatgagtctcgaatggttgaccaattatgcttcctgatttgaacaaacccaggtgatatgccgacccaatcttctgcccattcccagaaacacagtgtagtacgtacagagtcgcttaggaggaggtgtatatagtacacgtgcactgtagctaattcttcgtgcatagcattagtttgacagcagggtagaaaagagggcaaagaagccggctaaacgtggttgtgatggcaccagacttatagggagcatcgcaaccacgaaattttgctactactgccggcttcagtgactacgactaacctcctgttgtaagctgtcttaaaatcagccttcgttgtgttaagggcaaccaaaggttgagactttgttgttctaatcaaacatcctgtttacaaattgcaactggtgccagaatg

SEQ ID NO: 15382 - DNA, 2303 bp, Oryza sativa
  ref <308>: DATABASE ACCESSION NUMBER: AK065908
  ref <309>: DATABASE ENTRY DATE: 2001-12-06
gtgggcgcaccaccatacacagcccgaggccgcgcagctctcgaccccgacgcggctcggcagtcggcatcgccaaccctcatctccccccctcctctccaccgacctcgatctcgcccctccccccacgcgcgcgatctcgcccagatctcgctgagccgccgccgccgccgcagcagcagcggccatggagaacctgatctcgctcgtcaacaagctgcagcgggcctgcaccgccctcggcgaccacggcgaggagagcgccctccccaccctctgggactcgctgccggccatcgccgtcgtcggaggccagagttcgggtaaatcctcggtgctggagagcgttgttgggaaggatttcctaccaagaggctcaggcattgtcacccgtcgtcccttggtgctgcagcttcataggatcgacggagacagagaatatgcagagttcatgcaccttcccaggaagagattcactgatttcgctcttgtgaggaaggagatagctgatgaaactgacagagaaactggtcgttcaaagcaaatatcatcggtccctattcatttaagcatatattctccaaatgttgtgaacctgactcttatcgatcttcctgggcttactaaagttgctgttgagggtcagcctgacagtattgttcaggacattgaaaacatggttcgctcgttcatagaaaagcccaattgtatcattctggctgtttctccagccaatcaggatcttgcaacttctgatgcaattaagatttcacgggaagttgaccccaaaggtgaaaggacgtttggtgtgcttacaaaaattgatctaatggacaagggcaccgatgctgttgatatattggaaggcagatcataccggctccaacaacaatggattggtgtcgtcaatcgatctcagcaggatatcaacaagaatgtggacatgattgctgctaggcgcagagagcgtgaatatttttcaactacgccagaatacaagcaccttgctcataggatgggatcagaacatttagcaaagagtctctcgaagcatttggagactgttattaagtcaagaatcccagggctccaatctctcattacaaagacaattgccgaactggagacagaacttaatcgacttgggaagcccattgctacagatgctggaggaaagctgtacacgatcatggaaatatgccgcatgtttgatggtatctacaaagaacatctggatggagtgcgtcctggtggtgagaaaatctatcatgtctttgacaatcagtttcctgtagccattaaacggttgcagtttgacaaacaactggcaatggaaaatgtgaaaaagctcataacggaggctgatggataccaacctcatttaatagctccagagcaaggatatcgacggctcatagagtcttgtcttgttagtatcagaggtcctgctgaggcagctgtggatgcggtccatgcgatactcaaggaattagtgcacaaggccatcaatgaaacacatgagctgaagcagttccccactcttcgtgtggaagtaggcaatgcggcttttgagtcattggacagaatgagggatgaaagcaagaaaaacacattaaagcttgttgatatggaatgcagctacttaaccgtagatttcttcaggaaacttccccaggatgttgagaagggtggaaatccaagccactctatttttgatagataatgattcttatcttagacgaattggaacaacggttctggcatatattaacatggtatgttcaaccttgaggaactctattccgaaatctattgtctactgtcaagtgcgggaggcaaagcgctcactgctcgatcacttctttactgaattgggagcaagagagattaaacaactttctaagcttcttgatgaagaccccgccgtcatggaacggaggactaatcttgcgaagaggctggagctatatcggagtgctcaagcagaaattgatgcggttgcatggtccaaatagtcctgatcatctacttatcatactcatgtttctcctttactcccagttggtgatcctcccctatcttggggcatatatagctgattttacccggttctaggtcattcatagatcaacgcagctgtgaggtgtcatttggtttgtgcttttgttccttgtgcttgaggatctaggagacaccaggctgctgtactttttgtattacgaccaagttcatatatcgtgtttaatttttgtcacagcccattctttcgttccgtttacatatatcgtcttcaatttgttact

SEQ ID NO: 15383 - DNA, 912 bp, Oryza sativa
  ref <308>: DATABASE ACCESSION NUMBER: AK065909
  ref <309>: DATABASE ENTRY DATE: 2001-12-06
gaaaatcccaacagagaagcatttcctcgaacacatcgccgtcgccgccctccatggccgctcccaccgcagcagctctctccaccctctccaccgccagcgtcacctccggcaagcgcttcatcacctcctccttctccctctccttctcctcccgccccctcgcaacaggcgtccgcgccgcgggggcgagagcggcgcggaggtcggcggcgtcggcgtccaccgtggtggcgaccatcgccgtcggagacaagctccccgacgcgacgctgtcctacttcgacccggcggacggcgagctgaagacggtgacggtggcggagctgacggcgggcaggaaggcggtgctgttcgcggtgcccggcgcgttcacgccgacgtgctcgcagaagcacctcccggggttcatcgagaaggccggggagctccacgccaagggggtggacgccattgcctgcgtgtcggtgaacgacgcgttcgtgatgcgcgcgtggaaggagagcctgggcctcggcgacgccgacgtgctcctcctctccgacggcaacctggagctcacgcgcgcgctcggcgtcgagatggacctctccgacaagcccatggggctcggcgtcaggtcgcgccgctacgcgctcctcgccgacgacggcgtcgtcaaggtgctcaacctcgaggagggcggcgccttcaccaccagcagcgccgaggagatgctcaaggcgctctgaagatggaatccgagctctcgtaggtggcaacaatggcaggatcagcccgttgctctcgcgcgttggtgagtagcgtcgtcgttgtgaagaggaaattttgtgtgtgttttttttcggttgaatgttgcatgccatgtgcttgacgaaatgacggaataacaaaagaaaaaaaactactttt

SEQ ID NO: 15384 - DNA, 1730 bp, Oryza sativa
  ref <308>: DATABASE ACCESSION NUMBER: AK098942
  ref <309>: DATABASE ENTRY DATE: 2002-08-28
ggcgcatccgcaaccgcatcgcccattccatttccatggcgctcgccgccgccgccaccaccttccgccctcgcctcgtcgtcaccgccaaagccgacaacaccgacactcgccgtcgccactggaaggccggtgagttccccttccccacctcttccgacactccccgccggagcgcccgcaccgccgagcgtccgcccgataagccgagggatgaagatggggatagcagcaggaggactgggcgcaggcactggaaggcaggcgaattcccgggcacgcaggaggactccaggcgacctcggaggagccccatcaagaacgtcaagaagcggcttgacgcgcgcgccgggccaaggcgtgggcctgcaccgtcaccgaggccctcgctgatcgcatcgacgccaaaaactggcaagaggcgctccaggtcttccagatgctcaaggagcaacctttctatcatcccaaagagggcactttcatgaagctcctcctgctgctgggcaggtcaggccagccttcccgtgctcgctacctcttcgatgagatgctgcagcaaggatgccagcccaccccggagctctacacggccttgattgctgcctactgcaggaatggcctcctcgacgacgccttccgccttcttgccgatatgaaggcctctccggtttgccagcctgacgtctatacctacagcaccatcatcaaggcttgtgttgatgcctcaagatttgacatagtcgatgctatgtacaaagatatggctgaccgctccatagcgcccaacacggtcacgcagaacattgtcctcagtggctatggcagggctggaaggttggatgacatggagaaagtactctctgcaatgctcgacagcacaactagcaaaccagatgtatggactatgaacattatattaagcctatttggtaacaggggtcagattgaatctatggagaagtggtatgagaaattccgaggctatgggatcgaaccggagactcggacactcaacattctcattggcgcatatgggaagaagcggatgtatgacaagatgtctgcagtgatggagtacatgcgcaagttagcgtttccatggaccactgcgacattcaacaatgtgattgaggcattcgctgacgcaggcgatgcaaaaaacatggagcacacatttaaccagatgcgtgcagaggggatgaagccagatacaaagacattttgttgtctcataaatgggtttggcaatgcgggtcttttccataaggtggttggcatggttaagctggctgagaggcttggtgtgccaatggatacaactttccacaatgctgttctcatgacatgtgtaaaagctgaggatttgatggagatggagagggtcttcatgcgcatgaagcaaatacagtgtatcccagatgctacaacatactccattttggtgggagcttatcggaaggaaggaatgactgacaagatctatgttctgcaacaggagaacccgactttggttccaactgaccttgtccatgtgtaactctcaccactgatctgtacgtactctgtactaactaatgtagtgaagcgttttcagattattcagtttcttgatttcagtttttacttttagttgtcatccaagttctgctttgtgcagactgataattttttctttgaaaatgtaatatgacaatgagatgatatgatgtcatgatgatgggatttac

SEQ ID NO: 15385 - DNA, 2215 bp, Oryza sativa
  ref <308>: DATABASE ACCESSION NUMBER: AK065910
  ref <309>: DATABASE ENTRY DATE: 2001-12-06
ggagcggctcacgtgccatctcatctactctatctctcacctccgcccgcctcgtcgtctctctgacaaccgtacagccgcccgccttccgctccgcgccgccgcctccgccgctgccgccgcgcgggcgtacgtgtctatggcgacgatgtctcgccgcgcactcggctctgcgttcgcgggattcacgcggacaccagctatgactccgacggccaccttgccttcctcgtgcgcgtccccggcgcgtctcctgcggtggcgccggagcgcgggtgtaggcgcccggcggttcgcgtccggccgcaacgcgcggattagcatgagcctccgcgccggcatcgtcggcctgcccaacgtcggcaagtccacactcttcaatgccattgtaaggaaccttccctctgcttcttccgaagaattccgtgctgttatgaactcgtttttagctggaagcaactcgaggagaaagaaggcgatcttgattatttgtgcttttgaggagttcttctcgattcatggattggttttggtcgaggatgaagtgggtatgcggcgtcaatggaactgcgcatcaactgtttgattctttgccacacagagatgcagctctccaacgtttgactagttatgaacttatgatgcttaacttagataggactcgtcacagatttttttgcactgaattttcatttccctagctgcaggagtgcttttgcagtcgtgatgattgtttgatgggaagtatagtgaatctttaacgcatgaaaatgcaactgccgtattgcacgggacatgccattcctcgcaataatgtgcatgctattgttgattacgttgtaacatgaattcttttgtcaacgttgtcaggttgaaaatgggaaggcacaagctgcaaactttcccttctgcaccataaaccccaacgttggtgttgtggctatcccagatgctcgcttgcatgtgctctcaaaattaagcaagtctaaggagacaatcccaacatccatagagcttgtggatattgcaggtctcgtcaaaggagcaagcaaaggagagggactaggaaaccaatttctttcgaacatccgtgaggttgattccatccttcaggccttttcaggttgtgcgatgttttgaagatgatgatattgttcatgtgagtgggaaagttgatcccaaatcagatattgatgtaattaatctggagcttatattttctgatcttgaccagatagagaaaagactggataagcttaaaaagagcaaaactaaagaccagcaagtaaaggtcaaggaacaagcagagaggactggattggaaaaaattcagactgtacttatggatggaaaacctgctagatctgttgatttggctgaccatgagaaagaagctatccaacatctttgtctactaactatgaaacctgtcatttatgttgccaacgtaactgaatctgatcttgctgaacctggtaacaaccctcatgtcaaagaggtagccaaactagcaacagacttggaatctggcatggttacaatatcagctcaggttgaggctgaacttgctgaactgccattagaagagagagtcgaatatctaaaatcccttggtgttactgaaagtggactaggaaatttggtaaaggcaacatatgaccttctgggattgaggacttatttcacaactggagataaggaaacaaaagcttggactattcttgcaggcatgactgcacctcaagcagcaggagttattcacagtgactttcagaaaggcttcattagagctgaaactgtatcatatgatgattttgtcgcggcgggttctcttggagttgcaagggagaagggattgttgaggttggaagggaaggattacatcgtgcaggaaggcgatgtcatgcttttccggttcaacgtttgacaacaactcaacaataatagcagcagcgagaagtttcaatatatactcgaattttgcacaagagagaaacagatcatgggatttttttttgtctgagacattaactgtacttgcgtcattggaactttgcggcatcattgctttagcccatggctttgtaaatcattcaagataagctctctacgaaacattagagtataattcgacatacctacttataaactgtcatttgaacattgtaatcttcaatcgaaaatttgatgcgacatcttttttaagtgttaaggg

SEQ ID NO: 15386 - DNA, 1377 bp, Oryza sativa
  ref <308>: DATABASE ACCESSION NUMBER: AK065911
  ref <309>: DATABASE ENTRY DATE: 2001-12-06
cccaaatcagctagagtggtcggctcgacccctcctccacgcctccgcctccgcctccgcctccacgacgtagcccagggcggctagggtttgggtttcctccgccgccgccgccacctcctcctcctcctcgtgcgcggcggcgaccatggcgatggtgcaggccggcatgggcctcacccgcgtcgttgtcctcatcggcgccgggatggccggctccgtcgtcctccgcaacggccgcctctccgagatcctcggcgagctccaggagatactggacagggggagaaggggaaagacggagaagggggcgggggcgccgacatgacggacgcgctcactagacaggtgcgcaacttggctatggaggttaaacaacttgcttcttcccgtggatctataactgttcttaatggaggttctggtcaaacaggggtgtcaggtttgatagtacctgcagcaactgttggagcactcggttatggttacatgtggtggaagggcatctcctttgcggacctaatgtatgtgactaagcgtaacatggcaaatgctgtttccagtatgactaagcatctggagcaagtgcaaacctctcttgctgctgctaaaaggcatttgactcagcgtattgaaaggttggatgataaattggatcagcaaaaggcgctttctggacaaataagagatgatgttactgatgcacgactgaagcttgagaatattggttcagaaattaagaacatcaaacaattggtttggggtctggatgaaaaaatggattcgatggaagccaaacagaacttttcatgtgctggtgtgatgtacctctgccaatttattgagcaaaatggtggaaagctgccagaacgcctggaaggctcaaaaatggctgggaagcgttttggaagccaaaatctcatacaggggttgcaactggccatagaaacagggaattttgacaaggaaacgttcaatgcacttaagaacaactctgattcaagataaacaggtccaacgtctgccaaagtaatttttgtcagggcggtatccgagggcatctcatctttccagaccacgccctccattgaaatgctgtaaaggataatttcttactagtttaacatgtaaaaagttccagccttttcaagttttctgcttgcagaaggtgctgctacattttaaagcttgtgcaatacttagtggttagggtttttttaccgtgctatgctggcaccgcttgtggtttcagaatttcaggcaacactttgccgtaaataaaaggacaacacgtgtggttcgtgtgatgttttcaaacccatttcatgttttatttgtaatatatgctacaagcttacgtagattttcaagtcggct

SEQ ID NO: 15387 - DNA, 2899 bp, Oryza sativa
  ref <308>: DATABASE ACCESSION NUMBER: AK065912
  ref <309>: DATABASE ENTRY DATE: 2001-12-06
gatcagtcgatccccaccgccggcggccatcgtccccggcgttcatctccgtccgccggcgtgctcctcgccccgcatcagcttcgtccgtcgcgggctcgcggctctccggcagcatcagcctcaccccgccgtccctcgtcccggctgccttgtccctcctcgcccatcgccgacgagaagacttgcagttgacctccactctgcacatctgcaagggaagaatgactagtggaatggagcccgttgatgactcagagtgggaggaagttagctccatcaacaactacgcgctgttcatgggacacatgtctatggccgtcaaggggctaggttatcttcttgttttatggaccactgttatccttcttggtggcttcgtctccatactggggaagaaggatttttggtgtctcacaataattacccttgtccagaccgctggagtctccgacatctttctgaacgaaaagctacgatatacttggaggtcgtttttaggctttttctcagctacggatacattggaaacggaaaggggtgccattagctggttctatggccgatcacggtcacgctcctactacctgaacaacctagtagtagttgtcatatggctgctccatttgttcgtgtttgccaccatcatctgccctctagcggtgctctacatgtttgggctgatcatcaccactgccatatccgcgtgtcgtctgatacagcatgactacgggggtgaggtcaacaatggcggcgccaacctgaaatctgcgctgaagttcgtctactccatcgccttgctccagggtgtgctcttctgttaccggttcacattgtgctatgagcagaaaaggctggtggatttggtggttaacaaatatcgctttgttactagtttgagcgagtcagtgatggcgtacatgcaagagacgatgatcgggtgtgagaaggacccgtcattcgtcaaaggaaggaacctggtcacatatgccgtcggtttaaccaagtctggatcccctgatggcttcctctctggggtgaggatcctggactccctcctgaatacgccaatgtacaagtacaatttctttctcgaggttgaggtcgaggtcgaagagcagaaagcaatggtaaagcagctcctcctatcggcatcctacagccaagatggcggcctgcacacactgctgcagtcacttgattgtacgagggcatacaatgccgaggcgagggagcacgctgcaaggatcgtggcgcaccttgctggtgacctccacctggagcagtttccacaagggatccattgcatagcttctctgctcgaaggtccccctaaggattgtgatggcaacatccctgtaaattaccgagaactgatgctgcagggcctgagtatcctcatgaagctcgctgcacacgaggactgtcagcgatccatcaacaagacggagggcctgctagccaagatcatggcgcctctgcggtctggcctgctcaaccacaacgatgaccctaatagtgcgtggttcagaacagtgcatgcttcgatggttgtgattctccggcttgtggatgctcctggccagactggcaaggaactccgccgcaaaatctcaggagacgtggaagccatggctagtatggagaggattctaggttgccaaggatgtgggctcggatcgttccatgatagttccctgtttatgcaagcattggacatttacacacgaatgcacgagcacacgctttctaacatagtgacgagggaatatttcattgagaaattgttactcatcttcactcacaaagtttataaggaggccaacatcatttttgggttggcagtggtaggtgaaaagcttgcgacgctatgttcccatggcaaagcaaatgccaagttaatcttacaagtgaaagatgatgtcgttggtgatctcacaaaaatacttgtacaagacagatatcccaaggaatacagaataagcgccgcgcaaatcctcgagcagctgtgtgttcatcacactgatgatgatgaatatatccagagcctcaaggaagccttaaaggttaagagtccagaggtgcttgtgagaacacttcgtgccgaatctgtggacagacaaatgctggcggcagttttatctctgattgtgacgatgacacgaaacttaatggatgctgaagatttgcctcctcttatcgatgcaattaacagggcagccaacggcttcagcatcttaacggagctccaatcgatggtcacaaagctgtcaatgaagagtaaggtgactatagtgaacagattgaacacattgaagcttatcactgagatattcatactaatcgttagacatggaagccgttacaccgtagaagaagcagagaacttgattaaatcactgtcgaaggctgcgaggaacatgtcggaaatcgaggacatcatggttatctctggctgtagcagcagcctaaagactcttggttccctcgtgaaagaagctgaggaactcctgcctagagcaagggcatccgaaatggaagtgataattgagcatcctagctgtgtcaatcgaaatcagattaattaaatcgtacataatctgtattattttaatccataccctcattggaaaactgtgtgccggggaaatctgataatcgatctgaaaaccgaaattaaaaattactcgtgccggtcagtaataaaatcaaagtgaaaatcggcctttaatcatctgaggccaatgtatagtattttttttcttacacttttgtacattccattttgctgttcttctcttctttttttctactctttcccaatcatgtaacaatgtaacttatcatttctatcaatgaaatggctataaggtagagctggctctacgttcttatgttt

SEQ ID NO: 15388 - DNA, 3570 bp, Oryza sativa
  ref <308>: DATABASE ACCESSION NUMBER: AK065913
  ref <309>: DATABASE ENTRY DATE: 2001-12-06
gggagttcgagttcgattcgattcgattcgatttcgttttctctcaggaaggaacacgagcggttgggttcatccccctcctcgccgtgttcttcgctccgccgccgggcgccgccggatcggtcgccccaccccccccccgccccctccctcccgaagcttctcgaaccttcctcccccctaccaggagccgtcccgaggcggcctagggttcccgcgggcggccgcgcgatttctagggttttgggtcctttgctcggggcatgggccctgcggttcggcggcagtgacgagcggcaagccacctagaggaggagatgattacggagaagccgagctggattcgccacgagggcctgcagatcttctctatcgacatccagccgggcggcatccgcttcgccaccggcggcggcgaccagaagattcgcatatggagcatgaaatcagtggccaaagacaatgacagtgatgattccagccaaaggttgctggctacaattcgagaccattttggaacagtaaactgtgtgagatgggcccatcatggccgctatcttgcttcaggatcggacgatcaagttatccaaattcatgaaagaaaagctggcactggaacatctgaatttggaagtggagaacctccagatgtagaaaactggaaggttgttatgaccttaagagggcatactgccgatgtggttgaccttaattggtcccctgatgactcgacattggctagcggcagtttggataatactgttcacatatggagcatggccaatggcatatgcactgctgtcttgcgagggcattccagtttagttaaaggcgttacatgggatcctatcggttctttcatcgcaagccaatcagatgacaagactgttatcatatggcgtacgagtgactggagtcttgctcacaggacagaaggccattggtcaaaatcgcttggttcgacattttttaggcgacttgcttggtctccctgtggccacttcataaccacaactcatggttttcagaaacctaggcactcagcccctgtgcttgaacggggtgaatggtcagcaacctttgattttctggggcataacgcacctgttgtagtggttaagtttaaccactcaatgttccgtaagcatttatcttctggccaagacgcaaaggctgcaccagctggatgggccaatggagcatcaaaagcatcatctaaagaacatcaaccatataatgttattgctattgggagtcaggaccgaactattactgtctggacgacagcgagtgcccggccattgtttgttgccaagcatttcttcactcaaagtgtggttgatttatcttggagtcctgatggctattcactttttgcctgctctttggatggttcagttgctacctttcactttgaagcaaaggagcttggatacaggttaagggatgctgaactggatgaattgaagaagaatagatatggcgatgttagagggaggcaatcaaatatagctgaaagccctgctcagttactgctagaagaagcatcggccaaacaatctgcaagcaaaaaggtttccagtgtccagcaatttcaatcacccccccaaagtttctacagatgcacctaacccgtctacaagcgttccaaatcagaaagctcctgaagctttacctgaagatgagaagaaaactgcaggttccactgctgatgacataaataaagcacctcgtttatctagtccagtgaaacaaagagaataccggcgtcctgatggccggaaaaggattattccagaggcagttggatttccttccaaccaggacatgtccaaccgttctcagaatcaaggtgtggatttttcatccctggatcagcgaatgatccttggagagaatggaacaagaccatcttatagtgctagcggtaactgtaataattgtggagttagggaacgctctggcattactgcaagaactaacattagtgagagtcttgtaatccaaaaagcttcagctggtgctggcagtgatggaaggttgagcatagaacagtctggatctgtagttccaggctcattggcctcttgctcttcactttctatccatgtattcaataagaaagacaatgaggattctttaccggtccgccttgaagcaaagcctgtagaacgttctgcaggagacatgattgggcttggtggtgctttttcaacaaaagaaactgagattacatgtacaagaggaacagaaactctttggtcagatcgcatctctgccaaggtgactgtcttggctggtaatgcgaatttctgggcagttggctgtgaagatggttgcctgcaggtttacacaaaatgtggaaggcgagcaatgccagcgatgatgatgggatcagcagctgtttttatagactgtgatgagtgttggaaattgcttcttgtaacaaggaggggtttgatgtacatatgggacctctataccaggacttgcgttttgcatgattctttggcttctttggtaacatctccagatgaggcagctggaaaagataccggtacagtaaaggttatatctgctaaattttcaagatgtggctcgcccttagttgtgcttgccagtcgccatgcttttctttatgacaccagcctgaaatgctggctaaggatagctgatgattgctttccagcatcaaattttgctagctcatttagttctactcaaggtggagagctaggcaagttgcagatcgatataggaaaattcatggctagaaagcctatttggagcagggttaccgatgatggggtgcagacacgctcccatttagagacccagctggcagcttcattggctttgaagtctccacaggaatatcgccaatgcctcttatcctacataagatttctggcaagagaggcagatgaatctcgtctacgtgaagtttgtgagagctttcttggtcctccgatgggcatggttgacgctgcatcatctgctgatttgaaaaatccatcatgggatcctgatgttcttggaatgaagaaacacaaactcctaagggaagatatactaccttccatggctacgaaccgcaaggtccaacggctgttaaacgaattcatggacctcctttcggagtacgaggctgctgagacaaacgtcgagcaaatggacgtgacaccaacaccaccaccaccaccaccagcagcagcaacagaaggcaacaataatggtgcctcatagcagttgggattgctggagaattattactgacacccccttgggtaagcataggacaatcaagtgcatacaacatagaactatcatgtgttttgagaattgcccatggttgattaaatttatgtagctgctagagcctttgtgttcatcttcttcttaatagcaaagggtgagacctcagccaaacaacccgttagttgtaacgcgagcagagtgtaacagtagaaagaaagcgagcgagggaggcctcctggtgatcgattgtgtaacagtaaatctgtagaaggtcagacgattaacttaatgtcctttttgcttatgggttcc

SEQ ID NO: 15389 - DNA, 2549 bp, Oryza sativa
  ref <308>: DATABASE ACCESSION NUMBER: AK065914
  ref <309>: DATABASE ENTRY DATE: 2001-12-06
gacgcgtggtccttcacctccctgtgcgagggcgccaggataggaaggagaaggtaccctactttcaaccctagaaaaataatttcgttttcgaaatctcaggaattggatcgatgaataagattgggagcggcgagcgagtgatgatgatgctgtagtccagttccaacctcgaattatcccattttttctccgtattctgtcccaaaacgccaaaatccatggtccgaatcacctaaccagcctttggtttgtctggtcgatccctcgaggttcatcctcctcttgctccccactatcgagctttctggaaatccatcccgactttgatttttttttctttctctgatgatgctgttggtgattccttggattggttgagagttattctgttctggtctgaatcctaatctccctgcaatccaatccgtacagttcgttgcggtgtgtacttctctgctggcctgtgtggtgaggtgatagctagactaataggaagatgaagcgcaagcgtgggcgtaagatgggcaagaagggcaagtcgaaagcttccaccacagcggatgcttctccaatgtccctgtccagcccgagcaccgtggatgcttcctcaaaatccccctccagcccaagcacagaggagaacggcaccagcccagcgcatcatcaggcagataatgcgcctgttattgctccgccaccagtgcctgaaccggcacctcctgagccggagaagccagccgtgtctactgacgtacagaatgctaagccaaaagtctatagccgagtcaggttgaagttcaaatctgccaaagtgttggagacgcaccagggtccttcagaagcaaaagcacctgttgatggtggtggtggtaaacctgcaagtgctgcgcctgaagcgagcaaagaagttgttgcggagaaggctattgtatcaccagacggacagaaagatgcgcaggcagcagaattgagtggttctgataaggataaggtggcaagaaaagtagcaagcataaagatcaagtctgtaggattatcttcggtagaagataaaaaccaggacaggaaagctgattcagtcagtgaacctcttccaagcaagcaggaaactgtattggaaaatgtagaaagcgagactgcattggagctgagaagctcacaagagttggaggtaaagcaggctacgccagaacgtcagcgagatgacagagagctaactgctgcacttgaagctattaagaaagtcatgaagatggatgcagctgagccgttcaacacaccggtggatcctgttgctctaggaatacctgattattttgatattattgatactcctatggattttggcacaatatgtcaaaatctagaacgtggtgataagtatatgaactcagaggatgtgtataaggacgtgcaatttatatgggataattgtaccaagtacaacagtaaaggtgattacattatagagcttatgaaacgggtgaagaagggcttcatgaaaaactggctggcagcaggcttgtattctgatgtgcaggagaatggtggcaatgataacacaggcgatgaggatgtcaaaggttcaaaaggcaagtctaagcaaaaacggcggcgcctagggaatgattgacacaaaaatgactgtgcatgtgctgtttgtcaagttacacgccgcaaaaaggaaaaggatgaaatcttggctgtcattgaaaacgatacagctgcagtgaatagtaacatttctgaccagcaaatcatggaggtagactcaggcattaataatgctggtagtcatgacactacctctagtcaggagcaaccaccacaaactgatatgtacagaagaacagcggtagcagatgattcagggactcagatagaaaatcatgtgaaattcttcaacaaccagccactgccacatgattatgaggatgaaggctccagaccatactttgacgaaaaagaagaggtagactatacagatttgatcagtcaggaggaacatacatccagtcagcccaatgatggctccgaagttgctcaacaccaacataaggagccaacagaaacaaacaagccaggagattgaaatggaggattatcccatacagaaggagaaccaatcattcttgcaactctgcgcacggcttttccccagcaaccagagttctgttttcaggggacgccattctctgttccaacagcaacagcggcaggtttcaatgaagggaagtcctctgtctgcggccataacagcgataatgaaacggtaggaattttgtccctccaatggctgcttagcagcggccgtttcgtgtaaaggaagctcaaggtggcgttgtgactttgggaaagaaagctgtaccctgaagtcacgggagctggttggaataaaacaggttagttgaaacatatctttgagctcagaggctatagcttgatttaggtacgaaattagttgggagatacctgtctattgtatgacaattatctatgtgtaaggctgtaagcttcatatttgtatcaagataattgtgatagtc

SEQ ID NO: 15390 - DNA, 707 bp, Oryza sativa
  ref <308>: DATABASE ACCESSION NUMBER: AK065915
  ref <309>: DATABASE ENTRY DATE: 2001-12-06
gcctacaccggcgacagctccagcaacagcaacagcacggcgtggacatgcggcagcgtcgtcgtcggcggcgcgggcgagctgccgccgccgccgctgctgccgcacatggacatgttcggccgggtcgacgccgagccgccgccgtacccgccgttcgacgtccaggccaggttcagcccctggcaccaccaccaccaccaccaccacgagccgacgctgccgacgccgccgcaaaggttggacggcggcggcggcgccgcggcgagcttcccgatccggtcgctgtcgcgggacatgccggagtcctgcttcgacctcggccgcggcgcgctcgacgacgagttcggcgtcgacttcctctgacctctcgagatcgcaagcgcgtgcaagtgtaaccggacacgtaacacggccacgtatacgcatggaccacgctgtctgccacggaagatcgacggtcagaagagacgacacgtgtcaggaatcggacggttctcgcaccgttgtggttacatatacttacaatccccactactcgcacactttttttattattattggactaagttgttcaattaattaactctttctttggtatagcagtgcgtgtgtgcgcataataagggttacatatatatatgctcaaatgtttttcgccagaatagctatatacatatatacatttgatgaaattattaattttc

SEQ ID NO: 15391 - DNA, 1324 bp, Oryza sativa
  ref <308>: DATABASE ACCESSION NUMBER: AK065916
  ref <309>: DATABASE ENTRY DATE: 2001-12-06
gccgcttcccaccaaaccgagcgccatcgcgatgccacctcccgccgtgagcacggcgccggtagctccggtcgtcgcgtcgtcgtcatcggcggcggcggcggcgccccgtagacctcgctcgctccgcctccgcgtgaccccgtacgcctccgtatcctcgtcgtcctccccttccaccttcgccgtctccatcccaccgccgcctccagcgaggcattcccgcaagcagctggtgggcagggacggcgcccccgcgaagcccgcgaaacctcgggtgttcttcctcgacgtcaaccctctctgcttccgcggatcccagcgcagcctcggcgccttcgcgcgctggctcgcgctcttcttcgcgcacgtcagcctccgcgaccccgtcgtcgccgttttggacggggagggcgggaacgagtaccggcggcggctgctaccgtcctacaaggcgcaccgacctcgtggccctggtacaggcgccgattcgcgcgttatcgatgttcttcgcgagtgcaatgttccggtcgtcagagtcgatgggtatgaggcagatgatgtagtggctaccttaacagagcaagttttacagaaaggttttagagttgtcattggctcaccagataaagacttcaagcagctgatatctgaagatgttcagttagttatgcccattcctgagattggccgttggtccttttatacgctgaggcattatgttgcacagtacaagtgtgacccaaccgcagatttgagcctcaggtgcttcataggtgatgaagcagatggtattccaggaatacagcaccttgttcctggttttggtcggaaaactgcagtgaaacttctaaagaaacatggttcattggaaaatttgcttaatacagctgcagttagaactgttggcaaggactatgcccaggatgctctagttaagcatgcagattacctgcggaaaaattatgaagttctcagcttgaagagggatgtaaaagttcagcttgatgacagatggttatccacaagggactcttgcaacgacagcagtgttttgtctgacttcatccttaaatttaacgaagggcagaatatcaggtaaaactcaaattctgtaccgaccatgtttcttcatcacaatctctatgtaaattcaataaaaacgaggagttggtagttgaaatattagttagaaatagctagttcctgtcactctgattgtgccgttcacttgttttggtatttttttagtttttttttcagagaattttgtaacatatcctttctggtaaaaatatgaaaatggaaatctttctacactggc

SEQ ID NO: 15392 - DNA, 1132 bp, Oryza sativa
  ref <308>: DATABASE ACCESSION NUMBER: AK065917
  ref <309>: DATABASE ENTRY DATE: 2001-12-06
gcattggaggctggtttaccaaagggtgtgttgaacattgttcatggtacccatgatgttgtgaacaacatttgtgatgacgaggacatcaaggcagtttcctttgttggttccaatatagctggtatgcatatatattctagagcatcggcaaaggggaagcgtgttcagtctaatatgggtgcaaagaatcatgcaattatccttcctgatgctgaccgagatgccacactgaatgcccttattgctgctggttttggtgctgctgggcaaaggtgtatggcattgagcactgctgtttttgttggaggttcagagccatgggaggatgagctagtcaaacgtgcaagcagccttgtggttaattcaggaatggctagtgatgcagaccttggtccagtgatcagcaaacaggctaaggaacgtatctgcaaattaatacaaagtggtgctgataatggtgctcgtgtgctgcttgatggaagagatattgtggttcctaacttcgagaatggtaattttgttggtccaacactccttgctgatgttaaaagtgaaatggaatgttacaaggaggagatttttggtccagttcttctcttgatgaaggctgagagcctagatgatgctatccaaattgtgaacagaaacaaatatggcaatggagcatccatatttacaacatctggtgtgtctgcaaggaaatttcaaacagacattgaagctggccaggtgggcatcaacgtgccgattccagtacccctgccgttcttctccttcaccggcagcaaagcctcctttgcaggagacttgaatttctacggcaaggcgggcgtgcagttcttcacccagatcaagacggtcacgcagcagtggaaggagtcgccggctcagcgcgtctccctctccatgcccacctcgcagaagtgaggtgaaaaaaaagaaaggcatcttgtacgttcttcatttgcccatccatggaaatagacacatgcaccaatgcgaaatgaacagaagaataatcgataggcgcgggatgccatgccatgccaataaaggtagctggtctcgtatttgcatatgcctcatttcaagcatttgcgaaatgaggttatctagatttgtatggctc

SEQ ID NO: 15393 - DNA, 1587 bp, Oryza sativa
  ref <308>: DATABASE ACCESSION NUMBER: AK065918
  ref <309>: DATABASE ENTRY DATE: 2001-12-06
gcagagcaggacacgcacgaaagaaataggcagcgtcttccccttccctttgtggcgtaaaagaaaagaaaatctcccgtctcttcgtctcctccgctccttgcgccgccaagaagacgagtcgggggcggcgatctccatctggcgagcagagcaggggaggggaggggatcctggctcagtcttgcgactttcttgctgtataatgagatcatatctttgagtgctcaatgatgtcaacactaattgatggtctccctaatgaagttgctcttcagtgccttgcacgggtgccatttttgtcccatcctgttcttcaaatggtctgccattcttggagagcatctgttcgaaatggtgagctttccaaagttaggaatcagattagtgcgactgaagacctgttatgtgtgttagcatttgaacctgaaaacatgtggcagctttatgaccctcttcgagataagtggataacccttcctgtcatgccatctcagattaggaatattgctcgttttggagtggcctcggttgcaggcaagctctatgtaattggtggtggcagtgatcgagttgacccacttactggagaccatgacaggatctttgcaagcaatgaggtttggtcttatgatcctctctgtcgtttatgggtccagagggctccaatgcttgtagctcgcgcaatgtttgcctgttgtgcactggatgggaacataattgttgctgggggcttcacaaattgccgcaaatcaatatcaaaggctgagatttataaccctgaagctgacacgtgggagcctctccctgacctacgtcaagcacacagctctgcatgctctggacttgtcataaagggtaagatgcatgtattgcacaaaggcctaccaacagtgcagattcttgaagatggcaatgcttgggctgttgaggactactcttggctgcaaggtccgatggcaatggttcgtggggagctttatgtgctgagcaatagttgcattatgaagcagcgtggtgtgaatttccctgataagatggtgtcgtgtgcatctgaattccaaagcaggataggttttgggatgattggtttgggagacaacatatatctggttggtggagtaattggacctgggccaagaaatcagtgcatcaagccactatctgatgttgatatcttgaatgttactagtgagagaccaacctggctaccaggatcaccaatgacacattgtcgagggagcatttctggttgtgctttgctgaggatttagcctcattcaacgttgctcccatgctggtatcttactgttgctgaagggaaagattgcagatagcttttaatggttctgcctttcgttttatttgaaaagaagtctgttaattattgttcaattttgaattgcctgttgtattgaggacatatatgttggtcatggttcaatgctagattaccagtcatatcctgtatttatcttgaatttggatctggatccaaacgtagtactttatgtgcatttgtaattgtatcatccttgcaactctgtcctggatgtgaagtttttcatgtattcctaatttaaattc

SEQ ID NO: 15394 - DNA, 2589 bp, Oryza sativa
  ref <308>: DATABASE ACCESSION NUMBER: AK065919
  ref <309>: DATABASE ENTRY DATE: 2001-12-06
aggacgacggcgcgagcgacccaaacctaaacctcccaacccctcctcctccgccgccgacgccgccgcagctgccatgtcgaagaaatcacgcggcgggggcgggggcgccgccgccggcgaggatcccgaggacctctcccgctcgcccctccaggccgtcctcctcgccgacagcttcacgctcaagttccgccccatcaccctcgagcgccccaaggtgctgctgccgctggtgaatgtcccgatgatcgagtacacgctctcgtggctggaatcggcgggggtagaggagtgcttcgtcttctgctgcgcgcacgcacagcaggtcaaggagcacctggggaaggcggggtggaccgggaagcctgcggcgagggagatgaccgtcacggctgtggaatcgcacgacgcgatcagcgcgggcgacgcgctgcgcgtcatgtacggccgtggagttatacatggagattttgttctaatcagtggtgataccatcagcaacatgaatttgaaagacgctctccaggaacataaggatagaaggaaaaaggacccacttgctgtcatgactatggttataaagcattcaaaaccttcgatcctaacgaaccaaacacggttaggtaatgacgaaattgttatggcgatagatcctgagactaaagaactactgtattacgaggacagggcagatgtctcaaacctgtatgtgacaattgataaggacatactggccagtaatcctactctccaattgcataataacatggaggactgctatattgatatatgctcaccagaagttcttagtctttttacggataactttgattaccaacatcttcggcgccatttcgttaagggtttactagttgatgatattatggggtataaaatatatacccatgaaatacgctcaagttatgctgccagaatagataattttaggagctatgatactgtgagtaaggatataattcaaaggtggacttaccctatggtgcctgatgtcctgtctttcggtgatcgtcaagaaatcaaacttcatcggcagggaatctataaggcatcagatgtaacactgtcacattctgcacaaattggtgccaattctgttgttggcaatgggacaagcgttggagaaaactgcaaggtatccaattcagttataggacaaggctgcaatattgggaaaaatgttttgattcatggatcctatatatgggacaatgtcacaattgaagatggatgcaaagtgagtaattcactagtctgtgatggcgttcatttaggggcaggggctattgttgaacctggctgcatactgtcatttaaggttgaagttggaaagaatgttgttgttcctgcctattcaaaagtggcattgctccctcagccttcaaatgaagacagtgatgaggagcttgagtatgctgacaccaattctggagttacagatagtccacccttttccagcatgaggagtgctgaccacccaactgtatctgatgatgatgacttagaggcatcggagactggaacatgtggtgtcgttggttacgtatgggaaaatgttgatgctggaattcaggaagaatggagacaatcaattgctccaattcctaaagataagcttgaagagttgcagcatgctgcgtcttttgatgacgatgatgatggatcagaagatgactttaaaaatcggccaactgtactggaccaagatgatgattctgatgttagcgcggttgaggatgatgattattctaagtttgagaaagaggtggaagagactttccaaagggcgttggatggtatccatcaagataacttgatactagaaattaatgcactcaggttatcttatagccttcaacatgcagactgtgctggagctttgttccattccgttatgagaagtgcattagtggctgcacaatctactaatggtaaccttctaaagacaactgcagaagcacttggcaaatggaaggacctactgcgaaattacaccaagtcagttgatgaggagatggaaatattattgaagttcgaggaaatgtgccaagaaaatacaaaagaattttctccactattttcaaagatcttgccttacctctatgataaggaggtagtaagtgaagacgcaattttgagatgggcggaggagaaagaaaatgccgatgaatctgataaggttttcgtcaaacaatctgaagctttcattcagtggcttaaggaagctgaagaggaagatgaagaagaggagtagagctggagcttatgcttgcattcctttgagctcttggagaaatgcagcatttgccttgtttgaatggtctgccggtgagtttgcaagcggcaagttttgaaaacctaattgtttgtacattaatttaatggcatttttgttcctaaccaatctggtaaaagaaaggagcaacattgcccacgagccatgggttaaaacgactgtagagtgtagataagttaaaaccctttttcctatgtttgcttcgctgatgcttccatgaagttattttttccttctgatgaatttgtttaactgcccatctgtttctttgc

SEQ ID NO: 15395 - DNA, 1758 bp, Oryza sativa
  ref <308>: DATABASE ACCESSION NUMBER: AK065920
  ref <309>: DATABASE ENTRY DATE: 2001-12-06
ggctgcacgcctttccgcgatttcgtcagttacccagatctcatcttacgcaggcagagatggctgtcactagaattggtcttgctggccttgcggtcatggggcagaaccttgccctcaacattgcagagaaagggttccctatctctgtctacaacaggacgacttctaaggttgatgagaccgttcagcgcgccaaggtagaaggaaaccttcctgtgtacgggttccatgaccctgcatcctttgtgaactccattcagaagccacgtgttgtcatcatgcttgtcaaggctggtgcaccagtggaccagaccattgcaactcttgcagcacacttggagcagggtgactgtattattgatggaggaaatgagtggtacgagaacactgagaggagggagaaggcaatggaggagcgtggcctcctctatcttgggatgggtgtttccggaggagaggagggtgcccgcaatggcccgtccttgatgcctggtggctcattcgaggcgtacaagtacattgaagatattcttctcaaggtggctgcccaggttcctgatagtggcccgtgcgtcacatacattggcaaaggtggatctggaaactttgtcaagatggttcacaacggaattgagtatggtgacatgcaactgatttctgaggcatatgatgttctcaagtcagttggtaagctcacaaacagtgagctgcagcaggtgttttctgagtggaacaagggtgagctcctcagtttcctgattgagatcacagccgacatatttagcatcaaggatgaccagggttcaggccacctggtcgacaaggtcctggacaagactgggatgaagggaactgggaagtggactgtgcagcaggccgcagagctttctgtggctgctcctacaattgaggcatccttggattccaggttcctcagtgggttgaaggatgagcgtgttgaggctgccaaggtcttccaaggtgacttctccagcaacttgccagtggacaaggcacagctgattgaagacgtgaggcaggctctttacgcctcgaagatctgcagctacgctcagggcatgaacatcatcaaggccaagagcatggagaaagggtggagcctcaacctcggtgagctagcgaggatctggaagggagggtgcatcatccgtgccatcttcctggaccgcatcaagaaggcctacgacaggaactccgacctcgccaacctgctcgtggaccctgagttcgctcaggagatcatggacaggcaagcggcatggcgcagggtggtctgccttgccatcaacaatggcgtcagcaccccaggcatgtcggcgagtctcgcgtacttcgactcctaccggagggacaggctgcctgccaacctggtgcaggcacagagggactatttcggggctcacacctacgagagggtcgacatgcccggctccttccacaccgagtggttcaagatcgcgcgtgctgctaagatgtgaaatgcttcaaattttcggtaatatttggttgctgcttgctgctgagtcgcttgtagggtgggaggaactgttgttaaattttatggtcaatgtgctacgcttaatttggataaggaggtccatagctatctccattcttttaatgtaaggagcagcccagggtggagagaacatggatatttatcattggaacctttgttgtgatctttgtaagtctatatatgaataaaagcattttggcaatgcttgctttttt

SEQ ID NO: 15396 - DNA, 2064 bp, Oryza sativa
  ref <308>: DATABASE ACCESSION NUMBER: AK098943
  ref <309>: DATABASE ENTRY DATE: 2002-08-28
ggtcatattttaccctgctttcctctgccactcgatcgccacggctcgcaggacaagaggccatatggcgctcgctctcgctcacctcatccttgccgccgcattgccgctgctcttcctctcacgtgcaggtaaacggtgtagttgcagctctgtatcaacggcagtgtggtgcgttgtttttttttgtttttctttgcttataatatatcgacgtgtaattcttttgcgtgttcgcgaaaaatgtttttcttgcactgcagatgggggcgaggtgggcgtgtgctacgggagggatgggaataatctgatagatccaccgtccgtggttagccttctcaaggcaaagggtatcaccatggtgaggatctacgacgccgacccgaccgtgctaaacgcgctggccaaccaaaacatcaaggtgatggtggcgatgtccaatagagatctagtagctggctccgccaaggatttcaatagtgcgctcagttgggtgaaaaactacgtgttgccgtactaccgttcctcacaaattaacggcgtggccgtggggaacgaggtgtttcagcaagcacctgacctgacctcacagctggtatcggccatgaggaatgtgcaggcggcgctggcgaggctgggcctcgccgacgcaataaaggtatcaacacccattagttttgattcagtcaaggtgtcattcccgccatccgcaggtgtgttccaagataacatcgcccagtcggtgatgagtcccatgatcgacttcttgcaacaaaccaactcctatctcatggttaatttctacccatatattgcctgggctaattctaatggccaaatctctcgtgattatgctgtatttggccccaacgcctctcctgtggtcgatcaagcaagtggcatcacataccatagcctctttgatgctcagctagatgctgtttacttcgctatagaccatgtttcaggtggtagtgtgagagtctcaatggcccaagcaagacgggggcgcccgtctccaaggatacccgtgaaatgttcagaatgtgggcatccctctggtggtcggctccctcagttgtccacactagatgatgttcaagtagacgtggctacaaaagccaacgcccaagcttttaacaatggtcttatcagtcgtgcactattcggagccaccggtatgcctgatgtctccgtatacatctttgctcttttcaacgagaatttgaagggcggagcatctgtagaacaaaactttggcttattctacccagacgggacggaggtttaccaagttgactttcacaatggtggtggtggtaatgtttgccctacaaaagcaagttggtgtgtggcaaattcagcagttgggagcacccggctgcaagcagcgttggattgggcttgcagtaatggtgcagattgtggtgctatccaaccaggcaagacatgctttgcaccaaacaccttggtcgcacacgcatcttacgcgtttaatgactactaccaacgtaagagccaagctagcggtacatgtgacttctctggtgctgcttttattgtctacaagccttcaccaagtatctgcgacccgaacccaagctggtgcattgcgaaaccggaggttggggacacacgtttgcagaatgcgctagactatgcatgcggtagctgcgcagattgcagcgctatccagcgtggtgcgcaatgctttgaccctgacaccaaggtagcgcatgcaacctatgcattcaacgactattatcagactaccggtcgtgccagtgggtcatgtgattttaacggcgctgctaccattgtcacacaacaaccaaagattggaaactgcgtactctcaccaaacaactcttgaatgtacagaggactcggcagtaagaggatgggattgaagaataagtccatattctctaagaaaggaataagtccatattatggtcaaataaaaataaggacgacattgtatgtattccggtttggaattttaagtaagtaataaatgtatcgttcactcgtgttgaaatgaataagaaacttaattactcg

SEQ ID NO: 15397 - DNA, 1013 bp, Oryza sativa
  ref <308>: DATABASE ACCESSION NUMBER: AK065921
  ref <309>: DATABASE ENTRY DATE: 2001-12-06
gaattcatctccacattcttcattctccattaatttcacggtttcatctcgacatctcatcatctgttttaagttgctagctgaggatgaggagcaggtgccagcaatggcgtcgtcaaagccaatcctgtacggtgcctggatcagctcctgctctcaccgaatccggatcgttctcaatctcaaaggtgtggattatgagtacaagtcagtcaatcctcgaacagatccagactatgagaaaatcaatccaattaagtacataccagcattagtagatggagacctagttgtttctgactctctcgccattgcattgtatcttgaagataaataccctcaacatgctctcctacctaaggatctcaaaaagaaagctcttaatcttcagattgcaaacatagtttgttcaagcatccaacctctccaaggttatgctgtaattggtttgcatgagggtaagctaagccccgatgagagtcttcagatagttcagcattatattgataagggcttcaaagcaatcgaaaagcttttagaaggatccaactttaaatatgctactggggacgaagttcaattgggggatgtgtttctagcaccacagatccatgctggcataaatcgcttccaaattgatatcacaaagtacccaaatttggcaagactccatgacacatacatggaaattcctgcatttcaggcagcacttccaaagaatcagccagatgcaccttcatgctaaaatcaagattgcaaacaagctgccatatccaaaggtgcaagacctgcttgcccttgtataagagggtcagtgtttgagaatgtggctctccaccaaccatgtcatattgtcattttgcatgaatgtctaagtttgttagttctaaaaacagcagaaatgtgttaacagatgttttgaatgtatgtaactggggttccacaaatcaaatataagcagctcaactcaagtgctcagtcacactttggtaataaatacggaatttgtcacc

SEQ ID NO: 15398 - DNA, 1500 bp, Oryza sativa
  ref <308>: DATABASE ACCESSION NUMBER: AK065922
  ref <309>: DATABASE ENTRY DATE: 2001-12-06
ggttagtcccccctacgcctccgccgccgccgccgccgccgcaatgaactccggagacgccgaggcagcagcggcctccaagaaggcccggtgcaagaaggagaagaaaaagaagcgaaaggacgactgcggagccgcagaggcttcagcggctgacgaagaaatcgtccacgacaagaagaggaagaagcagctgcaacagaagaagaacggagatgacgtggcggttccgaatcggaagaccacggtgagcatcgccgtcgccggatccatcatcgacaacgcccagtccctcgagctcgccaccctcctggcaggacaaatcgcccgcgcggcgaccgtcttccgcatcgacgaggttgtggtcttcgacagcaattcctcagtggagaacagcggcgatgacgtagagagtggcgcgcgcttccttgttcgcatcctacagtatctggagactccacaatacctgcgccgacgccttttcccgatgcacaacaacttgaagtttgtggggttgctgcccccactcgatgcaccacaccatttgcgcaagcatgagtggtctgaatttcgtgaaggcgtaacattggatggggatcgttcaatggggacatttgttgatgtcggattgagtaagaatgttctggttgagcaaatgctagaaccagggaagagagtaactattgccatgggtaccaatcgtgacattacaacagcttgcaaaaggaaaattgtttccccttcctctcccagggatgaaatggaattgtattggggctataaggtcaggtatgcttcaaatttgggtggagttttcagtgattcaccatacaaggaaggatatgattatatcattggtacttcagagcatggaaagatcattagttcatctgagctgatcttaccttcctttaggcaccttttaattgcgtttggtggattggctggtctagaagaatgcattgaagaagatagaaatttgaagggtaaaggtgtagatgatgtatttaatacctatttgaatacatgtcccagtcaagggagcagaacaataagaacggaggaagcacttctcatctctctccaatacttccaagaccccattaggcgagctggatagcaaatgtgggaacagttgcaaacttaacaattagatgcaaaacgaaaggtgtgctagtgtggttcaattccctcggtggaatatgctcatggtcattatgttccagtgaaaaggcacttcatcttcagtgatctcaacacttattttcgaacacctgtgtttatttcactgaaagagagctttaggcggtcgtttacccatttcaactattgaaatctttttgctgggcaaaccttgggcaggtagattgtttcgtgcctaagagcagctatggacagttgttaaacgcttattgggtagccatgttttagtgaagattgttttctgaccatccaattgcatctatcccaaatcatgatatacatataaattaaatcttg

SEQ ID NO: 15399 - DNA, 726 bp, Oryza sativa
  ref <308>: DATABASE ACCESSION NUMBER: AK065923
  ref <309>: DATABASE ENTRY DATE: 2001-12-06
gtatatcatgtgacatgtgtgacagtctgagagctttcgtcctcctccattccacaccaagccggccatggctaaggtagctctcagctccctcctcgccgtcggtggcgccgccgccttcgccgttcagccgtcgaagaaaaccggctccggtttgtttcgcaatcgcgtcatcaccgtcaggcggcccaggatttcagccaatctcggtggagatggggaggtgaagcctgcaggtaacaagaagaagttcatcaccagagaagaggagccagagcagtattggcaggcggcaggggagaggaagggcgagaacccgatgaagacgccgctgccctacatcatcatctttggcatgtcgacgcccttcgtcatcctcgccatcgccttcgctaatggctggatcaaggtccccgtccggtgaacctcctcccgtccatgtcgcatcatcatcagttcatcacatcagcaaatcttggaaggttgctacttgctgccaagaaactcctcactgcgaccactgcactcctaccgggagccctgaagagtaaaatttcatagagatcttgagcataccagtacgtaatgtatgtgataaacaagtaccttttttcccagtactgtaaatctgtaagtaattacagttcatattaacatccttcctgcttctgatccaaggaggttttgtcatgtacaagaggaggtttttatggcatcagctttgtc
